United States Patent Application Publication US 2026/0327638 A1, published October 22, 2026 (application 19/478,907).

The application's sequence listing, which the Patent Office published only in electronic form, follows.

SEQUENCE LISTING (1538 sequences)

SEQ ID NO: 1 - DNA, 134 bp, Tobacco mosaic virus
  source 1..134: mol_type = other DNA
taggtttgagagagaagattacaaacgtgagagacggagggcccatggaacttacagaagaagtcgttgatgagttcatggaagatgtccctatgtcgatcaggcttgcaaagtttcgatctcgaaccggaaaa

SEQ ID NO: 2 - DNA, 198 bp, Tobacco mild green mosaic virus
  source 1..198: mol_type = other DNA
aaggtttgagggaacgtattttgagtgtgacagacggctcgccaattgaactcactgaaaaggttgttgaggagttcgtggatgaagtaccaatggctgtgaaactcgaaaaggttccggaaaacaaaaaagaaatggtaggtaataatgttaataataagaaaataaataacagtggtaagaagggttttaaaattg

SEQ ID NO: 3 - DNA, 133 bp, Tomato mosaic virus
  source 1..133: mol_type = other DNA
tgggtttgagggagaaagtaacgagtgtgaacgatggaggacccatggaactttcagaagaagttgttgatgagttcatggagaatgttccaatgtcggttagactcgcaaagtttcgaaccaaatcctcaaa

SEQ ID NO: 4 - DNA, 134 bp, Pepper mild mottle virus
  source 1..134: mol_type = other DNA
taggcttgagagagaaaattactagtgtgtcagaaggaggacccgttgaacttacagaagcagtcgttgatgagttcatcgaatcagttccaatggctgacagattacgtaaatttcgcaatcaatctaagaaa

SEQ ID NO: 5 - DNA, 139 bp, Paprika mild mottle virus
  source 1..139: mol_type = other DNA
aaggtttacgagagaaagtgactacagtgtcagaggacagcgctattgaacttacagaggaagttgttgatgagttcatagaggcagtaccgatggcacgtcggttgcaaaatttcaggaaacccaaaaataatattag

SEQ ID NO: 6 - DNA, 134 bp, Bell pepper mottle virus
  source 1..134: mol_type = other DNA
tgggtttgagggagaagattacaagagtaaccgacgccgggcctatggaacttactgaagaagttgttgatgagttcatagagaatgtcccgatggcggcaaggcttgcaagatttcgaaccaaatcctcaaaa

SEQ ID NO: 7 - DNA, 138 bp, Tomato mottle mosaic virus
  source 1..138: mol_type = other DNA
tgggtttgagggagaagattacaagagtggatgacgcaggtcccattgaacttaccgaagaagttgttgatgagttcatggagagtgtgcctatgtcagtcaggcttgctaaatttcgaaccaaatcctcaaaaagag

SEQ ID NO: 8 - DNA, 135 bp, Odontoglossum ringspot virus
  source 1..135: mol_type = other DNA
tcggactgagagagaagattttgaacgtaacagaaggagggcccaccgaacttactgaagcagttgttgatagattcgtggagaaagttcctatggctgctaggctcaagtcttttcgctctgtcaacaaaaaga

SEQ ID NO: 9 - DNA, 201 bp, Obuda pepper virus
  source 1..201: mol_type = other DNA
agggtctaagagagaaggtgactgccgtgtccgaagacgacgctatagaactcacagaagaggttgttgatgagtttatagaagccgtaccgatggcgcgacgtttgcagaacttgagaaaacccaagtacaacaaagaaaaagaaaataaaaatttgaataataaaaatagtataggagtttccaaacctgtcggtttag

SEQ ID NO: 10 - DNA, 136 bp, Rehmannia mosaic virus
  source 1..136: mol_type = other DNA
tgggtttgagggagaaaatcacaactgtgaaagatggaggacccatggaactcaccgaagaagtggtagacgagttcatggaagacgttccaatgtctgtcagacttgcgaagtttcgatctcgaaccggaaaaaa

SEQ ID NO: 11 - DNA, 134 bp, Brugmansia mild mottle virus
  source 1..134: mol_type = other DNA
aaggattgcgtgaaaggatcacgaatgttgccgaaggcggttcacttgagctcactgaagaagttgttgagagctttgtgaatgacgtccctatggcagtacgactgaaccatttacgtaatggaaacaaaaaa

SEQ ID NO: 12 - DNA, 134 bp, Yellow tailflower mild mottle virus
  source 1..134: mol_type = other DNA
ccggtctgagagagaaagtaacttccgtgtcagaagggtctccgattgaactcacagaagatgttgtagatgagtttttcgagagtgtccctatggctcgtaggttgcagaacttgaggaataggcgaggaaat

SEQ ID NO: 13 - DNA, 137 bp, Tropical soda apple mosaic virus
  source 1..137: mol_type = other DNA
ttggactgagggagaaaattacaaatgtctcagacggaggacccgtcgaacttacagaagaagttgttgatgagttcgtcgaatcagttcctatggctgagagattacgtaaatttcgaggacggtccaacaaaaag

SEQ ID NO: 14 - DNA, 432 bp, Cucumber green mottle mosaic virus
  source 1..432: mol_type = other DNA
taccctcgtctgtcgtagatattaattctagattcccagatgcgggtttttacgctttcctcaacggtcctgtgttgaggcctatcttcgtttcgcttctcagctccacggatacgcgtaatagggtcattgaggttgtagatcctagcaatcctacgactgctgagtcgcttaacgctgtaaagcgtactgatgacgcgtctacagccgctagggccgagatagataatttaatagagtctatttctaagggttttgatgtttacgatagggcttcatttgaagccgcgttttcggtagtctggtcagaggctaccacctcgaaagcttagtttcgagggtcttctgatggtggtgcacaccaaagtgcatagtgctttcccgttcacttaaatcgaacggtttgctcattggtttgcggaaacctctcac

SEQ ID NO: 15 - DNA, 347 bp, Cucumber fruit mottle mosaic virus
  source 1..347: mol_type = other DNA
tttttgtccttattatgctttgtatgatctgttggtgtcagcccaaggtggagccctgcaaacgcaaaatggtaaagacattttgcgtgactccataaatgggttgttaacgacagttgcgtctcctaggagtcggttccctgcggaagggttctttgtctggtcccgtgagtcgcgcattgctgctatattagattctctgctttcggcgttggattcaagaaatagggctattgaagttgaaaacccttctaatccttcgaccagtgaagctttgaatgctactaagcgcaatgacgacgcgtctactgctgcgcacaacgacattcctcagctgatttcagctt

SEQ ID NO: 16 - DNA, 297 bp, Kyuri green mottle mosaic virus
  source 1..297: mol_type = other DNA
tgttaacttctgttgcgtctctcaattcacgttttcctgctaatgagtttttcgtgtggtctcgtgagtcgcgcattgctgccataatcgattcgttgttatccgctttggattctagaaatagggctatcgaagttgaaaacccttctaatccttctaccggagaagctctgaatgcgaccaagcgcaatgacgacgcgtctacagccgcgcacaacgacattcctctgcttttagcagctctgaatgacggtgtgggcgtttttgatagtgcgtcttttgagtcagctttcggtc

SEQ ID NO: 17 - DNA, 335 bp, Zucchini green mottle mosaic virus
  source 1..335: mol_type = other DNA
tgctgtcttctgttgcgtcacccacttcacagtttccttccggtgtgttttatgtgtggtctcgtgagtcgcgcattgctgctttgatcgattctctcttcggtgctttggattcaagaaatagggctattgaagttgaaaacccttctaatccatcgactggcgaagctttgaacgcggttaagcgcaatgacgacgcgtctacagccgctcacaacgacattcctcagattttatctgctctgaatgaaggtgcgggcgtttttgatagagcgtcttttgaatctgcttttggtctcgtgtggaccgcaggttcgtctacctcgtcttgaggc

SEQ ID NO: 18 - DNA, 238 bp, Cucumber mottle virus
  source 1..238: mol_type = other DNA
tcttttcctcgcccgtgagtcctaccgtcagatttcctgacggagttttttatgtgtttttaggtaatcctgttttggatccgctttttaaagctctgttacagtcgttggatacaagaaatagggtcatagaggttgataacccttctaatcctacgactgctgagtctttaaacgctgtccagcgtactgacgattctactgtcagttcgcgtgtgggtttaataaacttgcgtgc

SEQ ID NO: 19 - DNA, 238 bp, unidentified
  source 1..238: mol_type = other DNA
ttttcacctctcctgtgagtccgaccgttagatttcctgacggtccgtttttcattttcttagggaatcctgtgttggatccgctttttaaagctcttctgcagtcgctggatacaagaaatagggttattgaggttgacaatccttctaatcctactactgcggaatctttgaacgcgattcagcgtactgacgactcttccgtcagttcgcatgtcggtctagttaaccttcgcgc

SEQ ID NO: 20 - DNA, 246 bp, Turnip vein-clearing virus
  source 1..246: mol_type = other DNA
agggtttgagggaaaaggtcgtcgcaataaatgatccggacgtcgaaggtttcgaaggtgtggttgacgaattcgtcgattcggttgcagcatttaaagcggttgacaatttcaggaagaggaaaaagaaggttgaagaaagggatgtagtaagtaagtataaatatagaccggagaaatacgccggtcctgattcgtttaatttaaaagaagaaaatgtcttacaacattacaaacccgaatcag

SEQ ID NO: 21 - DNA, 246 bp, Ribgrass mosaic virus
  source 1..246: mol_type = other DNA
agggtttgagagaaaagatcatcgcgataagtgatccggacgtcgaaggtttcgaaggagtggttgacgatttcgttgattcggtcgaagcatttagagcggttgataatttcaggaaaaagaaaaggaagataggagaaaaggaagcggtaagtaggaataagtacagaccggagaaacacgccggtcctaattcgttatatattaaagaagaaaatgtcttacaacatcacgagctcgaatcag

SEQ ID NO: 22 - DNA, 246 bp, Wasabi mottle virus
  source 1..246: mol_type = other DNA
agggtttaagagaaagagtcatcgctgtagatgatccgaacgttgagggtttcgaaggtgtagttgacgaattcatcgattcggttgcagcatttaaagcggttgacaatttcaggaaaaagaaaaggaagattggaggaagggatgtgattagtaagtataagtatagaccagagaagtacgccggtcctgattcgttacttaataaagaagaaaatgtcatacaacatcacgaactcgaatcag

SEQ ID NO: 23 - DNA, 249 bp, Youcai mosaic virus
  source 1..249: mol_type = other DNA
aaggtttgagggaaaaagtcatcgctgtgaatgatccgaacgtcgaaggtttcgaaggtgtggttgacgatttcgtcgattcggttgctgcattcaaggcgattgacagtttcaggaagaaaaagaaaaggattggaggaagggatgtaaatagtaataagtatagatatagaccggagagatacgccggtcctgattcgttacaatataaagaagaaaatggtttacaacatcacgagctcgaatcag

SEQ ID NO: 24 - DNA, 258 bp, Streptocarpus flower break virus
  source 1..258: mol_type = other DNA
agggtttgcgtgaaaggcttaataatgtgggagatccaaatgttgaagtttcagaagttgtcgttgatgagttcgtggactcgatttccgcttcacagtcgttaagccgtgctcgtaataaatacgttcgtggtaatggtaaggttgggaataatagtggtggttttagtaagtataatcgtcatcagccggagaggttcgccggcaaggctatgtataattctaaaaatgtcgtacgtggtggtacttccgaaccaa

SEQ ID NO: 25 - DNA, 333 bp, Rattail cactus necrosis-associated virus
  source 1..333: mol_type = other DNA
tgcttttatgacaggatcttacccaacaattcgactgtgctcaacgactatgacagtttcaccttgagagtgagagacattcatctcaacttggacgattgtagactcgacctgtcaaaggacgatccagcaatctgtcggaggcagtcgggttatctgcgtcccgttcttagaaccggtacggagagacctcgacagcccgggctcattgagaatgtcttagctcttatcaagagaaatttcaatgcacctcatcttcttggaactgtagacgtcgatgcaatggccgacaccgtagtggataagttttttaaaattttcttccctgatggt

SEQ ID NO: 26 - protein, 159 aa, Tobacco mosaic virus
MSYSITTPSQFVFLSSAWADPIELINLCTNALGNQFQTQQARTVVQRQFSEVWKPSPQVTVRFPDSDFKVYRYNAVLDPLVTALLGAFDTRNRIIEVENQANPTTAETLDATRRVDDATVAIRSAINNLIVELIRGTGSYNRSSFESSSGLVWTSGPAT

SEQ ID NO: 27 - protein, 159 aa, Tobacco mild green mosaic virus
MPYTINSPSQFVYLSSAYADPVQLINLCTNALGNQFQTQQARTTVQQQFADAWKPVPSMTVRFPASDFYVYRYNSTLDPLITALLNSFDTRNRIIEVDNQPAPNTTEIVNATQRVDDATVAIRASINNLANELVRGTGMFNQAGFETASGLVWTTTPAT

SEQ ID NO: 28 - protein, 159 aa, Tomato mosaic virus
MSYSITSPSQFVFLSSVWADPIELLNVCTNSLGNQFQTQQARTTVQQQFSEVWKPFPQSTVRFPGDVYKVYRYNAVLDPLITALLGAFDTRNRIIEVENQQSPTTAETLDATRRVDDATVAIRSAINNLVNELVRGTGLYNQNTFESMSGLVWTSAPAS

SEQ ID NO: 29 - protein, 157 aa, Pepper mild mottle virus
MAYTVSSANQLVYLGSVWADPLELQNLCTSALGNQFQTQQARTTVQQQFSDVWKTIPTATVRFPATGFKVFRYNAVLDSLVSALLGAFDTRNRIIEVENPQNPTTAETLDATRRVDDATVAIRASISNLMNELVRGTGMYNQALFESASGLTWATTP

SEQ ID NO: 30 - protein, 161 aa, Paprika mild mottle virus
MPYTVSSPNQLVYFGSVWADPIALIDLCTVSLGNQFQTQNARTTVQQQFSDLFKTVPTRTIRFSDGENGFRVFRYNSTLDPLITALLNSFDTRNRIIETENPANPNTAEIASATQRVDDATVSIRACINNLMNELARGTGMLNTASFETVSNLTWTTAATT

SEQ ID NO: 31 - protein, 160 aa, Bell pepper mottle virus
MSYTVNSPSQLVYLSSAWADPTDLLNLCTNSLGNQFQTQQARTTVQQQFSDVWKPTPQAGVRFPASGFKVYRYNAVLDPLITALLGTFDTRNRIIEVENQQNPTTAETLDATRRVDDATVAIRSAINNLANELVRGTGMYNQTSFESMAGLTWTTTPPSG

SEQ ID NO: 32 - protein, 159 aa, Tomato mottle mosaic virus [sequence omitted]

SEQ ID NO: 33 - protein, 158 aa, Odontoglossum ringspot virus
MSYTITDPSKLAYLSSAWADPNSLINLCTNSLGNQFQTQQARTTVQQQFADVWQPVPTLTSRFPAGAGHFRVYRYELILEPLITFLMGTFDTRNRIIEVRNPQNPTTTETLDATRRVDDATVAIRSAINNLLNELVRGNGMYNQVSFETMSGLTWTSS

SEQ ID NO: 34 - protein, 161 aa, Obuda pepper virus
MPYTVTSPSQLVYFGSVWADPITFIDLCTVALGNQFQTQNARTTVQQQFSDLFKTVPTRTNRFNDGENGFRVFRYNSTLDPLISALMNSFDTRNRIIEVDNPANPNTSEVASATQRVDDATVNIRACINNLMNELVRGTGMMNTASFETVSNLTWTTTTTT

SEQ ID NO: 35 - protein, 159 aa, Rehmannia mosaic virus
MSYTIATPSQFVYLSSAWADPVELINLCTNALGNQFQTQQARTVVQRQFSEVWKPSPQVTVRFPANDFKVYRYNAVLDPLVTALLGAFDTRNRIIEVENQANPTTAETLDATRRVDDATVAIRSAINNLVVELIRGTGSYNRSAFESSSGLVWTSGPAT

SEQ ID NO: 36 - protein, 159 aa, Brugmansia mild mottle virus
MAYTITAPNQIVYLGVAYADPILLMNLCTTSQGNQFQTQNARTTVQQQFADIWKAVPAVNIRFPENGFLVYRYNAVLDQLVTSLLNSFDTRNRIIEVENPPNPTNGEIMSATQRVDDATVNIRASITNLMNELVRGTGFLNRSSFESTSGLTWSTAPTT

SEQ ID NO: 37 - protein, 158 aa, Yellow tailflower mild mottle virus
MSYAITSPKQFAYLTNAYADPIALISLCNNALGNQFQTQNARTTVQQQFNDIWKELPTQISRFPVGIYRVYRFDSTIDPLITSVLNSFDTRNRIIETENPANPSTTEVVNATQRVDDATVNIRSSINNLCNELIRGTGFLNQATFEEASQLTWTARTT

SEQ ID NO: 38 - protein, 160 aa, Tropical soda apple mosaic virus
MSYTISNPNQLVYLASVWADPTELLNLCTSALGNQFQTQQARTTVQQQFSDVWKTVPATNIRFPNAGFKVYRYNAVLDSLITALLGSFDTRNRIIEVENPQNPTTAETLDATRRVDDATVAIRSSINNLMNELVRGTGMYNQAQFESVSGLTWATTATSS

SEQ ID NO: 39 - protein, 161 aa, Cucumber green mottle mosaic virus
MAYNPITPSKLIAFSASYVPVRTLLNFLVASQGTAFQTQAGRDSFRESLSALPSSVVDINSRFPDAGFYAFLNGPVLRPIFVSLLSSTDTRNRVIEVVDPSNPTTAESLNAVKRTDDASTAARAEIDNLIESISKGFDVYDRASFEAAFSVVWSEATTSKA

SEQ ID NO: 40 - protein, 162 aa, Cucumber fruit mottle mosaic virus
MSYSTSGLRSLPAYTKSFCPYYALYDLLVSAQGGALQTQNGKDILRDSINGLLTTVASPRSRFPAEGFFVWSRESRIAAILDSLLSALDSRNRAIEVENPSNPSTSEALNATKRNDDASTAAHNDIPQLISALNDGAGVFDRASFESQFGLVWTAASSSTSK

SEQ ID NO: 41 - protein, 161 aa, Kyuri green mottle mosaic virus
MSYSTSGIRSLPAFAKSFYPFYDVYNLLVSAQGGALQTQNGKDILRESLTGLLTSVASLNSRFPANEFFVWSRESRIAAIIDSLLSALDSRNRAIEVENPSNPSTGEALNATKRNDDASTAAHNDIPLLLAALNDGVGVFDSASFESAFGLTWTASATSSK

SEQ ID NO: 42 - protein, 161 aa, Zucchini green mottle mosaic virus
MPYSTSGIRSLPAFSKSFFPYLELYNLLITNQGAALQTQNGKDILRESLVGLLSSVASPTSQFPSGVFYVWSRESRIAALIDSLFGALDSRNRAIEVENPSNPSTGEALNAVKRNDDASTAAHNDIPQILSALNEGAGVFDRASFESAFGLVWTAGSSTSS

SEQ ID NO: 43 - protein, 162 aa, Cucumber mottle virus
MAYSPITPTNLSLFSSNYVPFTEFYNYLVTAQGEAFQTQQGRDSVRDSLSGFFSSPVSPTVRFPDGVFYVFLGNPVLDPLFKALLQSLDTRNRVIEVDNPSNPTTAESLNAVQRTDDSTVSSRVGLINLRAAITQGNGVVNRSIFESSNGLTWATSGSSSSK

SEQ ID NO: 44 - protein, 162 aa, unidentified
MAYTPITPTNLPLFSSNYVPYTEFYNYLVSAQGEAFQTQQGRDAVRTTLSGFFTSPVSPTVRFPDGPFFIFLGNPVLDPLFKALLQSLDTRNRVIEVDNPSNPTTAESLNAIQRTDDSSVSSHVGLVNLRAAIAQGNGVVNRSIFESSSGLTWATSSASTSK

SEQ ID NO: 45 - protein, 157 aa, Turnip vein-clearing virus
MSYNITNPNQYQYFAAVWAEPIPMLNQCMSALSQSYQTQAARDTVRQQFSNLLSAVVTPSQRFPDTGSRVYVNSAVIKPLYEALMKSFDTRNRIIETEEESRPSASEVANATQRVDDATVAIRSQIQLLLSELSNGHGYMNRAEFEALLPWTTAPAT

SEQ ID NO: 46 - protein, 157 aa, Ribgrass mosaic virus
MSYNITSSNQYQYFAAVWAEPTPMLNQCVSALSQSFQTQAGRDTVRQQFSNLLSAIVAPNQRFPDTGFRVYVNSAVIKPLYEALMKSFDTKNRIIETEEESRPSASEVANATQRVDDATVAIRSQIQLLLNELSNGHGYMNRAEFEAILPWTTAPAT

SEQ ID NO: 47 - protein, 157 aa, Wasabi mottle virus
MSYNITNSNQYQFFAAVWAEPIAMLNQCISALSQSYQTQAARDTVRQQFSNLLSAIVTPNQRFPETGYRVYVNSAVLKPLYEALMKSFDTRNRIIETEEESRPSASEVANATQRVDDATVAIRSQIQLLLSELSSGHGLMNRAEFEVLIPWATAPAK

SEQ ID NO: 48 - protein, 157 aa, Youcai mosaic virus
MVYNITSSNQYQYFAAMWAEPTAMLNQCVSALSQSYQTQAARDTVRQQFSNLLSAIVTPNQRFPEAGYRVYINSAVLKPLYESLMKSFDTRNRIIETEEESRPSASEVANATQRVDDATVAIRSQIQLLLNELSNGHGLMNRAEFEVLLPWATAPAT

SEQ ID NO: 49 - protein, 157 aa, Streptocarpus flower break virus
MSYVVVLPNQLQFFTNAWADPIQLMNLCSASLSQIFQTQAARDAVREQFGNTLRSVVTQTTRFPEAGFQVYINDAALKPLWENLLKSFDTKNRILETEEETRPSTAEVLNATQRVDDSTTAIRGALQRLSDELNRGSGYMNRTSFETILLWSAATAK

SEQ ID NO: 50 - protein, 170 aa, Rattail cactus necrosis-associated virus
MPYINVQPKDFVYLTRSWVDPQRLIQFLSDMQTQAFQAQQSRTQLLNELSTMVVYGPTKSDRFPIDTYLINITKGGLSAYWFGLTQSADTKDRVFEVSEARAVTNAESKLATQRVDDATVAIRNAIKSTLSYLIAGEDIYSRTSFEAALGWIWQENLPPPPQTAASDSRT

SEQ ID NO: 51 - protein, 268 aa, Tobacco mosaic virus
MALVVKGKVNINEFIDLTKMEKILPSMFTPVKSVMCSKVDKIMVHENESLSEVNLLKGVKLIDSGYVCLAGLVVTGEWNLPDNCRGGVSVCLVDKRMERADEATLGSYYTAAAKKRFQFKVVPNYAITTQDAMKNVWQVLVNIRNVKMSAGFCPLSLEFVSVCIVYRNNIKLGLREKITNVRDGGPMELTEEVVDEFMEDVPMSIRLAKFRSRTGKKSDVRKGKNSSNDRSVPNKNYRNVKDFGGMSFKKNNLIDDDSEATVAESDSF

SEQ ID NO: 52 - protein, 256 aa, Tobacco mild green mosaic virus
MAVSLRDTVKISEFIDLSKQDEILPAFMTKVKSVRISTVDKIMAVKNDSLSDVDLLKGVKLVKKGYVCLADLVVSGEWNLPDNCRGGVSVCIVDKRMKRSKEATLGAYHAPACKKNFSFKLIPNYSITSEDAEKHPWQVLVNIKGVAMEEGYCPLSLEFVSICVVHKNNVRKGLRERILSVTDGSPIELTEKVVEEFVDEVPMAVKLEKVPENKKEMVGNNVNNKKINNSGKKGFKIEEIEDNVSDDESIASSSTF

SEQ ID NO: 53 - protein, 264 aa, Tomato mosaic virus
MALVVKGKVNINEFIDLSKSEKLLPSMFTPVKSVMVSKVDKIMVHENESLSEVNLLKGVKLIEGGYVCLVGLVVSGEWNLPDNCRGGVSVCMVDKRMERADEATLGSYYTAAAKKRFQFKVVPNYGITTKDAEKNIWQVLVNIKNVKMSAGYCPLSLEFVSVCIVYKNNIKLGLREKVTSVNDGGPMELSEEVVDEFMENVPMSVRLAKFRTKSSKRGPKNNNNLGKGRSGGRSKPKSFDEVEKEFDNLIEDEAETSVADSDSY

SEQ ID NO: 54 - protein, 257 aa, Pepper mild mottle virus
MALVVKDDVKISEFINLSAAEKFLPAVMTSVKTVRISKVDKVIAMENDSLSDVNLLKGVKLVKDGYVCLAGLVVSGEWNLPDNCRGGVSVCLVDKRMQRDDEATLGSYRTSAAKKRFAFKLIPNYSITTADAERKVWQVLVNIRGVAMEKGFCPLSLEFVSVCIVHKSNIKLGLREKITSVSEGGPVELTEAVVDEFIESVPMADRLRKFRNQSKKGSNKYVGKRNDNKGLNKEGKLFDKVRIGQNSESSDAESSSF

SEQ ID NO: 55 - protein, 269 aa, Paprika mild mottle virus
MSSKSIVNIEEFINMSKAEEVLPAALTRMKSVRISTVDKIMATDNDNISEVDLLKGVKLIKNGYVCLVGLVVSGEWNLPDNCRGGVSVCLIDKRMQRHNEATLGSYTAKASKKNFSFKLIPNYSITSQDAERRPWEVMVNIRGVAMEEGWCPLSLEFVSVCIVHKNNVRKGLREKVTTVSEDSAIELTEEVVDEFIEAVPMARRLQNFRKPKNNISKNFVNKGSSKPRNIPKLNEDKVFKLEKGLKGVKGMTNASRDDSSSEISSDSFN

SEQ ID NO: 56 - protein, 278 aa, Bell pepper mottle virus
MAIVVKDKVNVNDFINLSNSEKYLPSNSEKYLPSLMTPVKSVRISKVDKVLARENETLSEVDLLKGVKLIEGGYICLAGLVVTGEWNLPDNCTGGVSVCLVDKRMERASEATLGSYYTGAAKKRFQFKVTPNYSVTTDDAKKNIWQVLVNIKGVRMSAGFCPLSLEFVSVCIVFKNNIKLGLREKITRVTDAGPMELTEEVVDEFIENVPMAARLARFRTKSSKTGPKKFVRNSRDSKVRSNNLNRGVRPKFEEEGIVSDKLINDESESIDADSDSYL

SEQ ID NO: 57 - protein, 268 aa, Tomato mottle mosaic virus
MALTVSGKVRISEFIDLSKSERLLPSMFTHVKSVSVSKVDKVMVNEEDSLSEVNLLKGVKLIDGGYVCLAGLVVSGEWNLPDNCRGGVSICLVDKRMQRADEATLGSYYTGAAKKRFQFKIVPNYAITTKDAERNIWQVLVNIRNVKMAGGFCPLSLEFVSVCIVYKNNIKLGLREKITRVDDAGPIELTEEVVDEFMESVPMSVRLAKFRTKSSKRGPKHNSNNTNERKGRSNFRKKQDQESYGVSDSLDNLIEDDTETSVAGSDSY

SEQ ID NO: 58 - protein, 303 aa, Odontoglossum ringspot virus
MGRLRFVVLLSIFPIKTFSEPCYTMALVLRDSIKISEFINLSAFEKLLPSALTAVKSVRIPKVDKIISYENDTLSDIDLLKGVKLVENGYVCLAGLVVTGEWNLPDNCKGGVSICLVDKRMKRANEATLGSYHTSACKKRFTFKIIPNYSVTTADALKGIWQVMTNIRGVEMEKGFCPLSLEFVSICVVYLNNIKLGLREKILNVTEGGPTELTEAVVDRFVEKVPMAARLKSFRSVNKKKPSNSSKFVNGKSRLNSRNKLNYENGDSDVGTSVVDDIVVGNGVSDIRIDDDCESFDAQSESY

SEQ ID NO: 59 - protein, 274 aa, Obuda pepper virus
MSKAIVKIDEFIKLSKSEEVLPSAFTRMKSVRVSTVDKIMAKENDNISEVDLLKGVKLVKNGYVCLVGLVVSGEWNLPDNCRGGVSICLIDKRMQRHNEATLGSYTTKASKKNFSFKLIPNYSITSQDAERRPWEVMVNIRGVAMSEGWCPLSLEFVSVCIVHKNNVRKGLREKVTAVSEDDAIELTEEVVDEFIEAVPMARRLQNLRKPKYNKEKENKNLNNKNSIGVSKPVGLERNKVRSVVRKGVRSDSSLGVTDMSQDGSSSEISSDSFI

SEQ ID NO: 60 - protein, 267 aa, Rehmannia mosaic virus
MALVVKGKVNIGEFIDLTKTEKLLPSMFTPVKSVMCSKVDKVMVHENESLSEVNLLKGVKLIENGYVCLAGLVVTGEWNLPDNCRGGVSVCLVDKRMERADEATLASYYTAAAKKRFQFKVVPNYAITTHDAMKNVWQVLVNIRNVKMSAGFCPLSLEFVSVCIVYRNNIKLGLREKITTVKDGGPMELTEEVVDEFMEDVPMSVRLAKFRSRTGKKNNVKKVKFEGVDRSVPKMNKGKSRNNGGVFERNIFIDNDSETNVAEPDSF

SEQ ID NO: 61 - protein, 271 aa, Brugmansia mild mottle virus
MTLSIRDSFKIDEFINLSKVEKAVPALFSRVKTVRVSTVDKIMATKNDSLSDVDLLKGVKLVNNGYVCLVGLVVSGEWNLPDNCKGGVSVCLVDKRMKRANEATLGSYHSRACKKNFSFKLIPNYSITTADAEKQPWQVLVNIRGVQMEQGYCPLSLEFVSVCIVHKNNVRKGLRERITNVAEGGSLELTEEVVESFVNDVPMAVRLNHLRNGNKKEGFSKGKYVNNNAKERSVNKFVKKSVNGKGGLKVKEISTSVEDYNSSEVSSDSFI

SEQ ID NO: 62 - protein, 266 aa, Yellow tailflower mild mottle virus
MAIALRDTVKINEFINLSKTEEILPAMFTRMKSVRISTVDKVVAKENDSVSEVDLLKGVKLVKNGYVNLVGLVVSGEWNLPDNCRGGVSVCLVDRRMTRHSEATLGSYTAPACKKNFSFKLIPNYSVTTADAERRPWEVMVNIKGVAMAEGWCPLTLEFVCVCIVHKTNVRTGLREKVTSVSEGSPIELTEDVVDEFFESVPMARRLQNLRNRRGNINRNKSQVYKKKNKNNIGDALKERIDEVKDVENKRYDNDDYSIEESSDSY

SEQ ID NO: 63 - protein, 256 aa, Tropical soda apple mosaic virus
MALVVKDDVKISEFINLSTSEKFLPAAMTSVKSVRVSKIDKVIATENDSLSDVDLLKGVKLIEEGYVCLAGLVVSGEWNLPDNCRGGVSVCLVDKRMLRHDEATLGSYKTGAAKKRFAFKLIPNYSVTTADAKRNIWQVLVNIKGVAMEKGFCPLSLEFVSVCIVHKTNIKLGLREKITNVSDGGPVELTEEVVDEFVESVPMAERLRKFRGRSNKKSNKFVEKNNNKRGDKGGKLLKKIDNETETESSDAESSSY

SEQ ID NO: 64 - protein, 264 aa, Cucumber green mottle mosaic virus
MSLSKVSVENSLKPEKFVKISWVDKLLPNYFSILKYLSITDFSVVKAQSYESLVPVKLLRGVDLTKHLYVTLLGVVVSGVWNVPESCRGGATVALVDTRMHSVAEGTICKFSAPATVREFSVRFIPNYPVVAADALRDPWSLFVRLSNVGIKDGFHPLTLEVACLVATTNSIIKKGLRASVVESVVSSDQSIVLDSLSEKVEPFFDKVPISAAVMARDPSYRSRSQSVGGRGKRHSKPPNRRLDSASEESSSVSFEDGLQSDHT

SEQ ID NO: 65 - protein, 258 aa, Cucumber fruit mottle mosaic virus
MSISKVGVRNALKPEEFVKITWVDKLLPDAFTILKYLSITDYSVVQSKDYEHLIPVDLLRGVDFSKSKYVTLVGVVISGVWTIPENCAGGATVALVDTRMSLVSEGTICKFSVSAASRDFTVKLIPNYYVTAADASSKPWSLFVRISGVRIKDGFSPLTLEIASLVATTNSILKKGLRVSVIESVVGSDASVSLDTLSEKVQPFFDSVPITASVVSRDRSYVSKGRPPSRSGPVSRKSKSKSEAESFSDSGASEPLSS

SEQ ID NO: 66 - protein, 262 aa, Kyuri green mottle mosaic virus
MSVSSVGVKNALKPQEFVKLSWVDKVLPDMFTVFRYLSVTDYSVIKSRDSECLIPVDLLRGVDLSKSKYVTLVGVVISGVWTIPENCAGGATVALVDTRMSMVDEGTICKFSVAASTRDFMVKLIPNYYVTASDASSKPWSIFVRVSGVRIKEGFSPLTLEIASLVATTNSILKKGLRVSVLESVVGSDASINLDSVSDKVQPFFDSVPITAAVIARDRSYVSKSGPSRAVRPRPQSKSGKKGDANPAESMSDGDAYEPPRL

SEQ ID NO: 67 - protein, 261 aa, Zucchini green mottle mosaic virus
MSVSKLGVKNVLKPQEFVKLNWVDKVLPDMFTVFRYLSVTDYSVIKSRDSECLIPVDLLRGVDLSKSKYVTLVGVVISGVWTIPENCAGGATVALVDTRMSMVDEGTICKFSVAASARDFMVKLIPNYYVTATDASSKPWSIFVRVSGVRIKEGFSPLTLEIASLVATTNSILKKGLRVSVLESVVGSDASVNLESASEKVQPFFDSVPITAAVISRDRSYVSKSGFNRAVRSKPPSKGGKKFGDSAESLSEDSASELPGL

SEQ ID NO: 68 - protein, 262 aa, Cucumber mottle virus
MSISNLSVESQLKPSNFVKLSWVDKLLPDYFSILRFLSVTDHSVIKAREYESFLPVELLRGVDLTKHKYVTLLGVVISGVWTIPEGCSGGATVGLVDTRMERVVEGTVCKFSVPASVREFNVRFIPNYSITAADAARHPWSLFVRLKGVNIKDSFSPLTLEIAALVATTNSIIKKSLKAIVSDVVVGSDAAVAIADRDSQVNSFFDSVPITKSVVNFDKSYKSRVPKKDSSGGSGKVKRSTGTSGPADTEFSDDGLLSNHSD

SEQ ID NO: 69 - protein, 262 aa, unidentified
MSISNLSVESQLKPSNFVKLSWVDRLLPDYFSILRFISVTDHSVVKAREYESFLPVELLRGVDLTKHKYVTLLGVVISGVWTIPEGCSGGATIGLVDTRMERVSEGTVCKFSVPASVREFNVRFIPNYSITASDAARHPWSLFVRLKGVSIKDSFSPLTLEIAALVATTNSIIKKSLKAVVSSVVVGSDAAVAIEDKDSSVNSFFDSVPITKSVINFDKSYKSKVPRKGSSVVSVKGKAGVGTSGPTDTEFSDYGLHSDHTD

SEQ ID NO: 70 - protein, 267 aa, Turnip vein-clearing virus
MSIVSYEPKVSDFLNLSKKEEILPKALTRLKTVSISTKDIISVKESETLCDIDLLINVPLDKYRYVGILGAVFTGEWLVPDFVKGGVTISVIDKRLVNSKECVIGTYRAAAKSKRFQFKLVPNYFVSTVDAKRKPWQVHVRIQDLKIEAGWQPLALEVVSVAMVTNNVVMKGLREKVVAINDPDVEGFEGVVDEFVDSVAAFKAVDNFRKRKKKVEERDVVSKYKYRPEKYAGPDSFNLKEENVLQHYKPESVPVLRSGVGRAHTNA

SEQ ID NO: 71 - protein, 267 aa, Ribgrass mosaic virus
MSMVSYEPKVNDFLFLTNKEKILPKALTRLKTVSISTKDIISVKESETLCDIDLLIDVPLDKYRYVGILGAVFTGEWLVPDFVKGGVTISVIDKRLVNSKECVIGTYRAAAKSKRFQFKLVPNYFVSTADAKRKPWQVHVRIQDVKIEAGWQPLALEVVSVAMVANNVVMKGLREKIIAISDPDVEGFEGVVDDFVDSVEAFRAVDNFRKKKRKIGEKEAVSRNKYRPEKHAGPNSLYIKEENVLQHHELESVPVLRSGVGRTHTNA

SEQ ID NO: 72 - protein, 267 aa, Wasabi mottle virus
MSTVSYKPKVSDFLSLSRTEEILPKALTRLKTVSVSTKDVISVKESESLCDIDLLVNVPLDKFRYVGILGVVFTGEWLIPDFVKGGVTVSVIDKRLENSKECIIGTYRAAAKDRRFQFKLVPNYFVSVTDAKRKPWQVHVRIQNLKIEAGWQPLALEVVSVAMVTNNVVVKGLRERVIAVDDPNVEGFEGVVDEFIDSVAAFKAVDNFRKKKRKIGGRDVISKYKYRPEKYAGPDSLLNKEENVIQHHELESVPVFCSGMGRAHSDA

SEQ ID NO: 73 - protein, 265 aa, Youcai mosaic virus
MSYEPKVSDFLALTKKEEILPKALTRLKTVSISTKDVISVKESESLCDIDLLVNVPLDKYRYVGVLGVVFTGEWLVPDFVKGGVTVSVIDKRLENSKECIIGTYRAAAKDRRFQFKLVPNYFVSVADAKRKPWQVHVRIQNLKIEAGWQPLALEVVSVAMVTNNVVVKGLREKVIAVNDPNVEGFEGVVDDFVDSVAAFKAIDSFRKKKKRIGGRDVNSNKYRYRPERYAGPDSLQYKEENGLQHHELESVPVFRSDVGRAHSDA

SEQ ID NO: 74 - protein, 288 aa, Streptocarpus flower break virus
MAIVLSKPKVSEFLNLTKAEEILPKFLTRLKTVAISTRDVVSVKGTTDLVDIDLLRDVPVNNWRYVGIVGIVASGEWLLPDNVSGGVAISFVDKRLVDSREAILGTYRAAAVEKRFQFKLIPNYFVSQEDALRRPWQVQVSLKGLKFEEGFSPLTLEFVSVVVCANSVVTKGLRERLNNVGDPNVEVSEVVVDEFVDSISASQSLSRARNKYVRGNGKVGNNSGGFSKYNRHQPERFAGKAMYNSKNVVRGGTSEPTAILHKRMGGSNSIDESLFSVAESDLSDSGCA

SEQ ID NO: 75 - protein, 334 aa, Rattail cactus necrosis-associated virus
MSSLCVSDPAVLLSPELHLKVPQLKSLVQFWKKPFKTCSISMSDVIKVASSNPLSIAVDFSSAMPSGPRNFKYVYILAVVLTGRWHLSESCPGGATFVLYDKRLCGRAEGIYGSFFSKVSASKFQVRFSVGHSMTVNDLLRNPLHLCFSLESVPCQEGYEPLSVEVSSLQLFTDCILEESLSAKLVKYPALCTDNMSVISNVDDVIFKFNSVLNVDNVPNSVKNVVKCNKVFKGRRSRGKWVGSQNEVVVKDGTNVTPHRLIAKDALHQRTTERLRLPDQVMGRPPASDTVSERYADSGFPSTAVSHTTSERTVDDGGLRSDQIGPFPYRYVPY

SEQ ID NO: 76 - DNA, 4759 bp, Arabidopsis thaliana
  source 1..4759: mol_type = genomic DNA
ttcattcatcatcttcctcctctctctcttctctgtatcacccaactaaatcctcacgggattagatccaaagtctcaaactttgatccaaaaacacaaactttgttcaaaagacataaactttgagccaaagtcacaagctttcttggtgaacgatggattacaatccaaatcttcctcctttaggaggaggtggtgttagtatgagaagaagcataagtcgaagtgtaagcagagcaagtaggaacattgaagatatcttctcatctggttcaagaagaacacaatcagtcaacgacgatgaagaagctcttaaatgggctgccattgagaagctaccaacttacagtcgtctccgaaccactctcatgaacgctgtagtcgaagacgatgtttacggtaaccagctcatgagcaaggaggttgatgtaaccaagcttgatggtgaagatcgtcagaagtttattgacatggttttcaaagtagctgagcaagataatgaaaggatcttgactaagctaagaaacaggatcgatagagttggtatcaaacttccaactgttgaagtcaggtacgagcatttgacgattaaagctgattgttacactggtaatagatctcttcctacacttttgaatgttgtgaggaacatgggagagtctgctttaggtatgattggtattcaatttgctaagaaagctcagcttacgattcttaaagatatctctggggttattaaacctggaaggatgacacttttgttgggtcctccttcttctggtaagaccactcttttgttggctttagctgggaaacttgataaatctctacaagtcagtggtgatattacttacaatggttaccaactcgatgagtttgttccgagaaagacctctgcttacattagtcagaacgatcttcatgttggtatcatgactgttaaggagactcttgacttctctgctaggtgtcaaggtgttggtactcgttatgatctgttgaatgagcttgcgaggagagaaaaggacgctggtatattcccggaagccgatgttgatctcttcatgaaagcttctgctgctcaaggtgttaagaacagtctcgtcactgattatactctcaaaattttggggcttgacatttgcaaagacacaatagttggagatgacatgatgagaggtatatctggaggtcagaagaaacgtgtcacaactggtgagatgattgttggacctactaagacactcttcatggacgaaatatccactggtcttgacagttccactactttccaaatcgtcaagtgtctgcaacaaatcgttcacctcaatgaagccacggtgctcatgtctctcctccagcctgctcctgagacttttgatttattcgatgatatcatcttggtgtcggaaggtcagatcgtgtaccaaggaccgagagacaacattcttgagttctttgagagctttgggttcaagtgtcctgagagaaaaggaacagctgatttcctgcaagaggttacttccaagaaagatcaagaacagtactgggtgaacccgaacagaccttatcactacattccggtttcagagtttgccagtagatacaagagtttccatgttgggacgaagatgtctaacgaacttgcagtaccgttcgataagtctcgcggccacaaagcagctcttgtgttcgataagtactctgtctcaaagagggagcttctcaagagctgttgggacaaagagtggctgcttatgcagcgaaacgcgttcttctatgttttcaagactgtccagatcgtcatcattgctgcaatcacgtctacactcttcctgagaaccgaaatgaacacaagaaacgagggtgatgctaatctctacataggagcattgctatttggaatgatcatcaacatgtttaatgggtttgcggagatggctatgatggtttcaagactccctgtgttctacaaacagagggatctcttgttttatccatcctggaccttctcacttcccactttcttgcttgggattccaagctcaatattagaatcgacggcttggatggtggtgacttattactccattggttttgcacctgacgccagccgcttcttcaagcagtttcttctggtgtttctgattcaacaaatggctgcatccctctttaggttgattgcttctgtgtgcagaaccatgatgattgctaatactggtggtgctctcactctacttcttgtgttcttgctcggaggcttccttcttccgaaaggcaagattcctgactggtggggttgggcttactgggtatctcctctcacctatgctttcaacggtctagtagtcaatgaaatgtttgctcccagatggatgaacaaaatggcttcttctaacagcacaataaagcttggaactatggtgcttaatacttgggatgtctaccatcaaaagaactggtactggatttcagttggagccttgctttgtttcacagccctcttcaacattctattcaccttggcacttacctatctcaaccctcttgggaagaaggcaggtttacttccagaagaagaaaatgaagacgctgatcaggggaaagatccaatgcgtagatctttgtctactgcagatgggaacagaagaggagaggtcgcaatggggagaatgagtagggactctgcggctgaagcatcaggtggtgcaggcaataagaaaggaatggttcttcctttcactcctttagctatgtcctttgacgacgtcaaatactttgttgacatgcctggggaaatgagagaccaaggagttacagaaacaagactccaactgcttaaaggtgtgactggtgcatttaggccaggagttttgactgcgcttatgggagtgagtggtgccggtaagactacgcttatggacgttttggccggaaggaaaacaggtggatacattgaaggagatgtgagaatatcaggattcccaaaggttcaagaaacatttgctagaatctcaggatattgtgagcagaccgatattcactccccgcaagtaacagtcagagaatctctgattttctctgctttccttcgtcttcctaaagaagtcggcaaagatgaaaaaatgatgtttgtggatcaagtgatggaattggtagagctggacagtcttagggactccattgttggtttaccgggtgtcacggggctttccacggagcagagaaagagactgacaatcgcggtggagcttgtagccaacccttccatcatctttatggatgagccaacttcagggctagacgctagagcagcggctattgtgatgagggcggtaaggaacacagtggacactggaagaaccgtggtctgcaccattcatcagcctagcattgatatctttgaagcatttgatgaattgatgctgatgaagagaggaggacaagtgatttacgcgggtccattgggtcaaaactctcacaaggtggttgagtactttgaatctttccccggagtgtccaagattccagaaaagtataacccggccacttggatgctcgaagctagctcactcgccgctgagctaaagcttagtgttgactttgctgagttatacaatcaatcagcattgcaccagcgaaacaaagcgttggtaaaagaactaagtgtaccaccagcaggagcatcagatctttactttgctacacaattctcacaaaacacatggggacagttcaaatcatgcttatggaaacaatggtggacgtattggagatctccagactacaatcttgtccgtttcatcttcacattggcaacatctctcttgattggtacagtcttctggcaaatcggaggtaacaggtcgaacgcaggggatctaacaatggtgataggagcattgtatgccgcgattatcttcgtgggaatcaacaactgttcaacagtacaaccgatggttgcagtggaaagaacagtgttctacagagaaagagcagcaggaatgtactcagccatgccatatgccatctctcaagtcacttgtgagcttccctatgtccttattcaaaccgtttactactcactcatcgtctacgccatggttggtttcgaatggaaagccgaaaagttcttctggttcgtcttcgttagctacttctcattcctctactggacttactacggcatgatgactgtttccctcacaccaaaccaacaagtcgcttcgattttcgcctcagcgttttacggtattttcaacctcttctctggtttcttcattccaagacccaaaatcccaaaatggtggatttggtactactggatctgccctgttgcatggaccgtgtatggattgatagtgtcgcagtacggtgatgtggagacacgtatccaagtccttggtggtgctcctgacttaaccgtcaagcaatacattgaggaccattatggtttccaatctgactttatgggaccagtggcggctgtactcatcgctttcaccgtcttcttcgccttcatcttcgccttctgcatcagaactctcaacttccagaccagataaaaccatctctcaaacaacaaagtctctttctttttttgtatcctctgtgttgtttatatgcactataagctttgtatgttctaaatatgtattgtagtgtcataacgaaatttttttgaatatttttatttattgtcttatagatgatgacgaatcggaatcatgtaatataattccacttttttttgtgttta

SEQ ID NO: 77 - DNA, 1642 bp, Arabidopsis thaliana
  source 1..1642: mol_type = genomic DNA
gcttcacgagacaaacgacgaacaacgcaattacgcgttcttatctttctgggtatttcttaattatattactctatataaataaaaatacccagaaacgtaatttcgtcgagttcaaaaattcaattcaaagaataatttctttccataaaaagattgttgtggattaacttctttcttaaaagaatctcatacccgtcgaatcttcttcttcaacctttttctgcgtttttaatattttccctacaaaaagattctcaaaatcgttttacataaacccgatcttgtcaatctccagaaacaaaaaaaaaaaaatggcgatcaagacaaagactagtctaattccaagttgttcatcacctgaggatctaaaacgcgttttgcaaacgctaggttcgagctggggagatgtagttgaagatctggagcgtcttgaggttgttccgttaaaaggagctatgactaacgaggtttatcagattaattggcctactttaaacggtgaagatgttcatcggaaagttcttgttcggatctacggtgacggcgttgaccttttctttaacagaggtgatgaaatcaaaacgtttgagtgtatgtctcatcatggttatggtcctaagcttcttggtcgtttctctgatggtcgtcttgaagaattcatacacgccagaactctttctgcagatgatcttcgtgtagcagaaacatctgatttcatcgctgcgaagctaagagagtttcataagcttgatatgcctggtccaaagaacgttcttctctgggaaagacttaggacttggcttaaggaggctaagaacttggcttcacctatagagatggataagtatcggttggaaggtttggaaaatgaaatcaatttgttggaagagagacttactcgggatgatcaagagattggtttctgtcacaacgatcttcagtatggaaatgtcatgattgatgaagtaaccaatgccattaccatcatagactatgagtattcgagtttcaacccaattgcttatgacattgcaaaccacttttgtgagatggctgctaattaccattcagacactcctcatgttctggactacactctatatccaggagaaggagaaaggagaaggttcattagcacatatcttggctctacagggaatgcaacaagtgataaagaagtagagaggttattgaaagatgcagagagctacactttagcaaaccatatcttctggggactatggggaatcatctcgggacatgtgaacaagattgagttcgattacatggaatatgcaaggcagagatttgaacagtactggcttagaaagcctttgcttcttgaaggatgaagcagattcgcattgaaaagccgatatacaactaaaagtttctgcaattaggtcaaaagaaaaaaagaaaatttagtagactatatgttgctattgttactctcatcagtttgtgtgtttcttcccttctatatagaggtttgttaactctcaaaacagttaaattgagtaaaacttgttctaaacaaagtattatatgataatagaagaagcaccagtggtctagtggcatgatagtaccctgccacggtacagacccgggttcaattcccggctggtgcaattta

SEQ ID NO: 78 - DNA, 1043 bp, Arabidopsis thaliana
  source 1..1043: mol_type = genomic DNA
agtttcaaattagtaaacgataaagtagatgataattaaattcatgtcatagccatgaacgaatgttatgttaaaaaaatttcatgtaagtaaattctttggagttcgattcttcttttgtccttacacaatcaaagatttttctttcaactttttttacttaacagcattaactctttctcagatcttcaattgttttcctaaacgaaattatcattaaattgtttaaaaaatacacatttaatataacatatatcataacaagatatattatatttatgaaaaagagatgtagtactacagcatatggtggcaaacaaacccactaaattcagtaaaatggaacccaccaaatttatctataaataagtccccaaacctctcccccaaaaatgcaacaacactcatctttcccaatataagtttttaccaaacaacaacttttgttttgcctttcctcaaaacataattttgtcttattttctaaaccggtaaaagatgtcgctagctatcgcagaagtttacacggtgaggaagtttcacagagagagtatgaagaaaccggccaaacagacggttaccggcgagggagatgaaaagattggcggaggaagtttcaaggaggcgccggtgaagtcaggtgggtgtagaagattcggacggtggttttttgggaagccgggaatgaagaaaagctctgctaaagtttcggatcccatggcgattgagtgatgaagaagaaattaaaacttttctcttctttgccttttttttttttctttctttattttgttttattttcattggtctttttttaatggctttttctagtgtcttctctttttctttattgggtgattttataaatagtcggtaaacattgtacaatatgaactacaaaaatatgagaaaatctatatatgtatgtagaatggatgtattccctaaataccacagctagtttgataagttttatgccaaaccaactaaacttgtatgccacgatatttcgtatttcagaaaatcgaaaattgttatttttt

SEQ ID NO: 79 - DNA, 1428 bp, Arabidopsis thaliana
  source 1..1428: mol_type = genomic DNA
acaaaaaccatttgaattttctttcttcttcaaaagttcgaaacttttttttttccggcaatggagggactagttccggtacagagacttccaattaaagtggcttcaccttctctgtatcggtgtaacaattctgtctcaatcagacgttcaatttcaggttttgccatggacaggaagataaactttagggctccgtcgcaattctcgatccgagctcaacagtcggatttgaaggaaagcttagctgtgtcttcttcatcagtagaggataaaggaaatgttcttagaatcaaggaatgggaagtagagatgtatcaggaggaattagctattagtcaaggtattaggataaggagaaaaccaccaagtaaggctcctttgggatactctggaccatttgagttgagattgcataacaatgatgctgattctcctcgtaatatcttggaggagatcacatggtacaaagacgtagaagtttcccggatgaaggagctaaatccgcttgacgtgctgaagaaagctgtagaggatgctcctcctactagggattttgttggggctcttaggatggctcataaaagaactggcttccctggcttgatagctgaggttaagaaggcttctccaagtagaggaatcttaaaagagaattttgacccggtcgagattgctcaagcttatgaaaaaggcggagcagcatgcctcagcgttttgacagaccagaagtatttccagggaggctttgaaaacttggaagcaataaggagcgctggtgtgaagtgtccactattatgcaaagagtttgttgtagatccatggcagatctactatgctcggactaaaggcgcagatgcagtactgcttattgctgctgtattggctgacctagaaataaccttcttgcttaagatttgcaagaagcttagcttggctgcccttgttgaggtacatgatgagagagagatgggtcgtgtacttggaatagaaggaatcgagcttgttggcatcaataaccgaagtcttgaaacatttgaagtggacatcagtaatacaaagaagcttcttgaaggagagcatggtagacaaatccgtgagagagacatgattgtggttggcgaatctggtctgtttacaccagatgacattgcctatgtacaagcagccggagtcaaagcagttttggttggagaatccattgtgaagcagaacgaccctgagaaaggaatagctggactttttggcaggaacatttctcatacttagagaccatatcataatacatctccaaatacgtttcctagtacatttgttttgtatcttgctctgtgagtattgaggaaagactagaaaggtttgttggttctgatgtttaagacattttcaaaaaaccatcgaataaactgaatcgaaatcgatttacag

SEQ ID NO: 80 - DNA, 1388 bp, Arabidopsis thaliana
  source 1..1388: mol_type = genomic DNA
agataagagcgaaacaaattacaaaattgaattacacaataatgtcctctaagcgacgactaccggtgaaatattttataagaaaacaaaaacaataattaacaaacaaaggcgacacctttagattcgacaagacgaccattttagaaaaagcttctcaaattctctccttatccccaaaaattcaaacttttttctctttggaaaattctgaggcaaaaatgcggcgtaattgctgccatgtttcatttgcttcaaccctcaagatccttaattttgtccaagctttcattggtgtttcgatcattatctactccatatggatgctccatgaatacagccgtcaccttcccgtggacccgcctccgtcagcttcatcaagctccggaaccgagatcgctactagtgtatctgagcccttgaagaatcctattgattttgtggcgagtatcattctcgggtctaatggtggtgatcatgggtttaacctacgctcgttggaccttcctgctccatggttcatctactctttcatggcggttggtatattggtctgcattgttaccttcattggtttcatagcagctgaagcaatcaatggctgttgcttgtgtttttactctattctcaaaactctgctcattctacttgaagctgcacttgttgcatacatcgctattgaccgtcactgggaaaaggatcttccgtatgatccaactggagaacttagtagtcttagggctttcattgaagaaaacatcgatatatgcaaatgggtggggattgctgtggtagcagtccagctactgtcattgctactagccatggttctcagagcgatggtttcaaccccgaaacccgaacttgacgaagaggaagatgatgagaacccaaggagtagaacttgggacccacttcttggtccgcaaggaaaccaagcgcctgctggctcaagcaagattgaaaactggagctcccgaatcagagaaaagtatggtttgaaccagagtccaccggtgaacccgaaaggttgatgaagccaaataatcatgtttctaaaactgcatgtgtccatatggtctctgtgaagctctctttctctatgttttgctctttgcaacttctcgagtgtgcataaacatttactcaaaacagtgctgtattgtgtttacacaaacggcataagcatcttcgtttgtgtgtttgcttgtacaaacaatcctgtgaacagtttgaagttagcatttccactataacgtttcgattcaatttataatgaagaaaacaaaactaaaaattgaattggacatcataaacagattaatgtaaaatgtatatgtaggttaaactctttcttagattatatcatctatatatgtttcattatt

SEQ ID NO: 81 - DNA, 1145 bp, Arabidopsis thaliana
  source 1..1145: mol_type = genomic DNA
gactccattattatccctctctctacaaaaaaaacagtagagagagatatagagagcatcaatggcgtcgtcgtcaagactttgcgattcgtgcaaatcgacggcagcaactctattctgccgcgcagacgccgcgtttctctgcggcgactgcgacggtaagatccacacagctaacaaactcgcatcacgtcacgaacgagtttggctatgtgaagtatgcgaacaagcaccagcacacgtcacgtgcaaagctgacgccgctgcgttatgcgtcacgtgcgaccgtgatatccactcagctaatccactctctcgccgccacgagcgcgtaccaatcactcctttctacgacgctgtaggtccagcaaaatccgcttcctcctccgtcaatttcgtagatgaagatggcggtgacgtcactgcttcgtggcttttagctaaagaaggaatcgaaatcactaatttgttctccgatcttgattatccgaagattgaggtaacgtcggaggagaatagctccggtaacgacggagttgttcctgtgcagaataagttgtttcttaacgaagattacttcaatttcgatctctctgcttccaaaatttctcaacaaggattcaatttcatcaaccaaactgtttcgacgagaacgatagatgtaccgttggtgcctgaaagtggaggagtgacggcggagatgacgaacacggagacgccagctgtgcagttatcaccggcggagagggaagcaagggttttgaggtatagagagaagaggaagaatcggaaatttgagaagacgattaggtatgcgtcgcgtaaagcttacgctgagatgaggccgagaatcaaaggacgttttgctaagagaacagattcgagagagaatgatggtggagacgtcggagtttatggcggattcggtgttgttccgagtttctgatattttccggtgaaagaaacatggtagtagtatatcggttaatagcagattaaggataattaaaactaaaatgtttcctgatttaatcaggggctaagttattgttagaagattgttgttttttgaattaattctcacaattgtatcctaaattatatagtttacttaatgttgaactaataaattttgatttacaatc

SEQ ID NO: 82 - DNA, 2268 bp, Arabidopsis thaliana
  source 1..2268: mol_type = genomic DNA
atggcggaatcaagctctcctctccctcctctttgtgaaaggatctcacacaaaagctatttcttaagagctgtggatctcactattctaggtcttctcctttctcttctattgtaccgtatcctacatgtgaaccaaaaggacaccgtttggatcgtggctttcctctgtgaaacttgtttcaccttcgtatggttgcttattaccaacataaaatggagtcctgctgattataaaacatatcctgaaagacttgatgaaagggttcatgaacttccaccggtagatatgttcgtgaccacagctgatccagtaagggagccaccgcttatcgttgtaaacacagtgctttcactgttagctgtgaattatccggcgaacaaactagcttgttatgtgtcggacgatggatgttcacctctcacttacttctctctcaaggaagcttctaagtttgccaagatttgggttcctttctgcaagaaatacaacgttagagttagagctccttttatgtacttcagaaactctccggaagcagcagaaggttctgaattcagtaaagactgggaaatgactaagagggagtacgagaagttaagccagaaagtagaagatgccactggaagttcccactggttggatgcagaagatgactttgaagctttcttaaacacaaaatcaaatgatcattcaactatagttaaggtggtatgggaaaacaagggaggtgtgggagacgaaaaagaggtccctcatgttgtttacatttcaagagagaaaagaccaaatcactttcatcattacaaagctggagccatgaactttctggtaagagtgtcagggttgatgacaaatgcaccatacatgttgaacgtagactgcgacatgtatgtcaatgaagcagatgtggtgcgacaagcaatgtgtatatttctgcaaaaatcaatggattcaaaccattgtgcttttgttcaataccctcaagatttctatgattctaatgtcggtgaactcaccgtcttacaattatacttgggacgaggaattgcgggaatccaaggacctcagtatgcgggttcaggatgcttccatactagaagagttatgtacggtctttctctagacgatttaggagacgatggaagtctttcttcaattgctacaaggaagtatttagctgaggagagtctaacgagagaatttgggaattctaaggagatggtgaaatcggtggtcgatgcgttacaaagaaaaccatttccccaaaaaaaccttaaggactctctagaaacggctcaagaaatgggacattgtcactacgagtaccaaaccagctggggaaaaaacatcggttggttatacgattcaacaacggaagatgtgaacacgagtatcggaattcattcgagagggtggactagctcatatatttttccggatccaccggcgtttcttgggtgtatgccacaaggaggaccggaggtaatggttcagcagcgacgatgggccacgggactgctcgaaatccttttcaacaaacaaagtccgttgatcggaatgttttgtcggaaaataagatttcgacaaagcttggcttatttatacgttttcagttggggtctaagatcaatccctgagctcttttactgtctcctgcctgcttattgcctactccacaactctgctttatttcccaagggagtttacttaggtataatcatcacacttgtggggatacattgtctttacactttatgggaattcatgaaccttggtttttccatacaatcgtggtatgtcactcaatcatttgggaggataaaaacaacttgtagttggttatttagcgtccttgatgtcatactcaagcttcttggaatatcgaaaaccgtcttcatagtcactaaaaagactatgcctgagaccaagtcagggtctggatccaaaaaatctcaacgagaagttgattgtccaaaccaagattccggtaaatttgaatttgatggctcgctttatttcttgccgggcacattcattgtgttagtgaatctagccgctctagccggttgtttggtgggtctacaaagtcgcggaggaggtggttcgggtttggcagaagcctgtggctgtattttggtggttattttgttccttccatttctaaagggtatgtttgagaagggaaaatatggtatcccattttctactctttctaaagctgcctttttagcagcgttatttgttgttttatctgtgggaaactag

SEQ ID NO: 83 - DNA, 1381 bp, Arabidopsis thaliana
  source 1..1381: mol_type = genomic DNA
catatttatactactagtatataagttaagggtttaagcctcttctcttccttctttctcttagccatcacatcgataatggcttctcttctaacaaaacccaaacccgttttcctctgttcaccatcgttatctccaagaactttgaacacagcaacaccgtcattgaatttcaccagaatttcattcacccatcaccaaaagcttgctcctttcaagcctcctagtctcgttgttgcattctctgaaaagggtttgaagagagatgtcaccacagctgctgcagcgacggagggagattacagaaggataatgttatctgatgtgttggtgaagaagaaggaaaaagtagtttggtgggagagagaatggaaagctatggactttggagctgttgctgtcgttttgtctatgcatttgcttagtcttttggctccgtttcaattcaattggagagctgtttcggttgcttttgggctttatatcgttacaggtcttctggggattactctgtctttccataggaatctttctcataaagccttcaagctacctaaatggcttgagtacttgtttgcttattgtggagctcaagctcttcagggaaacccaattgattgggtgagtacacataggtaccatcatcagttttgtgattcagacagagaccctcatagcccacttgatgggttttggttcagtcacatgaattggatgtttgataccaatacaatcacccaaaggtgtggagagcctaataatgttggggacttggagaagcagccattctatcgattccttcgaaccacctacattttgcatccgctggctctagcggttgctttatacgcaatgggtggctttccattcatcgtttggggaatgggtgtaagaatagtatgggtatatcatataacttggctagtgaactcagcttgtcatgtatggggaaaacaagcatggaacacaggcgatttgtctaagaacaactggtgggtagcagctctagcattcggggaaggatggcacaacaatcaccatgcttttgagttctcagctcgacacggcttagaatggtggcaacttgatatgacttggtacgtcgttaagttccttcaagccatcggtttagcaactgatgtcaagctcccatcggaagctcagaaacaaagaatggcattcaccagcgactgatcttaaaaaactacatggttatgcctaaagtcaaaactgtcggttcgattgaagctatgaaggttttaaaaaaggattttgttctgcttttttgtgtttacttaaaggtatatatctgtgcaagagattgtatgtgacaaactgattatgaataatatctataattacattcaatacaaaaggaagc

SEQ ID NO: 84 - DNA, 980 bp, Arabidopsis thaliana
  source 1..980: mol_type = genomic DNA
aaatcactcaccacataaagtaaaagtctcatctcttcataaaatagctttaaaccaatcaagtagagtttcttctcaagtctttttattttatttttatcaatggcttcttcagcagtgtctctccaatccatctctatgacaactctcaacaatctttcatgtaatcaacaatttcatcgaagctctcttcttggttcctctaaatccttccaaaatcttggtatctcatctaacggttcagatttctcctatccatcaagtttcactgccaagaagaacctcactgcttctcgagctctctcccaaaacgggaatatcgaaaaccctagaccaagcaaagttcaagaactgagtgtgtacgaaatcaacgaattagatcgacacagccccaagattcttaaaaacgcattcagcttaatgttcggtctcggagatctcgtaccattcacaaacaaactctacacaggcgatctcaagaaacgcgtgggcatcacggcaggtctctgcgtcgtcatcgaacacgtcccagagaagaaaggtgaaagattcgaagctacttatagcttctacttcggagactatggccacttgtccgttcaaggaccatacttgacttacgaggattcgttcctcgccatcactggtggtgctggaatctttgaaggtgcctacggacaggtcaagcttcaacagcttgtgtatccgacaaaactgttctacactttttaccttaaagggttggctaatgatttgccgttggagctcaccggaacaccggtaccgccgtctaaggacatagagccggcgccggaagctaaggcactggagcctagcggagttataagtaactataccaactaattcatgaaattaaaatgtttctcgtatcgctgtgtaatgatataaagatttgtagttttgtgctcttatctgtaataaaatcattgaggaataatatctcgagtatgttttaagtc

SEQ ID NO: 85 - DNA, 2706 bp, Arabidopsis thaliana
  source 1..2706: mol_type = genomic DNA
ccggttacagctacaccgccgttttctctctccgccgtcttttctcttcttctccgactgaatctgtgaaggtgaatttcggagttgagaaagagagattagcgtgtaatggcgatcgataatggcaagcttcaagaagaagaagcctcatctgttactcgattctataacattattttgggttgggactataaacagcttactaaagagaatgagaggaaaaatagaaaggattctaaagagaaattgaatgttgtaaagaatacttataaagatgttgatgattatttcgagacttttgaaccattgctcttcgaggaagttaaagctcaaattttgcagaataaagatggtgaagaagcatcggtgtgtaaaatgagattggtaatggagtgcaacgagggcgaagggtttcactttctgttagtcacatacgaacatgaggaggatgaatatcttgctcaaaatgatcttttattgctatcaaaagaagaggttaaagggaattcatttccttcatcttatgggtttgctgtagtggaacatcgtcaaaataatcttcttcgtcttcggatgtatttagctgaagacattgtgcagataaccaagaatactaaatcctctagaacaaagtcatttatccaagcgctttcaaatatgcgttctcttattacatcatctgccagccctattgacaaaagggtattcagtttaaagttatgtggtttatcaaccattattcgggaatatatagcactacgatcagttagttcgctccctttcaaggatttaatcttcactgcagcagaaaaatcttgtggttttggagatgaagcatggaaaatatctggacctctgaatgaattctttaacgaaaaccttaacaaatcccaaaaggaggcaattgatgttggtctatcaagaaaatccttcgtcttaatacagggtcctccaggtaccgggaaaactcagacgattcttagcatacttggtgctattatgcatgctactcccgcaagagtccagtctaagggtacagatcatgaagtaaagcgtggtattcagatgactatccaggaaaaatacaatcactggggaagagcctctccttggattttgggtgtcaaccctcgagatgctattatgcctgaagatggtgacgatgggttctttccaacctcaggaaatgaattgaaaccggaggtggttaatgcgagtcggaagtacagattacgtgtacttgtctgtgctccatcaaactctgcacttgatgagattgtgttgcggcttctgagttcgggtcttcgtgacgaaaacgcccagacatatacacccaaaatagtacgaattggtctcaaggctcatcactctgttgcgtcagtatcactggatcaccttgtggcacaaaagcgtggctctgccatcgataagccaaaacaagggactacaggaactgatatagatagtatccgcactgcaattttggaagaggctgcgattgtgttcgctacccttagcttcagtggctctgcacttcttgctaaatctaaccgtggtttcgatgtcgttataatagatgaagctgcgcaagctgttgagccagcaactcttatccctttggccactaggtgcaaacaagtatttctggtaggggatccaaagcaactcccagctactgtaatctcaactgttgctcaggattctgggtacggtacaagcatgttcgagagacttcaaaaggctggctatccagtaaaaatgttgaagacccaataccggatgcatccagagataagaagctttccgtcaaagcaattctatgaaggggcactagaagatggatctgacattgaagctcagactactcgtgactggcataaataccggtgctttggtccattttgcttttttgatatacatgaagggaaagagtctcaacatccaggagcaactggttctcgggtaaatctagacgaggtggaatttgttcttctcatctaccacagacttgtaaccatgtacccggagctgaagtctagttctcagctagctattatatcaccgtataactaccaagtaaaaactttcaaagatcggtttaaggagatgtttggtacagaggcagaaaaagtggttgatatcaacactgttgatgggttccagggaagggagaaggatgttgcaatattttcatgcgtcagagctaacgaaaatggacaaatcggttttctctctaattctcggcggatgaatgtggggattacacgagccaagtcttcagtattggtcgttggttcagctgcaacattgaagagcgatccactttggaaaaaccttatcgaaagtgctgagcaaagaaaccgattattcaaggtttcaaagccattgaacaatttcttcagcgaagagaatctggagacgatgaaactgacagaggacatggagattcctgatgcaccgttgtatgaagacgaatctcttccggtggcaccatatggtggagatgatgactttggagatggtgatgctgatcaagacgatgtagccatggccggagaagactaaactctaaaaaccttttcgttattagttagaactttgatattacaggaagtggttgaacatctaacaatatctacacttattatttgtatggttttattttggtttacatacagtaataagaatgtctttacttgtgctacg

SEQ ID NO: 86 - DNA, 1543 bp, Arabidopsis thaliana
  source 1..1543: mol_type = genomic DNA
ctctttctttgtgggttctagtttgtgtgtatatatactatatgcacatacacataggaagatatgatgggttacgagcagatgaatcagatgacaatgacgacaacagcgatgatgaagaattacaataagaagggactaatcaatactccacagaagaaaatgacgaggagaagtgtgtcggctattgatggtggtgcagctgcgacggctaaagaaggagatcgccgtcagaatatcaagactcttgatcttagcggcatgtccttggcttctctctctgcctcttctatcaacttagcttcaatctccaaactcgatctctccaacaacaatattcagaaaattccggaatctctagtagcgagaatgttaaatttgtgggcattggatttgcaatccaatcagctaaaaactcttccaaactccattggatgtctttccaaacttaagtttcttaatgtctccggaaattatctccaatctctccccaaaactatagaagattgcagatcgctggaagagctgaacgccaacttcaacgagcttacaaggctcccagacgcgatagggtttgagctaacgaatctgacgaagctctccgtcaactcaaacaagcttgttctcttgccaaactccgttagctacttgacgtcgctgcgtgtgctcgacgcgcggctaaaccgccttagttccctccctgaggatcttgagaacctcgtgaaccttcaggtcctcaacgttagccagaacttccagcacttgacgacgttaccttactccgttgggttgttgatatctctcgtggagcttgatgttagttataacggaattacggttttaccagactccctcggctgtcttcgccggattcagaagctatccgtggagggtaatcccctcatttccccaccatttgaagtggtggaacaggggttggaagcattgaagcagtatatgagcgagaagatgaccgagtcttataagaaaactccgaccaagaaaaagtcttggggcattggtaagctcgtaaagtacggcctgagctcttctccggggaggagtaccggccgtgaagacgggaaggaaggcttcatcaatgtatctgattaccgccaaatcgacggaatcgcctcaccgcgacatgtgtccctcttcaacccgcgacgcctcttgtctccactctccgcgtatttctctcctcctaggtattagcttatttaggtgtgttgtctgtctttttttttttcatcttctacatacgattccataccgttttcactgttacatccatgtagtgttaaattgttaatgttcttttacgttgttttctgcatgcttggtgtgaggataaaatttaattaaattgtgtatacgtttttttttccctgtctcatagaatttttctatggcttttctcatttcgttgtattgtagttcaattttgttgaacacatttgtaaactattacatagacacttaatattttactatgtatataatgtaaaatcgcatttttgaaagtactccaccatccttctca

SEQ ID NO: 87 - DNA, 1543 bp, Arabidopsis thaliana; identical to SEQ ID NO: 86
  source 1..1543: mol_type = genomic DNA

SEQ ID NO: 88 - DNA, 3675 bp, Arabidopsis thaliana
  source 1..3675: mol_type = genomic DNA
ctttcactcttcccttctctctccccaaaataaatcagaaacctatcaacattcttcaacagccacaagtaaaatttatagacatttctgtctgaagaagaaaaagattgaatttttttgcttgttgtgggttctttaatggatccaagaacaagacttgactatgctctgtttcagctcacaccaactagaacaagatgtgatcttgtgatattctctggtggtgagaatgagaaacttgcttctgggatttttcaacctttcgttacgcatctcaagagcgttagtgatcagatttctaaaggtggatactccgttactctccgtccttcctccgttggtgttccttggtttactaaagtgacccttcagagatttgtgcgatttgtgactactccggaggttcttgagaggtctgtaacattagagaaggagattgagcagatcgaggattcgattcaagctaatgcagccgccattgccggtgaagctgaaggaaacgagttgggtggtacatggacttctcaaaagtctacggctttatcaaagacgaaaggggaaactgatggagacactgtggaagaaaattcgaaggttggtcttcagcgtgttctggagaaccgtaaagcggctttgtgcaaagagcaagcgatggcttatgctcgagctttggttgttgggtttgaacttgactacatggatgacctcttttcgtttgctgatgctttcggagcttcgcggttaagggaagcgtgtgttaactttgtggacttgtgcaagagaaagaacgaggatagaatgtgggtggaccaaatcactgctatgcaagcatttcctaggcctgaattaacgttcatgggtgactctgggatcgtactcgctggtgaagagaatgatttgttgaatgctacaaacgtaaagcatggaaactctatggatgcctcgagccagggtagctttgagactggccaagaagggagagctcaaatggcaatgccgtggccaaaccagtttcctcagtacatgcagaactttcaaggacatgggtatccgcctccttatatgtttccggggatgcaaggtcaatcaccatatttccatgggaatatgcaatggcctgtaaacatgggagatgtggagtcaaatgagaagtcttccaagaagaaaaagaagaagaagaagaataagaagaagtcgaagcaagatgaatctgccgagccaagcgataattccagtactgagaccgaatcagaagacggaaatgaaggaaagaaacaatccaggaaagtggttatccgcaacataaattatataacttcaaagaggaatggagcgaaggagagtgattcagatgagtctggagaagaagaagggtttgtggatggagattctattaagcagcaagtagaagaagccattggctcagtggagagacgtcataaatcgacttcacaccgtcagaggaaacacaaaagtcacaacggtgatgatgattcaagtaacaaggaaactaaggggaatgataattgggatgccttccagaatcttcttttgaaagacaatgattcagagccagaagaattactacgtatatcatcaactgcgttaaatatggcgtctgaagttgtgagaaagagagaaccgccttctgatgattcattcttggttgcaattggaaatgaggattggggaagagaaaccagcattgagaaattcaatgcaggtgagaatgttcggataataaggaaagggaacaactatgacgaggagatgttgaatccgggtagaagcgatgaatcaagaagctattcgcaggcagagatgtcggttcatgatgggaagctcagaaccagaaatgaggcggaagaagactggttcatacgtaaccaagctggtccagaaacagatccaagtcttgtcaaaacatttgtaggagaccatttccacttaaataagagcagtgagagagatgtcctgaccgatgactctttcatgatccattctcgtgttgagaaccaagtagaagattctcggttaaggacagaaatcatggacttagacgtttacggaaccacccaacaagaaaacagtgccccggagaacactccgcatgaaccagatgacctatacatggttcttggacgggaacaagatgttaaacctacattgttaccatggacccctgaaattgactttgagactaacactttggctcaaagaacaagcagaatcgatttgataactgccacaaaggcctctgcaggtgaacaaaccttagatggtaaagaaaagaagagtcgtggtatctccaaggggaaggatgcaaagtcaagagcatcaagtagacctgacccggcgtcaaaagccaagagacctgcttggggaagtagagctgctgtctccaagtccaaatccgagatggaggaagagagaaagaagagaatggaggaacttttaattcagaggcaaaagagaattgcggagaagagttccggtggtagtgtatcaagttctttagcgtccaagaaaactcctactgtgaccaagtcagtgaagagctcgataaagaatgagaagactcctgaagccgcgcagtcaaaggctaagccagtactgagaagttccaccattgagcgccttgctgttgctcggaccgctccaaaggagccacagcaaaaaccagtaatcaaaagaacatcaaaaccttcaggatacaagacagagaaagctcaggaaaagaaatcgagtaaaataggtcaatcagatgcgaaaagtgtggaactttctcgtgacccgagtctcgaaatcaaggaaacggtggtggaagattcacattcttacttgtcagagaagcaagttgatgcacttcctgctgttgcttctgttgatgatttcaaagacattaaagaattgcatagcttgccatcagaagaaacggccagagtaaagaacagaccgaatgaaatcatagcagagaaagtacaagatcagacgaagatcgatgatcaggaaacagtgaagaatacatctgtttctgaagataagcaaatcaccacgaagcattactcagaggatgttggagaagtccaggcttcacaggaaaaaccggtgtctccaaagaagtcggtgactttttcagagacaaacatggaggagaagtattatttctcaccagcggtctcagagattgacatctcaacgccacctgctactgaagcagatcattcgaggaagaaatggaacagtgaagagacgtctcccaaggcaacggctaaagtcttcaggaagcttcttatgttcggaaggaaaaagtaaaaccgacgttggaattcttcttctccggcatcatcgaacctttgttttgagacgacgtcatgttgagttcagagaacaatatatggggatgtgttggaatcatgaatcgtaggttaaatcctacaagaggaaaagcttcaggagacagagaagatgaagagaagagaagaaaggaagaagaagaagaagtcgtgacaaagaaagtcagctaatagacatatctccgctatttaaagtcgagtctaagcctttatacacttaaaggttgagggttcgaacccttgttatgtctttttgccctaaaagaaaaaaactttctcatgaaattccgtgagatgattcttccattctaagcatttg

SEQ ID NO: 89 - DNA, 3675 bp, Arabidopsis thaliana; identical to SEQ ID NO: 88
  source 1..3675: mol_type = genomic DNA

SEQ ID NO: 90 - DNA, 3727 bp, Arabidopsis thaliana
  source 1..3727: mol_type = genomic DNA
atatccagataattaattctctcataatatcttctccacaatttcaactcttctaaagtctaaaccatgaagttactctcaaagacctttttgatattaactctcaccttcttcttctttggcattgcactagcgaaacagagctttgaaccagagatcgaagctttgaaatccttcaagaatggtatttccaacgaccctttaggagtattatcagattggaccatcatcggttcgttacgacactgtaattggaccggaatcacctgcgatagtaccggacatgtagtctcggtttccttgctggagaagcaacttgaaggtgttctgtctccagccatagcgaatctcacctatctccaggttcttgatctcacttcaaatagttttaccggcaaaataccggctgaaataggaaagttaaccgagcttaaccagcttattctgtacctaaactatttctctggttcgattccttctggaatctgggagcttaagaatattttctatcttgatcttagaaataatttgttgtccggtgatgttcctgaggaaatctgcaaaaccagttctttggtattgattgggtttgattacaacaacttaaccgggaaaataccagaatgcttaggagatttggttcatctccaaatgtttgtagcagctggtaaccatttaactggttcgattccggtatcaattggtactctggctaatttaacggatttagacctgagtggtaaccagttaaccggaaaaataccgagagattttggaaatctcttgaacttacagtctctcgttttaactgaaaacttgttggaaggagatataccagctgagatcggaaactgctcgagcttggtccaacttgagctttacgataaccagttaaccgggaaaataccagctgaattagggaatttggttcagctgcaagcactccggatatacaagaacaaacttacttcttcaattccatcttcattgttccggttaactcagttaacccatttggggttatcagaaaaccatttggttggaccgatatcagaagaaatcggttttcttgagtcacttgaagtcctcacacttcattccaacaacttcacaggagagtttccacagtccatcacaaacttgaggaacttgacagtcctaacggtggggttcaataatatttccggtgagctcccggcggatctagggcttcttacaaaccttcggaacctttcagcgcacgacaatcttcttaccggaccaataccttccagcataagtaactgcaccggtcttaaactcctggacctgtctcacaaccaaatgactggcgagatcccgcggggtttcggaaggatgaatcttacgttcatttctattgggaggaatcatttcaccggtgaaattccagatgatatcttcaactgttcaaacttggaaactcttagtgtggcagataacaacttaacaggaactctcaagccattaattgggaagcttcaaaaactcaggattttgcaagtttcatataactctctcactggaccgattcctcgagaaatcgggaatctgaaagatttgaatatcttgtaccttcactctaatggtttcacagggagaatcccgagagagatgtcgaatctcactctcctccaggggctaaggatgtattcaaatgatcttgaaggtccaattcctgaagaaatgtttgatatgaagctactctcagttcttgatctttccaacaacaaattctcaggtcaaattcctgccttgttctccaagcttgaatcgcttacctacttgagtcttcaaggaaacaaattcaacgggtctatccctgcaagccttaagtcgctttcgcttctcaacacattcgatatctccgacaatcttctcactggaaccatccctggagagctgttagcttctttgaaaaacatgcagctttacctcaacttctcaaacaacttgttgactggaaccatcccaaaggagcttggaaagcttgaaatggttcaagaaatcgacctttcaaacaatctcttttctgggtctattccaagatctttacaggcctgcaaaaatgtgttcacactggatttttcgcagaacaatctctcgggtcatataccagatgaagtcttccaaggcatggatatgatcataagcttgaacctttcaaggaacagtttctctggagaaatccctcagagcttcgggaacatgacgcatttggtctccttggatctctctagtaacaatctcactggtgaaattccagagagtctcgccaatctttcgactctgaaacatctcaaactagcttcaaacaacctcaaaggccatgttcctgaatccggggtgttcaaaaacatcaacgcctctgatctaatgggaaacacagatctctgtggtagcaagaagcctctcaagccatgtacgatcaagcagaagtcgagccacttctcgaagagaaccagagtcatcctgattattcttggatcagccgcggctcttcttcttgtcctgcttcttgttctgattctaacctgttgcaagaaaaaagaaaaaaagattgaaaattcatcagagtcctcattaccggatttggattcagctctgaaactgaagagatttgaaccaaaagagttggagcaagcaacagattcattcaacagtgccaacatcattggctcaagcagcttaagcacagtgtacaaaggtcagctagaagatgggacagtgattgcagtaaaagtattgaatctaaaggaattctctgcagaatcagacaagtggttctacacagaagctaaaacattgagccaactaaaacatcgaaacctggtgaagatcttagggtttgcgtgggaaagcggcaaaacgaaagctttagtgcttccatttatggagaatggaaacttggaggacaccattcacggctctgcagcaccgattgggtcgcttttagaaaaaatcgatctttgtgttcatatcgcaagcggaatcgattatcttcattctggatatggttttcccatcgttcattgtgatctgaagccagctaatatactccttgacagtgaccgcgttgctcacgtaagcgattttggaactgctcggattctaggtttccgcgaagatggaagcaccacagcttcaacatcagccttcgagggtacaattggatacttagctccagagtttgcttatatgaggaaagtgacaacaaaagccgatgtattcagcttcgggatcataatgatggagctgatgacgaaacagagaccaacttcgttgaatgatgaagattcacaagacatgactttgcgccaattggtggagaaatcgattggaaatggaagaaaagggatggttagggttcttgatatggaactcggggactctattgtttctctgaaacaggaagaggctattgaagactttctgaagctttgtttgttctgtacaagctctagacctgaagatcgacctgatatgaacgagattcttacacatctgatgaaacttagaggcaaagcgaattcatttcgagaagatcgtaacgaggatcgagaagtttagcagcaaagcttttttgatgacattttttcgactttgccaaactctgttacgaaggttgaatactttggacgtaaaacgttctgattttgcttttcgttatgtatttctgttttatataaggttgaaatttggttttgat

SEQ ID NO: 91 - DNA, 1177 bp, Arabidopsis thaliana
  source 1..1177: mol_type = genomic DNA
caaaacaaaacgccattttttgtcgattcttcgtcgtcctcctttgaaattcacaccaatttgtctctcttcctagagaaacaaaagattattcgaaactcgggaaagtatcatccggtcaccggaaaattgattatttccgatgccaataggtgaccgtcagaatccgagtgtggagaagaagaagaacctcttcaggctatgtccgttttggcagaggagaagcaccacttcttcatcttcaacacagaatccaaaccaaaactaccgtagccgccatggaaatcggaatacagatatttccgccgtctctaagcctccgttgactatgtcttccgtcgccagatcacttcttccagctcgccgtcgtctccgactagatccttctagttatctgtatttcccttatgaacctggaaaacaagttcgcagcgcaataaagcttaagaacactagcaaatctcatactgcatttaagttccaaacaacggcacctaagagttgttatatgcgtcctcccggaggtgttttggctccaggagagagtgtttttgctactgtgttcaagtttgtggaacatccagagaacaatgaaaagcagccgttgaatcagaagagcaaggttaagtttaagattatgagcctgaaagttaaaccaggagtagagtatgtgcctgagttgtttgatgagcaaaaggatcaagtagcagtggagcaggttcttcgggtcatttttattgatgcggaccgcccaagtgctgcattggagaaactgaaacgtcaattggatgaagctgaagctgcagttgaagcaagaaagaagcctcccccagagacagggcctcgagttgtcggggagggtcttgtcatagacgaatggaaggagagaagagagaagtaccttgctcggcaacaagtcgaatccgtagattctttgtcctaaacgcagagagcaatgtggacttgttctgcagatcatgtacataatttattatccctcgattatgtatttatctctagacgattactttgtggttcttgtatgtctctgtttgttgtgtgattcatgccggttttttctccttcatcaaattttgtttcggtcgtttttagttgatctagaatcgaaccagagtttgttcagtatttagttacaaatgaaaaatcctgttatacc

SEQ ID NO: 92 - DNA, 1115 bp, Arabidopsis thaliana
  source 1..1115: mol_type = genomic DNA
tactcacttttacaactaactcataagtaaaacacagacagtttttagatggctaagatatattccccttcttttcccggtactctctgtctttgcatttttactctcttgacgctaatgttcattcgggtttccgctcgacccgcgacattcgtcgaggatttcaaagccgcctggtcggaatctcacatccgtcaaatggaagacggaaaagctatccagctcgtccttgatcagagcactggatgtggatttgcttccaaaagaaaatatctattcggacgagtgagcatgaagatcaaactcattcccggagactctgccggtacggtcaccgctttctacatgaactccgatacggccacggtgagagacgagctagattttgagttcttgggaaacagaagtggtcaaccttactcagtgcaaacaaacatatttgctcatggcaaaggagatagagaacaaagagttaatctttggttcgacccatctatggattaccacacttacactatcttatggtcacacaaacacattgttttttacgtagacgatgtgccaataagagaatacaaaaacaacgaagccaagaacatagcttacccaacatcacaacctatgggagtatactcaacattatgggaagcagatgactgggcaacacgtggtggattagagaaaattgattggagcaaagctccattttatgcttattacaaagatttcgacatcgaaggttgtcctgttcctggaccaaccttttgtccatcgaaccctcataattggtgggaaggttatgcctatcagtctcttaacgccgttgaagctcgacgttaccggtgggttagagtaaaccatatggtttatgattattgtactgaccggtctaggtttcctgtcccaccacccgagtgtcgtgcttgaaaataattgcatacgtacgttgcaatgatcatgtttcgtcttgtacgagattttatatataaattgtgggaaaatgtggattgtattgtcctcttacgcaattgtgcagacgtacgtgagtgtgtatagatataattgtgatttgtggttatttgaaatttttataaacatagatgaattctgtgaag

SEQ ID NO: 93 - DNA, 1981 bp, Arabidopsis thaliana
  source 1..1981: mol_type = genomic DNA
actggtgtgcgcactaagcaagcatactctattatttgtcgaaatcacaagagccagccagtctctctgagttctatcacaatcttcttcttcagagcttattgagtaatggcggcttcaatgcagttctacggagttaaaacaccagaacttgccttaaactcaaaaaggattgagtttagctcaaaggggctcaacttctcagcactcgtgtcctctgctcgtgtattctctagaaacgtagatcgttcttgtaagaacatcgctctgagagttacttgtgaagcgggaagagtggagctgctagagagaaaagcctcagagactttcaagttaaacaaaactgagaaaaaattgacctgtgtaatgaaattcggtggctcatcagtggcatcagcagaaaggatgatacaagttgccaaactcatactcagcttcccagatgagaagcctgttgttgtgctatcagcaatggcaaagaccaccaataagcttttgatggctggggagaaggctgtttgctgcggtgtcaccaacgtcgacactatcgaagagttgagctatataaaggaactccatataaggactgctcatgagcttggagtggaaacagcagttattgcagaacatctagaaggactggaacagcttcttaaaggcgtcgcaatgatgaaggaattaactttacgctcaagagactacttggtttcatttggagaatgcatgtccactaggctatttgctgcgtacctgaacaaaattgggcacaaagcacgacagtatgatgcatttgagatcgggattatcaccacagatgacttcactaatgctgatattcttgaggcaacatacccggcggtttcgaaaaagttacttggtgactggagcaaggaaaatgcactccccgttgtcacaggcttccttggaaagggatggagatcttgtgctgtaactacgcttggtagaggaggtagcgatttgactgcaacaacgatcgggaaggctttaggtttgcgggagatccaggtttggaaagatgtggatggagttttgacttgtgatcctaacatttactgcggagctcaacctgttccacacttgacatttgatgaggctgctgaacttgcttactttggtgcccaggtgttgcatccactttccatgcgcccagcgcgagaaggtaacattcctgtaagggttaagaactcttacaatcccactgctccaggaactgtcatcaccagatcaagagacatgagcaaggctgtattgaccagcatcgttctgaaacgtaatgtcaccatgttggacatcactagcacccgtatgctcggccaatatggtttccttgccaaggtgttttccacatttgaaaagttgggcatatctgtggatgttgttgcaaccagcgaagttagcatttctttgacattggatccttcaaagttctgtagcagagagttaattcaacacgagcttgatcaggtggtggaggaacttgagaagattgctgttgtaaatctgcttcgacacagatcaattatctctctcatcggaaatgttcagagatcatcattcatattagagaagggcttccgagtacttcgaaccaatgggattaatgtccagatgatctcccaaggtgcatctaaggtaaacatctcactgatagtgaatgatgatgaggcggagcattgtgtgaaggctctccactcggccttctttgagacagacacttgtgaagcagtctcagaatgcccgaccggctacatcgctgcctcttcgtgaaacctctaggtgcaacctgcaaggtctgaaagtactagctagtttgatgttatgattcttgtcagactggtattaggaaacaaagctcccattctccttgtgtaatataatgtaatttgattgggagatgtactggaaaatcaataagttttcctatttgaatatatgattaggactgcctacaacatcagtt

SEQ ID NO: 94 - DNA, 3043 bp, Arabidopsis thaliana
  source 1..3043: mol_type = genomic DNA
atgagatctcttctctttgtactatcactcatttgcttttgctctcaaacagcactttcatggaagaaggaagagtttcgcagctgtgaccaaactccattttgtaaacgcgctcgatctcgtactcccggcgcgtgttctctaattgtcggcgatgtttccatcactgatggagatctcgtagcgaagcttctaccgaaagcgcctaatcaaggcgatggggatcagatcaagccgttgattctttctctctcagtttacaaggatgggatcgtgcggcttaaaatcgatgaggaccattcgttgaacccgccgaagaagaggttccaagttcctgatgtggtagtgtctgagtttgaggagaagaagatctggctgcagaaagtagcgacggagacgatctctggagacactagtccgtcttcagtagtttatgtatccgatggttacgaggcggtggtgcgacacgatccgtttgaggtgtatgtgcgtgagaaatcaggtgatcgccgtcgcgttgtgtcattgaattctcatggattatttgattttgagcagttggggaggaaaactgaaggagataactgggaagagaaatttaggactcatacagattctagaccatctggtcctcaatctattagtttcgatgtttcgttttatgattccagtttcgtttatggaattcctgaacacgccactagcttcgcgttgaagcctaccaagggtcctggagttgaggaatctgaaccctacaggctttttaatctagatgtgtttgaatacgatcatgaatcaccgtttgggctttacgggtcgattccgttcatggtttcgcatgggaagtctggtaaaacttcaggatttttctggttgaatgctgcggaaatgcagattgatgtgttggctaatggttgggatgcagagagtggtatttctttgccttctagtcacagtaggatcgacacattctggatgagcgaggcagggattgtggatacattctttttcgttgggcctgagccaaaggatgttgtaaagcagtatgcaagtgtgacaggtacttcagccatgcctcagttgtttgccactggttatcatcaatgtaggtggaactacaaagatgaggaggatgtggcacaggtggactcgaaattcgatgaacacgatattccttatgatgttctctggcttgacattgagcatacagatgggaagagatactttacatgggatagtgtgttgtttcctcatccagaggagatgcaaaagaaattggctgcaaagggtaggaagatggtgaccattgtggatcctcatatcaagagggatgactcatacttcttacacaaagaggctactcagatgggatactatgttaaggattcatctggaaaagactttgatggttggtgctggcctggttcatcatcttacattgatatgttgagcccagagattagaaaatggtggggtgggaggttctcgtataagaactatgttggttcaactccatcattgtacacctggaatgacatgaatgagccttctgtattcaatggtcccgaggttactatgccaagagatgcattacatgttgggggtgttgaacacagagaagttcataacgcatatggatattacttccacatggcgacttccgatggacttgttatgcgtgaagaaggaaaggataggccttttgtattgtcaagagcaatctttcccggcactcaaagatacggagcaatttggactggagataacacagccgaatgggaacaccttagagtctccattccaatgatattgacacttggtcttactggaattacattctctggagctgatattggtgggttttttggaaatcctgaaccagaacttctagttaggtggtaccaagtgggtgcttactatccatttttcaggggtcatgctcatcacgataccaaaagacgagagccttggttgtttggtgaacggaacacagaactcatgagagatgccatacacactcgttacacactgctcccatacttctacacgttgttcagagaagcaaacgttacgggtgttcctgttgtacgcccattatggatggaattcccgcaagatgaagctacttttagcaacgatgaagccttcatggtcggtagtggtctactggttcaaggagtttacaccaagggaacaacgcaagcttccgtgtatttgcctggcaaagaatcatggtatgacttgagaaacggtaagacttacgttggaggcaagactcacaagatggatgctccagaggagagtattcctgcgtttcaaaaggcaggaaccatcatcccaaggaaggaccggtttaggcgaagttcctctcaaatggacaatgatccttatactttggtggtagctttgaacagttctcaagaagcagaaggtgaactctacatcgatgacggcaaaagctttgaattcagacgaggctcttacatccatcgtcgcttcgtcttctcaaagggtgttcttacatcaacgaacttagctcctccagaagctcgtctctcttcccaatgcttgatcgacagaattatcctcttgggacacagctcaggtccaaaatctgcgttggtggaaccgttgaatcaaaaggcagagattgagatgggacctctgcgaatgggtgggcttgtagcttcctcgggtacaaaggtgttgactatccgcaaaccgggtgttcgagtggaccaagactggaccgtaaagattctgtgattgaacggtttgaaccagtttcactcatggccgttagagtggccgaaatctgcttttccggcgacggaatatcacactttttaatatatgtttggagatttagacttaaatagttgtaagagctaacagtttgaaagtcactttgcattgttgtttatcttcatataaatgagtttagattttgataatttcagaattcgtggaatcataattaacaattttgatagggaaaaataatttgttttttttagtcagagggtcaaataatcttaccttc

SEQ ID NO: 95 - DNA, 787 bp, Arabidopsis thaliana
  source 1..787: mol_type = genomic DNA
attttttctagggtttcctcttccgcattcgtcgtcttcagctcctcctacacagtttcttctctgaatctacttaggaagctaaaatgggtagatgtccgactagaaaagtgaagaagaggagattatctcacaaaacagctcgccgtgacaaattcgaagtcaaaggcgatgacttggtttacacagagttgcgtaaaccggagacggagattaagccgttacagcttgacgaggatttgcctggaatgggtcaattctactgcttacactgcgatcgatacttctccaacgtatcagtgagggatgatcatttcaagactaagaaacacaagaagcgtgtgaatatgatgatgggacaagcgccacactcgcaactcgatgcagatttagccgggggaatggggatgccggacaatggcccaaagctgatgtctaatttggtattcacagagttgcgtaaaccagagacggaggatttacctggaatgggtcaattcaactgcttactctgccatcggaacttctccaatgcatcagtgatggattatcatttcaagactaagaaacacaaaaagcgtgtgaagaagatagagcgaccagcgccacactcgcaactcgatgcagatttagctggtggaatgggaatgccagacaatggtccaaagctgatgtctgcctgagtttttacagttattttccttatttagttaatggaacccgaaattttgttgtaaaactataatctcctaaattaatgatacaggttttttgtctgttgccaagt

SEQ ID NO: 96 - DNA, 1397 bp, Arabidopsis thaliana
  source 1..1397: mol_type = genomic DNA
aaaataatggcttcgcccgggttcgaaccggagaccttcagtgtgttagactgacgtgataaccaactacaccacgaaacctacatgcttctttctaacctcaacaatatatatatacatatagataactgtttaatattgtaacttgtaaccagtgtcggctaatttcgacttttgtagatctttttctgctctttctctctctctctctctctctctctctctctctctctctcttgtattatttctatctcccccgccgtcgaaagagaaacgtcgatcggagaacctttgaaatgtcgactggattagatatgtctctcgacgacatgatcgccaagaaccgtaagtctcgtggtggagccggccccgctcgtggaaccggatccggatccggaccgggtccgactcgccgcaacaaccctaatcggaaatcaacccgatctgctccataccaatcagccaaggcgccggagtccacctggggtcacgacatgttctccgatagatctgaagatcaccgatcgggacgttcctccgccggaatcgaaactggaaccaagctctacatttccaatttggattacggtgtcatgaacgaagacatcaaggaactgtttgctgaagttggagaacttaaacgctacacagttcattttgatagaagtggaagatcaaagggaactgctgaagtagtgtattctcggcgtggcgatgcactcgcagctgtgaagaagtataatgatgttcagctggatggaaaacccatgaagatagagattgtgggcactaatcttcaaactgctgcagccccgtctggtagacctgcgaatggaaactccaatggtgctccatggagcagaggaggacaagggagaggaggtcaacaacgaggtggtggacgaggaggcggtggccgaggtggtggtggtcgtggtaggcgtcctggtaagggccctgcagagaagatttctgcggaagatcttgatgcggatcttgataagtaccattctggagatatggagacaaactaaggaacgtgactgatcttctcaaaccggtaggggttttaggaggaagagaatcgagaaaatgtttgccagaggctttaccacttagcgcctttttggctgtgttgttcatttgtttcattagaatgactttacagaattgagaatatgtgttatttaaagttgttgtctatcttaataccctcaagtgaaaggcagaggaaggaataccaatttcgtttacagatcatatgcaggcaaaagagttttcagaaatcaggtttagttacttgtattgtgtctcttatccaagccatgccttgtggtattatgagcgcagaattttgattgaatattgttcatttgcattaaagtatcaaaccattt

SEQ ID NO: 97 - DNA, 636 bp, Arabidopsis thaliana
  source 1..636: mol_type = genomic DNA
aaaactcctccgtaaaaccctttcatttgcatttgggaatcgattgctcttcttcgtagtcgcctttgaattcgcagagtgagaagcaatgaaggtgagatcatctgtgaagaagatgtgtgagttttgtaaaacagtgaaacgtcgtggacgtgtgtatgttatatgctcttccaatcctaagcacaagcaaagacaagggttcagttcctttgcttatgaaggaattacaccttcccctttgtttgctgagccgattgctagtcaggagttggtgaggctgcctggtcagggggtatcagccggactggcatcacttttacacaaaaggcctatgccaacagcgtatttcggatggaggtctggtcttgcatccattctcttcaaacaaggaaattaggatgtcagcatttccctttttattcttcagatttgtaatcgcagttttcttccaattcctatgaaacattattgtatatctctccacttttactttggtcagtcgtatgctccttcgagacctgtttgattgtgcctcgcatgacctgaacaaagagatatattatgacactcgagtatttgtttttacattttccactggagcatatgttagggatcaatatgtttttcttttag

SEQ ID NO: 98 - DNA, 666 bp, Arabidopsis thaliana
  source 1..666: mol_type = genomic DNA
tgctcttcttcgtagtcgcctttgaattcgcagttagagatggatgcttcagattcgttttacttttgcttccatcatcggatcaactaaggattgcagtttttctgagtgagaagcaatgaaggtgagatcatctgtgaagaagatgtgtgagttttgtaaaacagtgaaacgtcgtggacgtgtgtatgttatatgctcttccaatcctaagcacaagcaaagacaagggttcagttcctttgcttatgaaggaattacaccttcccctttgtttgctgagccgattgctagtcaggagttggtgaggctgcctggtcagggggtatcagccggactggcatcacttttacacaaaaggcctatgccaacagcgtatttcggatggaggtctggtcttgcatccattctcttcaaacaaggaaattaggatgtcagcatttccctttttattcttcagatttgtaatcgcagttttcttccaattcctatgaaacattattgtatatctctccacttttactttggtcagtcgtatgctccttcgagacctgtttgattgtgcctcgcatgacctgaacaaagagatatattatgacactcgagtatttgtttttacattttccactggagcatatgttagggatcaatatgtttttcttttag

SEQ ID NO: 99 - DNA, 1991 bp, Arabidopsis thaliana
  source 1..1991: mol_type = genomic DNA
attccttgcttcatttttcgtcaccctagccgctttactctcttgcgatatctctgaggtaattctggagcagcataaacaatcaattgattcattcttcttgataccaagttgtggaaactctaggattgtttgctgtatatctccagaattgctgttttgattgaatttaggtcgcttagctcagttgatagagcaccacattttttgtggtagaaatcgatttgtttgacagtctctaaccatgggtaaagagaagtttcacatcaacattgtggtcattggccacgtcgattctggaaagtcgaccaccactggacacttgatctacaagttgggtggtattgacaagcgtgtcattgagaggttcgagaaggaggctgctgagatgaacaagaggtccttcaagtacgcatgggttttggacaaacttaaggctgagcgtgagcgtggtatcaccattgacattgctctctggaagttcgagaccaccaagtactactgcactgtcattgatgctcctggccatcgtgatttcatcaagaacatgatcactggtacctcccaggctgattgtgctgtccttatcattgactccaccactggtggttttgaggctggtatctccaaggatggtcagacccgtgagcacgctctacttgctttcacccttggtgtcaagcagatgatctgctgttgtaacaagatggatgccactacccccaagtactccaaggccaggtacgatgaaatcatcaaggaggtgtcttcctacttgaagaaggttggttacaaccccgacaaaatcccatttgtgcccatctctggatttgagggtgacaacatgattgagaggtccaccaaccttgactggtacaagggaccaactctccttgaggctcttgaccagatcaacgagcccaagaggccgtcagacaagccccttcgtctcccacttcaggatgtctacaagattggtggtattggaacggtgccagtgggacgtgttgagactggtatgatcaagcctggtatggttgtgacctttgctcccacaggattgaccactgaggtcaagtctgttgagatgcaccacgagtctcttcttgaggcacttccaggtgacaacgttgggttcaatgttaagaatgttgctgtcaaggatcttaagagagggtacgtcgcatccaactccaaggatgaccctgccaagggtgctgctaacttcacctcccaggtcatcatcatgaaccaccctggtcagattggtaacggttacgccccagtcctggattgccacacctctcacattgcagtcaagttctctgagatcttgaccaagattgacaggcgttctggtaaggagattgagaaggagcctaaattcttgaagaatggtgatgctggtatggtgaagatgactccaaccaagcccatggttgtggagaccttctctgagtacccaccacttggacgtttcgctgtgagggacatgaggcagactgttgcagtcggtgttatcaagagtgttgacaagaaggacccaactggagccaaggttaccaaggctgcagtcaagaagggtgccaagtgaactctgaacatcaaaactctttccgctgatgaaatgaaggactattttagtttctttactttagtagtttggtatttggttggttgtttgtgttaccgcttcgtttattctccgtcggagctcaattctcggaattgggttcttgatcggaggtggcggaggtacttggcactcgagcttcctgtttatttcttttgttttgtgttatgattttgaacctttttggatattcggttatatgatatttgtgtcattcctgcggatattatcttatcttatcaacttaagtctgtttttcttctctaaaattcaacgatcagcctctgaagtttcttacatggtaaaattgtaatctagaactttaaacaacattggagaaacaagtctatatcagttt

SEQ ID NO: 100 - DNA, 1408 bp, Arabidopsis thaliana
  source 1..1408: mol_type = genomic DNA
tcatgatccttaatcttagctcctagggtttctgtgaattagtctaattttacaattttatgcctttgaggatatatcttaatgtgaaagttttaaacttgtaactcaaaaaccatttgttagttagtaatcatcatcattctgaattgagctttgtttgaatttgagtagggcaacgaaagattcaagttagttgcggtggtaagagtgaggtgttgaagagtgatacaatggaacctcatgaagcagaaacgtttgtgaacaagagaaccctttatgctcccattgagccatatagcagtggaaatttaaaggtttcagatgttcacactctctactgggagcaatcaggcaaacccgatggacacccggttgtttttcttcacggcgggccgggaggagggacggctcctagtaataggagattcttcgatccggagttttatcggattgttctgtttgatcagagaggtgcggggaagagtacaccgcatgcttgtttggaggaaaacaccacatgggaccttgtgaatgatattgaaaaactaagagaacatttgaaaatacctgaatggctggtttttggaggatcatggggaagcactctagctcttgcatacagtcagtctcaccctgacaaggttactggtttggtccttagagggatctttttgttgcgtaaaaaggagattgactggttttacgagggcggtgctgctgctatttaccctgatgcttgggaggagttcagagatcttattccagaaaacgagagaggtagtagccttgtggacgcgtatcacaaaagattgaattctgatgatctggaaattcaatacgcagctgcaagagcttggactaaatgggaaatgatgactgcttatcttcgtccaaatcttgaaaacgttcaaaaggcagaggatgataaattttcattggcgtttgcaaggattgaaaatcactactttgttaacaaaggtttcttcccgtcggactcacacttgctagacaatgttgataaaatacgacatatcaagaccaccattgttcagggaaggtatgacgtatgctgtcctatgatgtctgcttgggatctgcacaaagcatggccagaggcagaactcaagattgtttatgatgctgggcactcggcaaatgagccaggaatatcagcggaactcgtggttgccaatgaaaagatgaaagcacttatgggatgaagtatttgatggaatgaaagctgctcattttgttcatttctttgggacctttgttcatattttcaagtttgttgctgcaaagtaaatatcacattcagagttagttgttaacgcgaaaccgaatgttatttccatggacgtttatacccaaatgaaaaagacaatgacataggtgcagtgttttgaaa

SEQ ID NO: 101 - DNA, 1213 bp, Arabidopsis thaliana
  source 1..1213: mol_type = genomic DNA
acagagttcagaatatcgacggcgacaatttctctctccggctaacttttttctagagaaagctatggcggacgaagaagatgagttactggagacagaactaagttacgaccagaaaaaggaaatcgccaagtggtttttcctcaacgctcccgctggagaaatcaattacgtcgctaaagatttaaaggcggttttgagcgatgaggaagtgtacaatgaagcagccatggaagcatttccagtgtacaacaaaactcacatgatttgccttgaaatgcccagtggagctggtgatgtgattgtctcatcttacagtgaaattaatgaaaatgagtaccttgatccaagaactgcccaggttgccatagttgatcatgttaaacagatttgtacaaaggtacggcctgcaaatgatgaagaacttccttctttgtatattgaggagtacagatatgctcttgatgctgaaatccagagatatgttagtgaatcttatccgaaaggtatgtctgcagttaattgtgtgaaagggaaagataatgagggtccagggtccgactttgagcttgttgttataattactgctatgagacttagtccccagaacttctgtaatggaagttggagatctgtatggaacatagatttccaggatgaatcccaggtgcttgacataaaagggaaattgcaggtaggagctcattattttgaagagggaaatgtggaattagatgcaaaaaaagatttccaagattcaacaatatttcagtctgcagatgactgcgcgattgccatagccaatattatcaggcaccatgaaacagagtaccttgcatctctagaggtagcttattcaaaattaccggataacactttcaaggatttgaggaggaaacttccggtgacacgaactctgttcccatggcagaacactttacagttcagcctaacaagagaggtcgagaaagaacttggacttggcaagataagtattatttctgttgtgtcttgtctttcctttggagtaatgtatacaaatcgcattagtaagtatgatagatattgttccgcaagccgcatgaaagaattgaagtttggtcccaaaaagagctccgttgccgggaatcgaacccgggtctcctgggtgaaagccagatatcctaaccgctggacgacaacggatatgttattggaactgttaaagaactaa

SEQ ID NO: 102 - DNA, 2160 bp, Arabidopsis thaliana
  source 1..2160: mol_type = genomic DNA
ctcgtctccttctccacttggatctcaaaagtccgatccaaaaccaaatccgccataactctctctctctctcccacttcccacagagagacacattcatgccagcaatgccaggtctcgtctcagtcaaaactccttccgatacaccgccgctacgtgtagccgtaccagacacgcaacctctctcaaacccgccgcgaactccgatgaagaaaaccccttcctctacaccatctcgatccaaaccatcaccaaatagatccaccggcaaaaaagattccccaaccgtatcctcctccaccgcagccgtaatcgacgtcgacgatccatctctagataatccagatctcggtcctttccttctaaaattagctcgtgacgctattgcttctggtgaaggtcctaacaaagcattagattacgcgatccgagcaactaagtcctttgagagatgttgcgccgccgttgctccgcctattcccggtggtagcgatggtggacctgttcttgatctcgctatgagccttcatgttctcgctgctatttactgtagtctcggccgatttgatgaagctgtaccacctcttgaacgagctattcaagtccctgatccgactcgtggccctgaccactctctcgctgcgttttctggtcatatgcaacttggtgatacgttgtctatgcttggtcagattgatagatctattgcttgttatgaagaaggtcttaagatccagatccagactttgggtgatactgatccacgagttggtgaaacttgcaggtacttagcagaagcatatgttcaagcaatgcagttcaataaagcggaagagttatgcaagaagactctagagattcaccgagcgcatagtgaacctgcttcactggaggaagcagctgataggagattgatggcaattatctgcgaggctaaaggagattatgaaaacgctcttgagcatcttgttcttgctagtatggctatgattgcgagtggacaagaatctgaggttgcatcgattgatgttagtattgggaatatttacatgtcgctgtgccggtttgatgaagctgtgttttcatatcagaaggctcttactgtgtttaaggcttctaaaggagagactcatccgacggttgcgtcagtgtttgttagattggctgagctttaccatagaacagggaaacttcgtgagtctaagtcttactgtgagaatgcgttgaggatatacaataagccggtgcctgggacaactgtggaggagattgctggtggattaactgagatttctgctatttatgagtctgtagatgaacctgaggaagcattgaagctacttcagaagtctatgaaattgcttgaggataagccaggacagcagagcgccattgcagggttagaggcacggatgggagttatgtattacacagtggggaggtacgaggacgcaagaaacgcgtttgagagcgctgtgacaaagctacgggcagcaggtgagaaatctgccttcttcggtgttgtattaaaccagatgggactagcctgcgttcagcttttcaagattgatgaagcgggtgagctgtttgaagaagcaagaggtattcttgaacaagaacgtggaccgtgcgatcaggacactctcggtgtttatagcaatctagctgctacctatgacgctatgggaaggatagaggatgcgattgagatattagagcaggttctgaagctgagagaggaaaagctcgggactgcgaatccggattttgaagacgagaagaaacgtttggccgagcttttgaaggaagctgggcggtcgcggaactacaaagccaagtcgctccagaatctgattgatccaaatgcaagacctccgaagaaagagtcttctgctaagaaatggcccagcctcggtttcaagttctgaggaaaaaattatcatataaaataaatcatccacatatatattcaatattttattttattgttattgttatattttttatctgatctattttctgtatcataatctgaggttgatgaattaatttcatgtatagtgtttttatttgagtttggtgaaatactgccaagatggtgagctgtttgtttgagtttgaaatttctttaattcaatcacttttttcttcttctgataa

SEQ ID NO: 103 - DNA, 2248 bp, Arabidopsis thaliana
  source 1..2248: mol_type = genomic DNA
ctcgtctccttctccacttggatctcaaaagtccgatccaaaaccaaatccgccataactctctctctctctcccacttcccacagagagacacattcatgccagcaatgccaggtctcgtctcagtcaaaactccttccgatacaccgccgctacgtgtagccgtaccagacacgcaacctctctcaaacccgccgcgaactccgatgaagaaaaccccttcctctacaccatctcgatccaaaccatcaccaaatagatccaccggcaaaaaagattccccaaccgtatcctcctccaccgcagccgtaatcgacgtcgacgatccatctctagataatccagatctcggtcctttccttctaaaattagctcgtgacgctattgcttctggtgaaggtcctaacaaagcattagattacgcgatccgagcaactaagtcctttgagagatgttgcgccgccgttgctccgcctattcccggtggtagcgatggtggacctgttcttgatctcgctatgagccttcatgttctcgctgctatttactgtagtctcggccgatttgatgaagctgtaccacctcttgaacgagctattcaagtccctgatccgactcgtggccctgaccactctctcgctgcgttttctggtcatatgcaacttggtgatacgttgtctatgcttggtcagattgatagatctattgcttgttatgaagaaggtcttaagatccagatccagactttgggtgatactgatccacgagttggtgaaacttgcaggtacttagcagaagcatatgttcaagcaatgcagttcaataaagcggaagagttatgcaagaagactctagagattcaccgagcgcatagtgaacctgcttcactggaggaagcagctgataggagattgatggcaattatctgcgaggctaaaggagattatgaaaacgctcttgagcatcttgttcttgctagtatggctatgattgcgagtggacaagaatctgaggttgcatcgattgatgttagtattgggaatatttacatgtcgctgtgccggtttgatgaagctgtgttttcatatcagaaggctcttactgtgtttaaggcttctaaaggagagactcatccgacggttgcgtcagtgtttgttagattggctgagctttaccatagaacagggaaacttcgtgagtctaagtcttactgtgagaatgcgttgaggatatacaataagccggtgcctgggacaactgtggaggagattgctggtggattaactgagatttctgctatttatgagtctgtagatgaacctgaggaagcattgaagctacttcagaagtctatgaaattgcttgaggataagccaggacagcagagcgccattgcagggttagaggcacggatgggagttatgtattacacagtggggaggtacgaggacgcaagaaacgcgtttgagagcgctgtgacaaagctacgggcagcaggtgagaaatctgccttcttcggtgttgtattaaaccagatgggactagcctgcgttcagcttttcaagattgatgaagcgggtgagctgtttgaagaagcaagaggtattcttgaacaagaacgtggaccgtgcgatcaggacactctcggtgtttatagcaatctagctgctacctatgacgctatgggaaggtaaagtcctaaagaaaactatctgactatgtaattagatcagacatccttaatgaaacattaaagtctttcttcgtgatggctatgtaatttgcaggatagaggatgcgattgagatattagagcaggttctgaagctgagagaggaaaagctcgggactgcgaatccggattttgaagacgagaagaaacgtttggccgagcttttgaaggaagctgggcggtcgcggaactacaaagccaagtcgctccagaatctgattgatccaaatgcaagacctccgaagaaagagtcttctgctaagaaatggcccagcctcggtttcaagttctgaggaaaaaattatcatataaaataaatcatccacatatatattcaatattttattttattgttattgttatattttttatctgatctattttctgtatcataatctgaggttgatgaattaatttcatgtatagtgtttttatttgagtttggtgaaatactgccaagatggtgagctgtttgtttgagtttgaaatttctttaattcaatcacttttttcttc

SEQ ID NO: 104 - DNA, 1337 bp, Arabidopsis thaliana
  source 1..1337: mol_type = genomic DNA
ttaaagtaatgacttttttttatatgatatattctcaattttgttactcggaaacaatagaaaggataacgaatcgtttctcttcgatcgaaagaatatatatttggaagttttctctgcttttttgttttcgtttgatagaatgggaacagttctcgattcgcattttctggctctcactgctattgtcactgtgatttaccagttcatattcttcgtaatcacggctcttttcaaatttgatcaagtcactgactttgctggtagcacaaacttcgttatacttgctgtgttaacacttgttctcaaagcctcttggcattttcgacagatagtattgactttgctagttgtggtatggggtcttcgcttggggattttccttctaatgaggatcttgcaatggggggaagatcgtcgctttgatgaacagcgtggaaatatagtgagactaatcattttctggactcttcaggctgtgtgggtttggacggttagcttacctttaacacttgttaatgcaagtgatggtggtggatctcttaaacccgcagatgttatcggttggactatgtgggttttcggtttcttgattgaagctgcagctgatcaacagaagctatcattcaaaaactctcctgaaaacagaggaaaatggtgtgatgttggagtctggaagtattcaagacatccaaactacttcggtgagatgttactgtggtggggaatctttgtggctgcatcgcctgtgcttgaaggtgcagagtatcttgtcatattcggaccactctttctcactttgctacttctattcgtcagcggcataccattactcgaggcatcggctgacaaaaaacatggaaactcaggagcttacagatcctacaagaagacaacaagtcctctgattctgttcccaagaggagtgtatgggaacttaccaggatggttcaagacggtctttctcttcgagtttccattttacagccgaaatctccctcaagagggtagactccaaaacagcaaagagaaagaagtaaaagatgactgatttgtgatactcatatttgagttattgttcttcacaacactctttgataaaatttgtgtaaaaaattgcccgtaagaaactgaatttgtttgaaatattggacagtcttgacagattatctcagttgtatttggttcttttttttatgtgattttgttttttggttaaaaaaagttcccattccaagaatcgaacccgggtctcctgggtgaaagccaaatatcctaaccgctggacgacatcggatttgattatttgattatttaattactttatatgttgattt

SEQ ID NO: 105 - DNA, 1079 bp, Arabidopsis thaliana
  source 1..1079: mol_type = genomic DNA
gaagagtaagagtaaaaaacaaaaccttcgtctctaacaaatgtgtggcagctgattgaaactagtagtggtgaaggagaaggagaatgggagatctctacgctttggacttcgatggagttctctgtgatagttgtggagaaagctctctatctgctgttaaggcagccaaagtgagatggcctgatttgttcgaaggagttgattccgctttagaggaatggatcgtcgatcaaatgcatattgtgagacctgtggttgaaactggctatgaaaatcttctacttgtgcggctgttattggagaccaagataccgtctattcgaaaatcttcagttgcagaggggttgacggttgatgggatactggagagctgggcaaagtttaagcccgtgatcatggaagcttgggatgaagatagagatgctttggtagatttgtttggaaaagttagagatgattggattaacaaggacttgacaacttggattggtgccaatagattctacccaggagtttcagatgcactgaaatttgccagctcaaagatttatatcgttaccacgaaacagggccgctttgcagaagcgttactgcgtgaaatagcaggtgtaatcataccatcagaaaggatttatggtttgggttcagggccaaaggtggaagttctaaagctacttcaagataaaccagaacatcagggcttgacgctgcatttcgtggaagacagactcgcaacgctgaaaaatgtcataaaagagcctgaattagacaaatggagtttatacctaggaacctggggatacaacactgagaaagagagagctgaagcagcaggcattcccaggattcaggttattgagctctccacgtttagcaataagcttaaatgagtgcatatactcattggaaaagaaacaaagctttcctctttattgtattctacggcattcaacggaaactaaaaaccaaacatgtttaggtaagattcagtaaaagagttgaactttcagtactacccattatagaagcttttctgtgacctataattcatccttagtaagatcattcttgttacc

SEQ ID NO: 106 - DNA, 1064 bp, Arabidopsis thaliana
  source 1..1064: mol_type = genomic DNA
gaagagtaagagtaaaaaacaaaaccttcgtctctaacaaatgtgtggcagctgattgaaactagtagtggtgaaggagaaggagaatgggagatctctacgctttggacttcgatggagttctctgtgatagttgtggagaaagctctctatctgctgttaaggcagccaaagtgagatggcctgatttgttcgaaggagttgattccgctttagaggaatggatcgtcgatcaaatgcatattgtgagacctgtggttgaaactggctatgaaaatcttctacttgtgcggctgttattggagaccaagataccgtctattcgaaaatcttcagttgcagaggggttgacggttgatgggatactggagagctgggcaaagtttaagcccgtgatcatggaagcttgggatgaagatagagatgctttggtagatttgtttggaaaagttagagatgattggattaacaaggacttgacaacttggattggtgccaatagattctacccaggagtttcagatgcactgaaatttgccagctcaaagatttatatcgttaccacgaaacagggccgctttgcagaagcgttactgcgtgaaatagcaggtgtaatcataccatcagaaaggatttatggtttgggttcagggccaaaggtggaagttctaaagctacttcaagataaaccagaacatcagggcttgacgctgcaactcgcaacgctgaaaaatgtcataaaagagcctgaattagacaaatggagtttatacctaggaacctggggatacaacactgagaaagagagagctgaagcagcaggcattcccaggattcaggttattgagctctccacgtttagcaataagcttaaatgagtgcatatactcattggaaaagaaacaaagctttcctctttattgtattctacggcattcaacggaaactaaaaaccaaacatgtttaggtaagattcagtaaaagagttgaactttcagtactacccattatagaagcttttctgtgacctataattcatccttagtaagatcattcttgttacc

SEQ ID NO: 107 - DNA, 1133 bp, Arabidopsis thaliana
  source 1..1133: mol_type = genomic DNA
gcagctgattgaaactagtagtggtgaaggagaaggagaatgggagatctctacgctttggacttcgatggagttctctgtgatagttgtggagaaagctctctatctgctgttaaggcagccaaagtgagatggcctgatttgttcgaaggagttgattccgctttagaggaatggatcgtcgatcaaatgcatattgtgagacctgtggttgaaactggctatgaaaatcttctacttgtgcggctgttattggagaccaagataccgtctattcgaaaatcttcagttgcagaggggttgacggttgatgggatactggagagctgggcaaagtttaagcccgtgatcatggaagcttgggatgaagatagagatgctttggtagatttgtttggaaaagttagagatgattggattaacaaggacttgacaacttggattggtgccaatagattctacccaggagtttcagatgcactgaaatttgccagctcaaagatttatatcgttaccacgaaacagggccgctttgcagaagcgttactgcgtgaaatagcaggtgtaatcataccatcagaaaggatttatggtttgggttcagggccaaaggtggaagttctaaagctacttcaagataaaccagaacatcagggcttgacgctgcagtaactcacgttctatatatctatcaataattcttctatctgcatgacttggtaatggtcaccattagtttacaatccctatgcatttttaatttggccagtttcgtggaagacagactcgcaacgctgaaaaatgtcataaaagagcctgaattagacaaatggagtttatacctaggaacctggggatacaacactgagaaagagagagctgaagcagcaggcattcccaggattcaggttattgagctctccacgtttagcaataagcttaaatgagtgcatatactcattggaaaagaaacaaagctttcctctttattgtattctacggcattcaacggaaactaaaaaccaaacatgtttaggtaagattcagtaaaagagttgaactttcagtactacccattatagaagcttttctgtgacctataattcatccttagtaagatcattcttgttacc

SEQ ID NO: 108 - DNA, 700 bp, Arabidopsis thaliana
  source 1..700: mol_type = genomic DNA
acatcttctcttttcttccccagcaaaaaatgagtctgcaaaatagaaaattcaagctgcgattgcgaggaagagaagagacttcagatctagcttgatccggtgataatggcgctcgagtgggtggttttaggttacgcggcggcggctgaagcgattatggtggtgctattgacgatgccaggactcgacggactccgcaagggattagtcgccgtcacgcgtaatctcctcaaaccgtttctctccatagttcctttctgtctcttcctcttaatggacatctactggaaatacgaaactatgccttcgtgcgatggcgattcctgcacaccgtcagagcatcttcgtcaccagaagtccatgatgaaatcccagcgaaacgcgcttctcattgcggctgcacttgtgttctactggatcctttactcagtcaccaatttggttgtcaagatcgagcatcttaaccagaggatcgagaggctcaggaacaaggattgatcgtctcgtctcaggttcaattagtgtaatgccttttttggttatctttcccatttggctaggttttctctttttcaacgtttctgatatgtgtcttttatcttgtggagattgaaggattttatcctacttttctatgtttggattcttatttgtaaccagattgtgattgtttcttgttgaattttgattgactcta

SEQ ID NO: 109 - DNA, 1754 bp, Arabidopsis thaliana
  source 1..1754: mol_type = genomic DNA
tctccacaaacaaacttgtactagaaaaatccctaaatctcaacaaaaccctaatttcaaggaagacgaagaaagaatgagttacagagtcgctaaagcatcgcagtatcttgcgatcaccggtggtgggatcacagacatcaagcttgcaaagaagtcttgggtgtttccatggcagtcttgcaccgtcttcgacgtttctccggtgaactacacgttcgaggttcaagctatgagttccgagaaacttccctttgttattcctgctgttttcacaatcggtcctcgcgttgatgatcctcacgctctcttgttgtatgccatgcttatgtctcaacacgataagcactcgaatcacgtcaatgagcttgttcagggtgttatcgaaggagagactcgtgttcttgttgcttccatgactatggaagaggtcttcaaaggaacaaaggagtttaagaaggaagtgtttgacaaggttcagctagagctaaaccagtttggtcttgtgatctacaacgccaatgtgaagcagcttgttgatgtgcctggacatgagtacttctcttacttgggccagaagactcagatggaagcagcaaaccaagccaagatcgatgtagcagaggcaaagatgaagggagaggttggtgccaaagaaaggactggactcacaatccagaatgcagccaagattgacgctgagtcaaagatcatctctactcaaaggctaggagaagggacaaaagaggagatcaaggtgaagactgaagtcaaagtgtttcagaatgagaaagaggctcttgttgctaaggctgatgcagcacttgcgattcaaaaggctgctttgtcccaaaactctcgtgtggctgaggttgaagcagccaaggctgttgctttgagggaagctgagcttcagactaaagtagagaagatgaatgcattgactcggacagagaagcttaaagctgagttcctcagtaaagccagtgttgagtatgaaactaaggtgcaagaagcgaactgggagttgtacaataagcaaaagcaagcagaagctgttctttacgagaagcagaagcaagcggaagcgacgaaagctgcagctgatgctgccttctattcaaaacagaaagatgcagagggacttgtcgcaatggccgatgctcaggggacttacctcaagaccctcttaggcgcagttaacaatgattactcagccatgagagacttcttgatgatcaacaatggcatttatcaggatattgccaagaccaatgctgttgcgatcagggacctgcagcctaagatcagcgtgtggaaccatggtggtgctgagcaggggatgaacggtggtggtaaagctacgatgaacgatattgctggactctacaagatgttaccaccggttcttgatacggtttatgagcagacagggatgcagccaccagcttggattggtacattgcgtggtgctgagcccaaacaatcacttcatgctcaacaacacagaggttgagatctcaaatgttgcttctttaattatacttttagctgttggggtttgttttctttttcttatgttatagaacttggaagttagagtttgaagttaaaacaatagtatctgacaaatgcgacttcgactagtgatttcgataaggatgtgtttttcctttttcaaatgtcagatttattattgcgtgttgaagatacctttcttctctcttgatacactaatataaataacatgttta

SEQ ID NO: 110 - DNA, 683 bp, Arabidopsis thaliana
  source 1..683: mol_type = genomic DNA
cacagaaccctccctctctagctctaaaaacatcccacaaactatctttcaacaacacaagacatatcacgaaacaaatcaaagcaaagatcatgaacacgattccagccgaactcactggatacttccactatctaccaccagataaatataataaccaaacaccaatcatggagtctgagtacttcaacatgccctcttctcctacttcttgttcctccttctaccacctcaatggtctgatcaacaacaacaactactcttcatcatccaatggtcaggatctaatgacgagcaacaactcaacttcagacgaagatcaccaacaaagtatggtcatcgatgagaggaaacaaaggagaatgatctctaacagggaatctgctcgtaggtcaagaatgagaaagcagagacatctcgatgagctttggtctcaagtgataagacttcgcactgataaccactgtcttatggataagctgaaccgcgtatctgaaagccatgagcttgctttaaaggagaacgctaagcttaaagaggaaacttctgatctcagacagctgatctctgagataaagtcacacaacgaagacgacaacagttttttaagagagctcgaagattcgatatcaaactctagatcggattcgaaccaaagcggcagagattttgagttgtgttaa

SEQ ID NO: 111 - DNA, 432 bp, Arabidopsis thaliana
  source 1..432: mol_type = genomic DNA
taagctagaggtttttagttctctgtgtggagtacggctgcattgtttctaccagtaatttgtgggatttccaagctccagtttttcgaatatggcggaagtaagtcttggtatgcttatagacattgtggacgaagagtggatgagggacactttgcctgatgatgatcttccattgcctccagtgcttgctgttaaaactgatgatactgaagaaaccaatcaggaaactcagcaagcagatgctgaaacttggcgtgatctagctcttgatacacagtaatagcctcttaagtacaatggaaaattcttacaagtcttgtttctcgttgtgtatgatcaaaaccaaaactgttcctggctttgtatttttttttggtagaagaggggggcgaacccccatttttattaaaactgaaaaactaaaaaaaa

SEQ ID NO: 112 - DNA, 3538 bp, Arabidopsis thaliana
  source 1..3538: mol_type = genomic DNA
gaagtagaagaagagaagtatctggagagagagaggcgtgcgatttccgcatcgaagaaacagtacggagttttatccgctccgattctgtggaagataatggggaaaggaggtgaagattgcgggaataagcaaactaatagttctgaattggtcaagtctgatacttttcctgcttggggtaaagatgtgtcggaatgcgaagagaagtttggtgttagtcgtgagaaaggtttgagcactgatgaggtgttgaaacggcatcagatctatggtttgaatgaattagagaagcctgagggtacttctatttttaagctgattttggaacagtttaatgatacattggttcgtattcttttggcggctgctgttatttcctttgtcttagccttctttgatggcgacgaaggtggtgagatgggtatcaccgcatttgttgagccgcttgttatttttctcatcttgattgttaatgccattgttggcatctggcaagaaactaatgctgagaaggcgttggaagctttgaaagagattcagtctcagcaagctaccgtcatgcgtgatgggactaaggtttccagtttgcctgcaaaggagcttgttcctggtgatattgtggaactgagggttggtgataaggtgcctgctgatatgcgtgtggttgctttgatcagttcaactttgagagtcgagcaggggtccttaacaggagagagtgaggcagtgagcaaaaccaccaagcacgtggatgagaatgctgatattcaaggaaagaaatgcatggtgtttgcaggaaccactgtcgtgaatgggaactgcatatgtttagttacagatactgggatgaatactgagattggaagggttcactcacagatccaggaagctgcacaacacgaggaagatacccctctgaagaaaaaacttaacgagtttggggaagttctgactatgatcattgggttaatttgtgcgttagtgtggctcatcaatgtcaaatactttctgtcatgggagtatgttgatggctggcccagaaactttaagttctccttcgagaagtgcacatattactttgagattgctgttgcactggcggttgctgcaattccagaaggtctgccagcagttattaccacatgtttggctcttggcactaggaagatggctcagaagaatgctctggttaggaagctacccagtgtggagactcttggatgcaccaccgtgatatgctctgacaaaactggaactcttacaaccaatcagatggctgtttcaaagctcgttgctatgggttcgaggatcggaactcttcgatctttcaatgttgaggggacctcgtttgatcctcgagatggaaagattgaagattggccaacgggtcggatggatgcaaatcttcagatgattgcaaaaattgctgccatttgcaacgatgctaatgttgagaaatctgatcagcaatttgtgtctaggggcatgcctactgaggcagctttgaaggttttggttgagaaaatgggatttcccgaaggattgaatgaagcttcatccgatggcaatgtcttacgttgttgtcggctatggagtgaactagaacaacggattgccacccttgagtttgaccgtgaccggaaatcaatgggagttatggtggattccagctcaggaaagaaactgctactggtcaagggtgccgtagaaaatgtattggaaaggagtacccatattcagctacttgatggttccactcgagagcttgaccaatactcaagggatcttattttacaaagcctacatgatatgtccttgagtgcattaagatgtctcggatttgcatactcagatgttccatcagattttgccacttatgatggcagtgaagaccatcctgctcatcagcaacttctcaacccatccaattattcatcaattgagtccaatctagtatttgttggatttgttggtttaagggatcctccaaggaaagaggtgcgtcaagccattgcagactgcagaacagcaggtattcgggtcatggttatcaccggagacaacaagagcacagcggaagcaatctgccgtgaaattggcgtatttgaagcagatgaagatatctcctcgagaagcttgacaggaaaagaatttatggatgttaaagatcagaagaatcatctaagacagacaggagggctcctgttctcaagggctgaaccaaaacacaaacaagagattgtcaggttactgaaagaagatggagaagtggttgccatgactggagatggagtcaatgatgctcctgccctgaagttggctgatattggtgtggctatgggcatttccgggacagaggtagcaaaggaggcatctgacttggtgttggcagatgataatttcagcaccattgttgcagctgttggtgaaggcaggtccatctataacaacatgaaggccttcatcaggtacatgatctcttccaacatcggtgaggttgcatcgatattcttgacagctgctcttggaatcccagaaggcatgatacccgttcaacttctgtgggtgaatctcgtaacagatggtcctccagctactgctttgggattcaacccccctgacaaggatattatgaaaaagcctcctcgtaggagcgatgactctcttatcactgcgtggatcctcttccgctatatggtgattggtttgtatgtgggagtagcaacggtgggagtattcatcatatggtacacacacaacagctttatgggcatagacctgagccaagacggtcacagccttgtgagctattcacagctcgcacattggggccaatgctcttcatgggaaggcttcaaagtgtctcctttcacagcaggctctcagactttctcgttcgactcaaacccttgcgactattttcagcagggtaaaatcaaggcatccacactctccctctcggtgttggtggccattgaaatgttcaactctctgaatgcactctcagaagatggcagcctggtgacgatgccaccctgggttaacccgtggctgctcctggcaatggctgtctcatttggactccactttgtgatattgtacgtcccattcttggctcaggtgtttggtattgtgccactgagcttgaacgagtggctgctagtgctggctgtgtcgctgccggtaattttgatagacgaagtgctcaagtttgtaggaaggtgcacgagtggctaccgctactcacctcgcactccctcagctaagcaaaaggaggagtaagaaaataattcaaaaggcattattattagactcttagttttagctgaaattaactttgttgctttactcatccttgctatatttaattctccaaacgataatttttggtttgaaaaagaaaagtttctaactttggttcatggacacagcccgtgatagaaagatgaatgtttcaaccaaaccttgattctttatgtaaacttttatggtcgaccaaattggtttttaagactgatggtaatttattttgggc

SEQ ID NO: 113 - DNA, 2087 bp, Arabidopsis thaliana
  source 1..2087: mol_type = genomic DNA
ataaacctacttcctttccttgcttcagctccccttttcttatccggaaaccaaaaacttccggtgataaaacctccttcgtcatctctctacttcttgctgaattttgtctgtctttgaagtggataaaatggcgtcaactttcactgccacatcttctattggttcaatggttgctccgaatggtcacaaatctgataagaaacttatcagcaagttgtcttcaagctcatttggaaggagacaaagtgtgtgtcctagacccagaagatccagttctgcaattgtgtgcgcagcaaaggaattacatttcaacaaagatgggactaccattaggagacttcaagctggtgtcaacaagctcgcagatcttgttggtgttacacttggacccaaaggacgaaatgttgttcttgagagcaagtatggatcaccacgaattgttaatgatggtgtgactgttgcaagagaggttgagttggaagacccggttgagaacattggcgctaagcttgtgaggcaagcggctgccaaaaccaatgacttggctggtgacggtacaacaacatctgttgttcttgcacaaggttttatcgctgagggtgtcaaggtggtagctgctggtgcaaaccctgttttgatcaccagaggtattgagaagacagcaaaggctttggttaccgagctcaagaaaatgtctaaggaggttgaagacagtgaacttgcagatgttgcagctgttagtgcgggtaacaacgacgaaattggaaatatgattgctgaagcaatgagcaaagtgggcaggaaaggtgtggtgacccttgaggagggtaaaagtgccgagaacaacctctacgtcgtagaaggaatgcaatttgaccgtggttatatctctccttactttgtgacagacagcgagaaaatgtccgtcgagttcgacaattgcaagttacttctcgttgacaagaaaattaccaatgcaagggatcttgttggtgttttggaggatgcaattagaggcggatacccaatattaattattgctgaagacattgaacaagaagctttagcgactcttgttgtaaacaagcttagaggtacactgaagatagcagctctcagagctccagggtttggagagcgcaagagccaataccttgatgatattgccattctaactggagcaactgtgatccgtgaggaagttggtctttcacttgacaaagctggaaaagaggttcttggtaatgcttcaaaggttgtcctcacaaaggagacctcgaccatagtgggtgatggaagcacacaggatgcagtgaaaaagcgtgttacacagattaaaaatcttattgagcaagcggagcaagattacgagaaggagaaactcaatgagagaattgcaaagctctctggtggagttgctgtgattcaggttggagcacaaactgagacagaactcaaagagaagaagttgagagttgaagatgctcttaatgcaacaaaggccgctgtcgaggaaggtattgttgttggtggtggttgcactctgcttcgtcttgcttccaaggttgatgccattaaagccacgcttgataatgatgaagaaaaggttggagcggatatagttaaaagagcactaagttaccccctaaaactaatcgccaagaatgctggtgttaatggaagtgtagttagcgagaaggtgctttccaacgataacgtgaaattcggttacaatgctgcaaccggcaagtacgaggatttgatggctgcaggaatcatcgatccaacaaaggttgtgagatgttgcttggaacacgcagcttcggttgcaaagactttcttgatgtcggactgcgttgttgttgagatcaaggaacctgaaccagttcccgtcggcaacccaatggacaactcaggatatggatactaagaggagataggctaatattgaaacggattactttagcttgcgagtgtaatgattttgaacaagagaatgtgtaatgtgaaactgaaattttgaattaatcatcatatgaataaatcatgattccctcaatgcttcgaaatatctcgaaatcgcc

SEQ ID NO: 114 - DNA, 2093 bp, Arabidopsis thaliana
  source 1..2093: mol_type = genomic DNA
ttaaaagcaccttccaagcgagagtaaggagataaacctacttcctttccttgcttcagctccccttttcttatccggaaaccaaaaacttccggtgataaaacctccttcgtcatctctctacttcttggataaaatggcgtcaactttcactgccacatcttctattggttcaatggttgctccgaatggtcacaaatctgataagaaacttatcagcaagttgtcttcaagctcatttggaaggagacaaagtgtgtgtcctagacccagaagatccagttctgcaattgtgtgcgcagcaaaggaattacatttcaacaaagatgggactaccattaggagacttcaagctggtgtcaacaagctcgcagatcttgttggtgttacacttggacccaaaggacgaaatgttgttcttgagagcaagtatggatcaccacgaattgttaatgatggtgtgactgttgcaagagaggttgagttggaagacccggttgagaacattggcgctaagcttgtgaggcaagcggctgccaaaaccaatgacttggctggtgacggtacaacaacatctgttgttcttgcacaaggttttatcgctgagggtgtcaaggtggtagctgctggtgcaaaccctgttttgatcaccagaggtattgagaagacagcaaaggctttggttaccgagctcaagaaaatgtctaaggaggttgaagacagtgaacttgcagatgttgcagctgttagtgcgggtaacaacgacgaaattggaaatatgattgctgaagcaatgagcaaagtgggcaggaaaggtgtggtgacccttgaggagggtaaaagtgccgagaacaacctctacgtcgtagaaggaatgcaatttgaccgtggttatatctctccttactttgtgacagacagcgagaaaatgtccgtcgagttcgacaattgcaagttacttctcgttgacaagaaaattaccaatgcaagggatcttgttggtgttttggaggatgcaattagaggcggatacccaatattaattattgctgaagacattgaacaagaagctttagcgactcttgttgtaaacaagcttagaggtacactgaagatagcagctctcagagctccagggtttggagagcgcaagagccaataccttgatgatattgccattctaactggagcaactgtgatccgtgaggaagttggtctttcacttgacaaagctggaaaagaggttcttggtaatgcttcaaaggttgtcctcacaaaggagacctcgaccatagtgggtgatggaagcacacaggatgcagtgaaaaagcgtgttacacagattaaaaatcttattgagcaagcggagcaagattacgagaaggagaaactcaatgagagaattgcaaagctctctggtggagttgctgtgattcaggttggagcacaaactgagacagaactcaaagagaagaagttgagagttgaagatgctcttaatgcaacaaaggccgctgtcgaggaaggtattgttgttggtggtggttgcactctgcttcgtcttgcttccaaggttgatgccattaaagccacgcttgataatgatgaagaaaaggttggagcggatatagttaaaagagcactaagttaccccctaaaactaatcgccaagaatgctggtgttaatggaagtgtagttagcgagaaggtgctttccaacgataacgtgaaattcggttacaatgctgcaaccggcaagtacgaggatttgatggctgcaggaatcatcgatccaacaaaggttgtgagatgttgcttggaacacgcagcttcggttgcaaagactttcttgatgtcggactgcgttgttgttgagatcaaggaacctgaaccagttcccgtcggcaacccaatggacaactcaggatatggatactaagaggagataggctaatattgaaacggattactttagcttgcgagtgtaatgattttgaacaagagaatgtgtaatgtgaaactgaaattttgaattaatcatcatatgaataaatcatgattccctcaatgcttcgaaatatctcgaaatcgcc

SEQ ID NO: 115 - DNA, 1960 bp, Arabidopsis thaliana
  source 1..1960: mol_type = genomic DNA
gtgaacgaagataaatttcgctattcctctctctctctctctctctctctctctctctctctctcttcttcttcttctccgttcgtgctctggactcgctcgaaatcgatccgatgataatttatgcagctcgaaacttaatttagaatcatacctttttctggatttggctgacgaatccgttttcaattgcacgagttgcttcgccaggtttatcaacttaagaatgtctaattatcaaggggatgatgctgagtacatggaagatgtggatgatgaaatggatgaggatgatttagatgaggattttcgtggggatgatatggctgcctctgattccgatgtcgatgagtttgactactctaataataaaatagctgacacttcagctgaccaagcccggaaagggaaagacatccaggggattccttgggacaggcttagtattacgagagagacatacagacaaactagactagaacagtataaaaattatgaaaatgtccctaactctggggaatcttcagggaaagattgcatggccacacagaaaggggctcttttttatgatttctggcggaatacaagatctatcaaatcaagtattcttcatttccagttgaggaatttggtttgggcaacttctaagcacgatgtctaccttatgtcacaatatttggtgagccactattctactttgacatccggaaagcatgatgttctcaatgttcaaggtcatgtttccccatctgagaaacatcctggaagtttgttggagggatttacaaagactcaagtgagtacactcgcagtgagagataaatttttagttgccggtggatttcaaggagaacttatatgcaagcatcttgatagacctggtgtgagcttttgttcacgtactacttatgatgataatgctataaccaatgctattgagatttataacaaacccagtggggcacttcattttactgcgtcgaataatgattgtggagtcagagattttgatatggagagataccagcttgttaaccagtttcgctttccatggccggtgaatcacacatctttaagtcctgatggtaaattgttgacgattgtgggagacaaccctgaaagccttctggtagaccccaacactggaaagacactggcaacgctatcaggacatctggacttttcctttgcatcagcatggcacccagatggattcacgttctccacaggtaaccaggacaagacctgccgggtttgggacattcgtaacctgtcaaaatctgttgctgtcttgaggggtaaccttggagcaatccgatccattcgctacacatctgatgggaagtacatggccatggctgagccggctgactttgtccatgtgtatgatgtctcaaacgggtatgaaacggagcaagagatcgacttctttggggagatctcgggaatatcatttagccccgacacagaagcactcttcataggcgtttgggaccgcacttacggaagtctaattgagtatagccggcgccacaactactcctaccttgattcatttctatgatcacccgacataccagaggaataaaagagccgatacatatgtgctgctgcactctcctgtcgctctgttaaactaagaaacccgagaaaagagaaaacataaactcaagtcgatctctaatggtgtaaatgatgtgttgtgcaagtactagtaggaatgttgtcacagagagcggatttagttagttaatgttcatttcttgtatgagtgttggagttcgtgtattgtacataagtatatgaggttcgggtgagtttgcatcaagtctcaactcttggcaaagagacaactttactcgagtctgtggctcgttatttggctatggtcacttgtagaggaactcaatttgagatgtttctgccgattgttggatcaaattatatatcatgatgtttc

SEQ ID NO: 116 - DNA, 2741 bp, Arabidopsis thaliana
  source 1..2741: mol_type = genomic DNA
aatcggcgcgtgatcgagaaagatcttctttaacctctttgcaacaaatctactcaaaaccctaacccctttttcaaattacttccatctttagatcgaatcaaatcaatgtccgtcgacgatctccctccgtcgtcggcctccgccgtaacgccactaggctcctccgtgattccgattgtgaacaagctccaagacatattcgctcagctaggaagtcaatcgacgatcgctcttccgcaagtagctgtcgtcggaagtcaaagcagtggcaaatccagcgttctagaagctctcgtcggccgtgactttcttcctcgtggcaatgatatttgcacgcgccgacctctccgtctccagcttgttcagacgaaacctagctctgatggtggatccgatgaagagtggggcgagtttcttcaccacgatcctgttagacgtatctacgatttctctgagattcgccgtgagattgaggcggagactaatagagtatcaggagagaacaaaggtgtatcagatattccgattggtttgaagatattttcacctaatgttttggatattagtcttgtggatcttcctggtatcactaaggttcctgttggtgatcagccaagtgatatcgaagcgcgtataagaacgatgatcttgacttacattaaggaacctagttgcttgatacttgctgttagccctgctaatactgatttagcaaattcagatgcattacaaatcgcaggaaatgctgatcctgatggtcatagaaccataggtgtaatcacaaagttggatattatggacagaggtactgatgctcggaatcaccttctgggaaaaacaattcctcttcgacttggatacgtgggagttgtaaatcgtagtcaagaggatattttgatgaaccgtagcatcaaggatgctcttgttgcagaggaaaagttctttcgtagtcgtccagtttacagcggtctcacagatcgtttgggtgtccctcaactggcaaagaaattaaatcaggtccttgttcaacacatcaaggcactgcttcctagtttaaagtcacgtatcaacaatgcattgtttgctacagcaaaggagtatgagagctatggggatataacagagtctaggggtggtcaaggagctcttctcctcagttttattacaaaatactgcgaagcatactcctctaccctggaagggaaaagtaaagaaatgtcaacatctgagctctcgggtggagcaagaattctctacattttccaatcagtatttgttaagagcttagaggaggttgatccatgtgaagacttaacagctgatgatattcggactgcaatacaaaatgcaactggtcccagatctgcattatttgttccagatgttccatttgaagttcttgtcaggaggcaaatatctcgtttattagatcccagccttcagtgcgctaggttcatcttcgatgagctagtaaagattagtcatcagtgtatgatgaaagagttacagcggtttccagtcctgcaaaagcgcatggatgaggttattgggaactttctgcgagaaggtcttgaaccttcgcaggcaatgatccgagatcttattgaaatggagatggattatataaacacctcacacccaaattttatcgggggaactaaagccgtggagcaagcaatgcaaacagtcaaatcttctaggattccgcatcctgttgcgcggccaagggatactgtggagcctgagaggacggcttcttccgggagtcaaataaaaacccgatcttttctcggccgacaagctaatggaatcatcactgatcaggcagttccaactgcagcagatgctgaaagacctgcaccagctggaagcacaagctggagtggtttctcatcaatttttcgggggagtgatggtcaggcagctgctaaaaacaacctattaaacaaaccattcagcgaaactactcaagaagtgtatcagaacttgtcaacaatctatttaaaggagcctccaactattttgaagtcatctgaaactcattcagaacaggagtcagttgagattgagataacaaagctattattgaaatcctactatgacattgtaaggaagaatgtcgaggacttggtcccaaaagcaatcatgcattttctggtaaattacacgaaacgtgagctgcacaatgttttcatcgagaagctttacagggagaacttaattgaagaactgttgaaagagcccgatgagttagcgataaagaggaaacgcacgcaagagactcttcgcattcttcagcaggctaatcggacgttagacgagctgccgttagaagctgaatcggtcgagagaggttacaaaattggttcagaagcgaaacatgaggagttaccgggcacaagaagatcaaggacagaaactaatgggaacggacggcttcatatgtaaattcaaattgtgattgcacgcatgactcattcatttggtgatggaaaagatttgttttcttccctttaaatcggttgtgcgtggggaaagaaaggtgttcttaggtatagtgaaacgtgatgataaacagaggttttgttgtgagggtattatcaacctactggaaaatgtgacttaatatttgtttctcaaaaccgagaagaataatcaattcctaattttacttttcatagctttatttgttacgaaaaacaagaacgtacatgagacaatgtaatgataaatttatc

SEQ ID NO: 117 - DNA, 2749 bp, Arabidopsis thaliana
  source 1..2749: mol_type = genomic DNA
gagaaagatcttctttaacctctttgcaacaaatctactcaaaaccctaacccctttttcaaattacttccatctttagatcgaatcaaatcaatgtccgtcgacgatctccctccgtcgtcggcctccgccgtaacgccactaggctcctccgtgattccgattgtgaacaagctccaagacatattcgctcagctaggaagtcaatcgacgatcgctcttccgcaagtagctgtcgtcggaagtcaaagcagtggcaaatccagcgttctagaagctctcgtcggccgtgactttcttcctcgtggcaatgatatttgcacgcgccgacctctccgtctccagcttgttcagacgaaacctagctctgatggtggatccgatgaagagtggggcgagtttcttcaccacgatcctgttagacgtatctacgatttctctgagattcgccgtgagattgaggcggagactaatagagtatcaggagagaacaaaggtgtatcagatattccgattggtttgaagatattttcacctaatgttttggatattagtcttgtggatcttcctggtatcactaaggttcctgttggtgatcagccaagtgatatcgaagcgcgtataagaacgatgatcttgacttacattaaggaacctagttgcttgatacttgctgttagccctgctaatactgatttagcaaattcagatgcattacaaatcgcaggaaatgctgatcctgatggtcatagaaccataggtgtaatcacaaagttggatattatggacagaggtactgatgctcggaatcaccttctgggaaaaacaattcctcttcgacttggatacgtgggagttgtaaatcgtagtcaagaggatattttgatgaaccgtagcatcaaggatgctcttgttgcagaggaaaagttctttcgtagtcgtccagtttacagcggtctcacagatcgtttgggtgtccctcaactggcaaagaaattaaatcaggtccttgttcaacacatcaaggcactgcttcctagtttaaagtcacgtatcaacaatgcattgtttgctacagcaaaggagtatgagagctatggggatataacagagtctaggggtggtcaaggagctcttctcctcagttttattacaaaatactgcgaagcatactcctctaccctggaagggaaaagtaaagaaatgtcaacatctgagctctcgggtggagcaagaattctctacattttccaatcagtatttgttaagagcttagaggaggttgatccatgtgaagacttaacagctgatgatattcggactgcaatacaaaatgcaactggtcccagatctgcattatttgttccagatgttccatttgaagttcttgtcaggaggcaaatatctcgtttattagatcccagccttcagtgcgctaggttcatcttcgatgagctagtaaagattagtcatcagtgtatgatgaaagagttacagcggtttccagtcctgcaaaagcgcatggatgaggttattgggaactttctgcgagaaggtcttgaaccttcgcaggcaatgatccgagatcttattgaaatggagatggattatataaacacctcacacccaaattttatcgggggaactaaagccgtggagcaagcaatgcaaacagtcaaatcttctaggattccgcatcctgttgcgcggccaagggatactgtggagcctgagaggacggcttcttccgggagtcaaataaaaacccgatcttttctcggccgacaagctaatggaatcatcactgatcaggcatttccaactgcagcagatgctgaaagacctgcaccagctggaagcacaagctggagtggtttctcatcaatttttcgggggagtgatggtcaggcagctgctaaaaacaacctattaaacaaaccattcagcgaaactactcaagaagtgtatcagaacttgtcaacaatctatttaaaggagcctccaactattttgaagtcatctgaaactcattcagaacaggagtcagttgagattgagataacaaagctattattgaaatcctactatgacattgtaaggaagaatgtcgaggacttggtcccaaaagcaatcatgcattttctggtaaattacacgaaacgtgagctgcacaatgttttcatcgagaagctttacagggagaacttaattgaagaactgttgaaagagcccgatgagttagcgataaagaggaaacgcacgcaagagactcttcgcattcttcagcaggctaatcggacgttagacgagctgccgttagaagctgaatcggtcgagagaggttacaaaattggttcagaagcgaaacatgaggagttaccgggcacaagaagatcaaggacagaaactaatgggaacggacggcttcatatgtaaattcaaattgtgattgcacgcatgactcattcatttggtgatggaaaagatttgttttcttccctttaaatcggttgtgcgtggggaaagaaaggtgttcttaggtatagtgaaacgtgatgataaacagaggttttgttgtgagggtattatcaacctactggaaaatgtgacttaatatttgtttctcaaaaccgagaagaataatcaattcctaattttacttttcatagctttatttgttacgaaaaacaagaacgtacatgagacaatgtaatgataaatttatcactggtaagttgatcttgttctt

SEQ ID NO: 118 - DNA, 2836 bp, Arabidopsis thaliana
  source 1..2836: mol_type = genomic DNA
gagaaagatcttctttaacctctttgcaacaaatctactcaaaaccctaacccctttttcaaattacttccatctttagatcgaatcaaatcaatgtccgtcgacgatctccctccgtcgtcggcctccgccgtaacgccactaggctcctccgtgattccgattgtgaacaagctccaagacatattcgctcagctaggaagtcaatcgacgatcgctcttccgcaagtagctgtcgtcggaagtcaaagcagtggcaaatccagcgttctagaagctctcgtcggccgtgactttcttcctcgtggcaatgatatttgcacgcgccgacctctccgtctccagcttgttcagacgaaacctagctctgatggtggatccgatgaagagtggggcgagtttcttcaccacgatcctgttagacgtatctacgatttctctgagattcgccgtgagattgaggcggagactaatagagtatcaggagagaacaaaggtgtatcagatattccgattggtttgaagatattttcacctaatgttttggatattagtcttgtggatcttcctggtatcactaaggttcctgttggtgatcagccaagtgatatcgaagcgcgtataagaacgatgatcttgacttacattaaggaacctagttgcttgatacttgctgttagccctgctaatactgatttagcaaattcagatgcattacaaatcgcaggaaatgctgatcctgatggtcatagaaccataggtgtaatcacaaagttggatattatggacagaggtactgatgctcggaatcaccttctgggaaaaacaattcctcttcgacttggatacgtgggagttgtaaatcgtagtcaagaggatattttgatgaaccgtagcatcaaggatgctcttgttgcagaggaaaagttctttcgtagtcgtccagtttacagcggtctcacagatcgtttgggtgtccctcaactggcaaagaaattaaatcaggtccttgttcaacacatcaaggcactgcttcctagtttaaagtcacgtatcaacaatgcattgtttgctacagcaaaggagtatgagagctatggggatataacagagtctaggggtggtcaaggagctcttctcctcagttttattacaaaatactgcgaagcatactcctctaccctggaagggaaaagtaaagaaatgtcaacatctgagctctcgggtggagcaagaattctctacattttccaatcagtatttgttaagagcttagaggtaatcactgtgtgtagatatctttgtttagttagtggggctatttgcacggaaggcagacagttcgtttcaggttttcagttcttggaagttgatccatgtgaagacttaacagctgatgatattcggactgcaatacaaaatgcaactggtcccagatctgcattatttgttccagatgttccatttgaagttcttgtcaggaggcaaatatctcgtttattagatcccagccttcagtgcgctaggttcatcttcgatgagctagtaaagattagtcatcagtgtatgatgaaagagttacagcggtttccagtcctgcaaaagcgcatggatgaggttattgggaactttctgcgagaaggtcttgaaccttcgcaggcaatgatccgagatcttattgaaatggagatggattatataaacacctcacacccaaattttatcgggggaactaaagccgtggagcaagcaatgcaaacagtcaaatcttctaggattccgcatcctgttgcgcggccaagggatactgtggagcctgagaggacggcttcttccgggagtcaaataaaaacccgatcttttctcggccgacaagctaatggaatcatcactgatcaggcagttccaactgcagcagatgctgaaagacctgcaccagctggaagcacaagctggagtggtttctcatcaatttttcgggggagtgatggtcaggcagctgctaaaaacaacctattaaacaaaccattcagcgaaactactcaagaagtgtatcagaacttgtcaacaatctatttaaaggagcctccaactattttgaagtcatctgaaactcattcagaacaggagtcagttgagattgagataacaaagctattattgaaatcctactatgacattgtaaggaagaatgtcgaggacttggtcccaaaagcaatcatgcattttctggtaaattacacgaaacgtgagctgcacaatgttttcatcgagaagctttacagggagaacttaattgaagaactgttgaaagagcccgatgagttagcgataaagaggaaacgcacgcaagagactcttcgcattcttcagcaggctaatcggacgttagacgagctgccgttagaagctgaatcggtcgagagaggttacaaaattggttcagaagcgaaacatgaggagttaccgggcacaagaagatcaaggacagaaactaatgggaacggacggcttcatatgtaaattcaaattgtgattgcacgcatgactcattcatttggtgatggaaaagatttgttttcttccctttaaatcggttgtgcgtggggaaagaaaggtgttcttaggtatagtgaaacgtgatgataaacagaggttttgttgtgagggtattatcaacctactggaaaatgtgacttaatatttgtttctcaaaaccgagaagaataatcaattcctaattttacttttcatagctttatttgttacgaaaaacaagaacgtacatgagacaatgtaatgataaatttatcactggtaagttgatcttgttctt

SEQ ID NO: 119 - DNA, 3430 bp, Arabidopsis thaliana
  source 1..3430: mol_type = genomic DNA
aaactaaaataaataaggaaaacactcttcttcaaatccagtagagagattcaagacgagtctcatcgaaagttcgaatctttcgtcatctgattagctttctcttagggtttatttcgatttcgatttagtgttctccatcaatggcgacacccatggttagttccgctggaggattactagcaatgctcaacgagcctcatcctgttttgaagcttcatgcgctctctaacctcaacaatttggttgaccaattctggcctgagatctccactagtgtccccatcattgagagtttatatgaagatgaagaattcgatctgcatcaaagacagcttgctgctttgctggtctctaaggttttctattacttgggcgagcttaatgattcgctgtcttatgccctaggagccggtcccttatttgatgtttcagaggattctgattatgttcatacgcttctggccaaagcaatagacgaatatgccagtctcagatcaaaggcagttgagtcaaatgagatggtggacattgatcccaggctagaggcgattgttgaaagaatgcttggaaaatgcatcagtgatgggaagtatcaacaagccatgggcattgcgatagaatgccggagattggataagttggaagaagctatcattaagagcgataatgttcagggaactttatcatattgcatcaatgtttctcattcctttgtcaaccgcagagagtacagacatgaggtgcttagtttacttgtaaaagtctaccagaagctgccctctcctgattatttgagcatttgtcaatgcctcatgtttttggatgaaccgcaaggtgttgcaagcatattggagaagcttcttcgctcagagaacaaggatgatgctttattggcattgcaaattgcatttgatcttgtagagaacgagcaccaggcctttctcttgagtgttagagatcgccttccagctcccaaaacacgtgctgtagaagcaactcaggctgttgaaacaactattgctcctaatgagaacccttcgggagatgttcagatggcagatgaaactccagctcagacaattgtgcatgagacggatccagttgatgctacatatgctgagaggttaacaaagattaagggaattttatctggagagacatctattcagctgacactgcagtttctttacagccacaacaaatcggacctgctgatactgaagacaatcaaacagtctgtagagatgcggaacagtgtatgccacagtgctacaatatatgctaatgccattatgcatgctggaactacagtggacactttccttagagagaatttggattggctaagcagggcaaccaattgggctaagttcagtgctaccgcgggattaggtgttattcacagaggtcacctgcaacagggtaggtcattgatggctccatacttgcctcagggaggagcaggtggtggtgggagtccttattccgaaggaggtgctttatatgctcttggccttattcatgctaaccatggcgagggaatcaagcaatttctacgtgatagcctacgcagcactaatgttgaggtcattcaacatggagcttgtttaggtcttggcttgtcagctctcgggacagctgatgaagagatatatgatgatgtcaaaagcgtgctttatactgacagtgcagttgctggtgaagctgctggcatcagcatgggtttattattggttggaactgctactgaaaaggcaagtgagatgctcgcttatgctcatgagacacaacatgagaagataataaggggattggctctaggaatagctcttacagtatatggtagagaagaaggagcagataccttgattgagcagatgacgagagatcaggatccaatcattcgttatggtggcatgtacgcattggcattggcttacagtggaaccgcaaacaacaaggcaattcgacaattgctgcactttgctgtatctgatgtcagtgatgatgttaggaggactgccgttctggcacttggatttgtcttgtactctgatccagagcagactccccgtattgtatcactgctttctgagtcatacaatccacatgttcgctatggtgcggctcttgcagtgggtatttcttgtgcaggcactggcctcagcgaagcgatatccttgttggagccacttacatcagatgttgttgactttgttcgtcaaggtgctttgattgcaatggccatggtgatggttcaaattagcgaagctagcgattctcgtgttggagtatttaggcgccaacttgagaagattatacttgacaagcacgaagatacaatgagcaagatgggagcgattctggcctctggtatccttgatgctggtggtaggaacgttactataagactgctctctaagaccaaacatgacaaagtcactgctgttatcggccttgcagtcttcagccagttttggtattggtacccactgatctatttcattagtttggccttctcaccaaccgctttcatcggtttgaactatgaccttaaggtcccaaagtttgagttcatgtcacatgcaaaaccgtctttatttgagtacccaaaacccaccacggttcctacagccaataccgccgttaaacttccaaccgctgttctctcaacttcagttaaagccaaagctagggctaagaaagaagcagagcaaaaagctattgctgagaaaacatctggccctgaaaagcctgtcaatgaaagtggatctggaaaaggaaaagcatcaactgagaaggaaggagactctatgcaggtcgatagcccagcagcggtcgagaagaaagcacctgagcctgagccagcgtttgagattttagtgaacccagctcgagtagtcccagctcaagagaaatacataaagttacttgatgacagcagatatgtaccagtgaagctagcaccgtcaggtttcgttcttctcaaagacttgcgtgaacacgagccagaggttctctctctgaccgacgcaccaacttcaacagcttctcctgcaactggtacagcagcggctgcacaaggaaccccggcctcagctatggccgtagatgatgagccacaacctccacaagcctttgaatacgcttcatgattttatttcatttaaaattagtgggaatttgttgttggttttattggtttctgttgaaagacaaaaggcagagagaaaaacagatctttgaactttgagataactgcttcttgtcatttgcaactggtttcatgttcaactacgatcttgtattaggtacttctctttttaagtattatctaaataattaagtgtcgttttatgtcttttagtggtactggtatatctgatttcttctacaacaagatagtaataaactacattttctaagt

SEQ ID NO: 120 - DNA, 1570 bp, Arabidopsis thaliana
  source 1..1570: mol_type = genomic DNA
cctcttcctcttcaagccacaaagactcataaaaatccaacctttttctcatttcctctgttaaatttttcctgaaaagtttattcctttttctacagatcgaatttcgtagttctcacctcactgaatctgttactttctctataatctaaatcttcaaaaatgtttctggttttgtgaaatcaacacttaaaaactcgagcttttacctcctctgttttttcaaagataaaaatgagagaagacgattcagactggttcgcaagatgggaagaagaacttccatcaccagaagagctcatgccaatatcacaatctctaatctcacccgatctagctctagccttcgatatacgaaccccaaatcacggaaacggaaactcaaaccaacctcatcatcatcatcatcaccaaaccacacctcctacaccgtctcagcttcagcttccatcttctcaagccaattcctcagccgaattcgctgcagattcagcagatctaggctccggaggagctgccggagacgaaccagctcggactttaaaacgacctcgtcttgtctggacaccgcagctgcataaacgtttcgttgatgctgttgcgcatttagggattaagaacgcagttcctaaaacgattatgcagcttatgagtgttgatggtttaactagagaaaacgttgcgagtcatttgcaaaagtatagactttatcttaagagaatgcaaggtttgtcttctggtggtggtgctggttcagatccagctactgatcgtcttttcgctagctctcctgttcctgctcactttcttcatcctaatcgtgttcccagttctgatcatttcatgccgtcttttgttcctattgctactcttcaacaacaacaacaaatggctgctgctgcggccgctgctgcagcagctaatcctcatttacaaccgcctcagttccaccgtcaaatcgcagctgcgcattttggttcaccgactaatggtggattcagttcaccgacgagtaatggacagtttggatcaccgactagtaatggatttggatcaccgacgactaatgggaagtttgatccttcgttcttggcggtgaggcaaacgcagcagcaaccaattcagagaatgtctacaccatcattgcatagtccagttagtaattacgttgaggatttggaatctgcaaacgctaatggagggagaactgtcttaactttattcccaactcgagacgattaaaaagtcattatctttccggttactagatgttcaaaatgtctctgcagtcatcaagaacatgagtcagctgatcgttcttgtgcatcggttttatccggtggcgtttactctgtgcagtcttatcagtttaacattgatacaatccagcgtcaatgtgtggtcaagttctgtatctgaagctcaagcaccttcaggtcaaggcttgtattaacccttgtagctttcttgtgtaagattaatgtaaagatgagtttacttttgaacgtacatccgtacgaacaaactcaagattggaaaaaagaatgaaaaaaacaaaaacttacttcac

SEQ ID NO: 121 - DNA, 3856 bp, Arabidopsis thaliana
  source 1..3856: mol_type = genomic DNA
cgccggggactttgatatcatctgcgccgaacaaaaactctgcagaaaccctaattttcgtcagtgattgattcttccgtttccaccatggaagaagtatgcgaaggaaaagaattctcattccctcgtcaagaagaagatgtcctctccttctggactgaaatcgatgctttcaagacacagctcaaacgcactgagaatcttcctgagtacatcttctacgacggacctccttttgccaccggacttcctcactacggacatatcctcgctggtacgattaaagatattgtgactcggtatcagaccatgactggtcaccatgtcactcgtcggtttgggtgggattgtcatggcttacctgttgagaatgagattgatcggaaattgaatattaagaggagagatgaagttattaagatgggaattgataagtataatgaagagtgtaggagtattgtgactcgttatgttgctgagtgggagaaggttattactaggtgtggtcgttggattgattttaagaatgattataagactatggatttgccttttatggaaagtgtttggtgggttttttctcagctttgggagaagaatcttgtttacagaggattcaaggttatgccgtacagtactggttgtaagacacctttatctaattttgaagctggtcagaactataaggaagtccctgatcctgaaatcatggtgacttttccggttattggggatcaagataatgctgcttttgtggcatggactactactccgtggactcttccaagcaatcttgctttgtgtgtaaatgcgaagtttgtctatgtgaaggttcgtaacaagaacactggaaaagtgtacattgttgctgaatctcggttgtctgctcttcccactgataagcctaaggccaagttaagtaatggacctgctggtgatactaagaaagcaaatcctaaagctaaaggtgctaaacctgagagtgcagctgattcttatgaagttttggagaaatttaatggagcttccctggttgggaagaagtatgaacctttgtttgattactttagtgatttctcaagtgaggcctttcgagtagtagcagatgattatgtcactgatgacagtggtactggtattgtccactgtgctcctgcctttggtgaagatgattatcgtgtttgtcttttgaacaaaataatcaaaaagggggagaatctagttgttgctgttgatgatgatgggttgtttactgagagaattacccacttcagtggccgttatgtcaaagatgcagacaaggatataattgaagccgttaaggccaagggcaggcttgttaaaacgggaagctttactcactcatacccattttgctggcgatcagacaccccactcatatatagagcagttccaagttggtttgtgcgtgtggagcagttgaaagaaaagttgttaaaaagcaatgaacagacagaatgggtacctggttatgtgaaggataaacgttttcacaattggctcgaaaatgcaagggattgggcaatcagccgaagtagattttggggcacgcctcttccgatatggataagtgatgatggggaggaagttgtgatcatggattccgtagagaagcttgaaaagctctctggtgttaaggtctttgacctgcatcgtcaccatattgatcatattacaattccatctagtcgtggcgatgagtttggtgtgctccgtcgtgtagaagatgtttttgattgttggtttgagagtgggtcaatgccttacgcgtatatccattatccgtttgaaaacaaggagttatttgagaagaactttcctggtgattttgtggctgaaggtcttgatcagactcgtggatggttttatactcttatggtgttgtctactgcattatttgaaaaaccagcgtttaaaaatctgatttgcaatggtcttgtacttgctgaggatgggaaaaagatggctaagaaattacggaattatccaccacctttggaagtcatagatgagtatggggctgatgctgtgcgattgtacctgataaattctccggttgtacgtgctgagccactacgcttcaaaaaagaaggagtactcggtgttgtcaaagatgtattccttccatggtacaatgcatatcggttcctcgttcagaatgcaaagagacttgagactgaaggtggtgtgccctttgttcctactgatctggcaactatacagtcagcaaacattcttgatcagtggattcactcagctacgcagagtcttgttcgttttgtccgcgaggagatggatgcctatcggctttacactgtggttcctcgtctcttgaagttcctcgacaatctcactaacatatatgtcagattcaaccgcaagagattaaaaggccgtacgggggaagatgattgtcacactgctctttcgactctattcaatgtgctccttacttcttgcaaagtgatggccccgtttacacctttcttcactgaaactttgtaccagaatctgcggaaagcgtgtaaaggttctgaggaaagtgttcactactgcagtattccaccaagggaaggaatggaaggggagaggattgagttaagtgttacgaggatgatgaaaatcattgatcttgctcggaacattcgtgagcgtaacaaactacccttgaaaactcctctaaaggaaatgattgtagtccatcccgatgctgatttcttaaatgacataactggagtactaagagagtatgtcttggaagaacttaacgtgagatcgcttgtaccatgcaatgatactctgaagtatgcatcactaaaagcagaaccagatttcagtgtattgggaaagcgacttggaaagtcgatggggcttgttgcaaaggaagttaaagaaatgtctcaaaaagatatcttagcatttgaggaggctggggaagttactattgctaaccacttgctaaaggaaacagatatcaagattgttagggttttcaaacgcccagacgatttgaaagagaatgagattgattcagctggagatggtgatgttttggtgattctggatctacgagcagatgattctttggttgaagcaggttttgcccgtgagattgtaaacaggatccagaaactaaggaaaaagtcaggtctggaaccaacagactttgtggaagtgtacttccaatcattggacgaggatgaatctgtttctaaacaagttctagtctctcaggaacaaaacatcaaggattcaattggctccactttacttttgtctagtttaatgccatcacatgcagtcataatagccgatgagacattcaccccaaaagaaacatccgatgagagtgtcaaaaaggttccaaagttgtcgtataagataagtttggctagaccggctttgaagttcaatgaagaggctgttcttgctttatactcaggagatgtgaaatctgcaaccgggcttcaaacatacttgttatcaagggatcattcgaatttgaagtcagagttccaagccggagatgggaagataactgtaagctgcattgaaaatgtgcctgttgcgactgtggttcttggcgaacatctccatttgagtgtcggcgatgacttattgagcaagaggaacgcatgagccgtccctccggttttgtttgatttattgtggtaacttgggatttatttcccttatttttcttcttccatatcttacctataaactacttatttagattgttgcaaaaagttaaatctcagtgttgagactctcttttactcgttctatttgtacaatactaaacttttattcatctcaaaatttatggttggac

SEQ ID NO: 122 - DNA, 2933 bp, Arabidopsis thaliana
  source 1..2933: mol_type = genomic DNA
atcttctttctatagtttccatgaagtcttcttcttctcagagctacgatgttttccccaacttcagaggggaagatgtccgccactcattagtcagccaccttcgtaaggaacttgatcgcaaattcatcaatacattcaacgacaacaggatcgaaagaagccgcaaaataaccccagagctgttattggctatagaaaactcaaggatctcacttgtcgtcttctctaaaaactatgcttcttccacgtggtgcttagatgaattggtgaagatccaagagtgctatgagaaattggatcaaatggtgattcctattttctacaaagtagatccttctcatgttagaaaacagaccggagagtttggcatggtctttggggagacctgcaagggcagaacagagaatgagaagcgaaaatggatgcgagctctagcagaggtagcacatctagccggagaagatcttcggaactgataagtttcaggtgggtaaacttccgataagtgattgtcggaacagtgtgtatgaggattaaacacagagaaagatcgtgtggtgattgtagtgtcggtaaacaagtttttaaagcctcccagctgtaatgtatcaaccgtcggaaaggggtgggtcccacgagcctgagtaaagacgcgtagcgaagcagaaatgcttgaaaatatcgccaaggatgtttcaaacaaactcttccccccatcaaataatttcagtgacttcgtcgggattgaagctcatatagaggcattgatatcaatgttgcgcttcgactccaagaaagcgcgaatgatagggatttgtgggccttctgaaactggtaagactactataggaagagctttatacagcagactcaaaagcgacttccaccatcgggctttcgtagcatataagagaaaaatacggagcgactatgaccagaagctgtattgggaagaacaatttctatcagaaattctttgtcagaaggatataaagatagaggaatgtggtgcggtggaacaacgactaaagcacacgaaagttcttattgttcttgatgatgttgatgatatagagctactaaaaacgttggtaggacgtatcagatggtttggatctgagagcaaaattgttgtgattactcaaaaaagggaacttctcaaggctcacaacattgcacatgtttatgaagtgggattcccatcagaagaactggctcatcaaatgttttgtcgatatgcttttgggaaaaactctccacctcatggtttcaacgagcttgcagatgaagctgcaaagattgccggtaatcgtcctaaagctctcaagtacgttggttcgtcttttagaagactagacaaggaacaatgggtgaagatgctatcggagttccgtagtaatgggaataaactaaaaatcagctatgatgagttagatggtaaaggtcaagattacgttgcgtgtttaaccaatggttcaaattcccaggtgaaggcagagtggatccacttggcactaggcgtgtctatattacttaacatccgcagtgacggaacgacaattctcaaacatttgagctacaatcgaagcatggcgcaacaagcaaaaatatggtggtatgaaaatttggaaagagtgtgcaagaagtacaatatatgtggcatagatagctcaactgatggtggtggttcaacgtatggacaatgttcaaattcccaatttcaaagaaacatggacgcaagccccgggggaaacaaaaccagtaatcaatccacaaaagattcaccgagagcttctcaagtagagaaggaaaagatcgagtactgtgagccacatgtatatataacacctgccatcttcagtgacggaaccagagctcccaaatacgtggagtctagtagccgaagagtaacccaagtgcaccacgccaaaacatggtggccggagaattgtgaaaaagtgtacgagaaccacaacaacatatatggcatagatagatcaattgacggtggtgataagtttgagggaaaaagtaaagttagtgacggtgggttagacggcaaagatcaaggttcaatgtatggacaaagttcaaattccgagcttcaaataaacatggacgcagacaataggagatgtgaacctgtgagtgagatgcttttcaaaaattacaatgtgtgttcgcctaatgcacatatgcctgcaggtttaaccgatgtaaactgttcaaatccccagtctcaaagaaaattggacgcaagcctaaagaaagacaaaattgtgcatgagtggattcgaaccggtagtggcttcttttttgattttcagggcccaaaatctatagtgagtgctgctcaagtggacgagaaaaatttcgagtactgtgaacaaggtgtgtatataacacttggcatcctcagtggcggaattatagttctcaaacatttggagttcagccgaagaatggcgcaacaagcaaaagtttggtggtcggaaaattggataaaagtgtaccaggagcacaacatatgtggcatagataaatcatttgatggtaggtttgatgatagacgtgtcattcgtcaattaagaccaaactgaagcacggcctggcccttgtaaaagtcaggacttgagctagatacttaagccaagcagatctgtttggctaagtctggtcgggttagcgcgaaattgtcgaaatctgtttaataattgcattcagtgcaagtctttaatttgtacttcatggctttaatacactaattaaacattggatcatttttagttttttcttcttttcaaaatacatatttttctaagttttccaatttagtgattttattagttctttagtagaatactggatcatggacacatgctacaacatgctttgacctaattatgaaatttatcagcgaatatattatg

SEQ ID NO: 123 - DNA, 960 bp, Arabidopsis thaliana
  source 1..960: mol_type = genomic DNA
tcgtcgccgttaaaatctgcgatctcattgctcattggtgaagacaaatccctaattcgtatgtcagattctgtggccggcgatttccctcccgatccacttctcgcctccggagccttcatctcctccgccggtgacggaaccctagacagtagtgcgaaacgacgaccgattcagggaggaatcggaatttctggttcgggagagagcgtacgcatcgggatggctaacggcactgatcaggtgaatcatcagacggaatcgaagtcgcggaagcgtgcggcgcctggagataattggttgcctcctggttggagagttgaagataagattcgaacttccggtgccacagctggttcggtggataagtactattacgaaccaaatacaggacgtaagtttcggtccaggactgaggtgctgtactacttggaacatggaacttctaaaagaggcaccaagaaagctgagaatacatatttcaatccagaccattttgaaggccaaggaagcaatagagtcaccagaaccgctacagtgcctccacctccgccaccgccattggactttgattttaagaatccaccagacaaggtaagctggtctatggcaaacgcaggagaagaaggttggatacctaatattggggacgtcaaggttcaagactcagtgagacgagattggagcactgcgtttacctttatcacaagccgaaaccctagtaaagtgtcggcttgaagactatgatgacctggtggcgatttttgggttgttgcatctatggtaagatacacagatatgttagggttacttaattggataattcttgtttagtcttcattcatcaatcatcaagttatgtgtactataatttttgtagcggtttttggaagaatatgataaggggatatgcatctttgtgtttgcttttggaacgtgataaccattcgacttttgact

SEQ ID NO: 124 - DNA, 464 bp, Cardiovirus A
  source 1..464: mol_type = other DNA
gagggcccggaaacctggccctgtcttcttgacgagcattcctaggggtctttcccctctcgccaaaggaatgcaaggtctgttgaatgtcgtgaaggaagcagttcctctggaagcttcttgaagacaaacaacgtctgtagcgaccctttgcaggcagcggaaccccccacctggcgacaggtgcctctgcggccaaaagccacgtgtataagatacacctgcaaaggcggcacaaccccagtgccacgttgtgagttggatagttgtggaaagagtcaaatggctctcctcaagcgtattcaacaaggggctgaaggatgcccagaaggtaccccattgtatgggatctgatctggggcctcggtgcacatgctttacatgtgtttagtcgaggttaaaaaaacgtctaggccccccgaaccacggggacgtggttttcctttgaaaaacacgatgataat

SEQ ID NO: 125 - DNA, 228 bp, Tobacco mosaic virus
  source 1..228: mol_type = other DNA
atctaagttaggttgtaaacatattagagacgttgttcatttggaagagttacgcgagtctttgtgtgatgtagctagtaacctaaataattgtgcgtatttttcacagttagatgaggccgttgccgaggttcataagaccgcggtaggcggttcgtttgctttttgtagtataattaaatatttgtcagataagagattgtttagagatttgttctttgtttgata

SEQ ID NO: 126 - DNA, 101 bp, Hibiscus chlorotic ringspot virus
  source 1..101: mol_type = other DNA
tagcttgtttgggttctttatcactgtcctgattaaggctgaatcagaacactttcacttccacacacacgacagtagtaagacacaaaatatagtagtta

SEQ ID NO: 127 - DNA, 147 bp, Zea mays
  source 1..147: mol_type = other DNA
agcacaacatttcaaccagaaacactagccgaagcaaatccattccacaagcacctggtgggatcatctcatcatcagaaaccaagagagagattccgtgtccgcttgttgtagtagattgtgaggactgaggaccgagaagcagcc

SEQ ID NO: 128 - DNA, 196 bp, Plautia stali intestine virus
  source 1..196: mol_type = other DNA
aagctgactatgtgatcttattaaaattaggttaaatttcgaggttaaaaatagttttaatattgctatagtcttagaggtcttgtatatttatacttaccacacaagatggaccggagcagccctccaatatctagtgtaccctcgtgctcgctcaaacattaagtggtgttgtgcgaaaagaatctcacttcaa

SEQ ID NO: 129 - DNA, 174 bp, Kashmir bee virus
  source 1..174: mol_type = other DNA
aatttaaatatgttaataatgctgaagacaagtatttcgattattaacctctatatttctatataaagtatctgtgagtctcagtggacatcacagtaaggtcgcagttaacttgtaatcttttcattcctgtgtcggagcagtggtaatggagccggacgatttcgccaaaac

SEQ ID NO: 130 - DNA, 204 bp, Solenopsis invicta virus
  source 1..204: mol_type = other DNA
aacgtttctcttctggttaccagcaacataggaaattgtcgttgaactacatgttgtaaggctttagagaaataagggagtgtcctatttaggatgaggtgctccggtggcagccccaccaaaacctctagcgactaggaacagctatatcgggttgctatagcagtcaggatgtcattctggcgttccgaaatacccaaacct

SEQ ID NO: 131 - DNA, 178 bp, Triatoma virus
  source 1..178: mol_type = other DNA
tgatcttgctttcgtaataaaattctgtacataaaagtcgaaagtattgctatagttaaggttgcgcttgcctatttaggcatacttctcaggatggcgcgttgcagtccaacaagatccagggactgtacagaattttcctatacctcgagtcgggtttggaatctaaggttgactc

SEQ ID NO: 132 - DNA, 211 bp, Cricket paralysis virus
  source 1..211: mol_type = other DNA
taaaaagcaaaaatgtgatcttgcttgtaaatacaattttgagaggttaataaattacaagtagtgctatttttgtatttaggttagctatttagctttacgttccaggatgcctagtggcagccccacaatatccaggaagccctctctgcggtttttcagattaggtagtcgaaaaacctaagaaatttacctgctacatttcaagata

SEQ ID NO: 133 - DNA, 353 bp, Cricket paralysis virus
  source 1..353: mol_type = other DNA
ttcgataccaagagctggtgtctgagggattacgactcgcgtggtcggacagcacatgttagtcatgtattatggtgtttcccaacacgtatctttgctctagtattgaactttagtgatgagtgtacttggcatgtacacctgattagttagcccttgtggatacgccactgccgctcaggtacagtaggacataccccaaatattgggttccactcgtagagaagaaaattagtggcgaaacgtacggtttatgtcaaaggagaaggtgattttaattgcacctgaagcaaccctaggtcttccctttgatgtgagctaataaggagtaaccgattcttacaatgtgatca

SEQ ID NO: 134 - DNA, 232 bp, Hepacivirus C
  source 1..232: mol_type = other DNA
gcctccaggaccccccctcccgggagagccatagtggtctgcggaaccggtgagtacaccggaattgccaggacgaccgggtcctttcttggataaacccgctcaatgcctggagatttgggcgtgcccccgcaagactgctagccgagtagtgttgggtcgcgaaaggccttgtggtactgcctgatagggtgcttgcgagtgccccgggaggtctcgtagaccgtgcacc

SEQ ID NO: 135 - DNA, 116 bp, Turnip crinkle virus
  source 1..116: mol_type = other DNA
ctctctctcactggtcctcctactttgtcatctgattcctgaaatcaaaccgattcacacatcctacaacacacacgactcatcgaagcagcaacacataagcatcaacactggaa

SEQ ID NO: 136 - DNA, 148 bp, Turnip vein-clearing virus
  source 1..148: mol_type = other DNA
gaattcgtcgattcggttgcagcatttaaagcggttgacaactttaaaagaaggaaaaagaaggttgaagaaaagggtgtagtaagtaagtataagtacagaccggagaagtacgccggtcctgattcgtttaatttgaaagaagaaa

SEQ ID NO: 137 - DNA, 579 bp, Rhopalosiphum padi virus
  source 1..579: mol_type = other DNA
gataaaagaacctataatcccttcgcacaccgcgtcacaccgcgctatatgctgctcattaggaattacggctccttttttgtggatacaatctcttgtatacgatatacttattgttaatttcattgacctttacgcaatcctgcgtaaatgctggtatagggtgtacttcggatttccgagcctatattggttttgaaaggacctttaagtccctactatactacattgtactagcgtaggccacgtaggcccgtaagatattataactattttattatattttattcaccccccacattaatcccagttaaagctttataactataagtaagccgtgccgaaacgttaatcggtcgctagttgcgtaacaactgttagtttaattttccaaaatttatttttcacaatttttagttaagattttagcttgccttaagcagtctttatatcttctgtatattattttaaagtttataggagcaaagttcgctttactcgcaatagctattttatttattttaggaatattatcacctcgtaattatttaattataacattagctttatctatttata

SEQ ID NO: 138 - DNA, 367 bp, Homo sapiens
  source 1..367: mol_type = other DNA
aattccagcgagaggcagagggagcgagcgggcggccggctagggtggaagagccgggcgagcagagctgcgctgcgggcgtcctgggaagggagatccggagcgaatagggggcttcgcctctggcccagccctcccgctgatcccccagccagcggtccgcaacccttgccgcatccacgaaactttgcccatagcagcgggcgggcactttgcactggaacttacaacacccgagcaaggacgcgactctcccgacgcggggaggctattctgcccatttggggacacttccccgccgctgccaggacccgcttctctgaaaggctctccttgcagctgcttagacgctggatttttttcgggt

SEQ ID NO: 139 - DNA, 222 bp, Israeli acute paralysis virus
  source 1..222: mol_type = other DNA
gtatagtgttctggaggcatcattctatggttacccatcattagaggaaatttccaataaactctggtgtaaggcttagagtgatggtcgaggtgccctatttagggtgaggagcctcggtggcagccccaccaaatcctctattggataggaacagctgtactgggcagttacagcagtcgtatggtaacacatgcggcgttccgaaataccatgcctggc

SEQ ID NO: 140 - DNA, 174 bp, Drosophila C virus
  source 1..174: mol_type = other DNA
aatgattttgaaacatattaagatgtttatacgagcgtgttgtttactattttcaggatatgtggaagcggttgtgtatgatctatacgcacatttagttcccagagggcgttgtcgtctccccctaagcaagggagaaacacgtggcacatgatcttgcgcttaacgataaaa

SEQ ID NO: 141 - DNA, 190 bp, Black queen cell virus
  source 1..190: mol_type = other DNA
ccaacaatgtgatcttgcttgcggaggcaaaatttgcacagtataaaatctgcaagtagtgctattgttggaatcaccgtacctatttaggtttacgctccaagatcggtggatagcagccctatcaatatctaggagaactgtgctatgtttagaagattaggtagtctctaaacagaacaatttacct

SEQ ID NO: 142 - DNA, 174 bp, Homalodisca coagulata virus 1
  source 1..174: mol_type = other DNA
ttgcctctctcaacaaaaagccaccgacattaagagagagagtattgctgcttagttaactgcaggccctatttagggttaccgcccaggatctgcaacagcattcctgtatcatccagggcaccggtggacttggtgaggattgagttgacctcatcattagagaccagactc

SEQ ID NO: 143 - DNA, 184 bp, Aphid lethal paralysis virus
  source 1..184: mol_type = other DNA
aattactaatttgatctttaggttataatgttaggactataaaaattagcttaatgcatttagtaatttaaggcttagttatttaactttacttatcaagatggccgttggcagccccacgaaatctagattagtccgaatgtcctattttgattaggtggtcagataggtcagaaactcacct

SEQ ID NO: 144 - DNA, 174 bp, Himetobi P virus
  source 1..174: mol_type = other DNA
catccgtaatacaacccggaataacctccaaaccgagaagaactagtctatgaccagacgaaaaggaactagtccctgttcttttcttagggcctttttcacctgggtaaagtgtagttattgcgtataactctggtatcaataccacccggaagaaattatttatctgccatc

SEQ ID NO: 145 - DNA, 174 bp, Mud crab virus
  source 1..174: mol_type = other DNA
catttatttatattaaatactgacactttgcgggttaaaatgtttaatactatttttcaatttgaggttgtatgagataattttgatttctatgttatcattgaataagggagtctggccctaattgatgtacgactcttctttggttgcgacccgagtcccttctacatcaag

SEQ ID NO: 146 - DNA, 642 bp, Canine picodicistroviurs
  source 1..642: mol_type = other DNA
aactctaagccgaacaattatagctaggctttttattatataacattaattaggcattagcgttgtcgccaatctcttggtaatcctaaggatacctttcctgttgactaagatgaagcgccttcggttaccgatgcccggtgtccacgaagccatcgtggtcggccgcgtcccccacctctcccaacttggactccatgttttcagtaggtgtaatgattagtattattgattctgctcgttcaatgtgtttatcttcacgatctgggacccaacacatgcttcactcatgtttaaatgttggttccctcattttgaagacacccaaaccatagagtgcgagaatgaggatttctacttccattctggtaacagaaatgaattcctgcgtgtgtctcgtaaatggaatctttaagaacttcagataaatcgaacaatacactaatacaagttgttttctaccaacatgttcaatgcggctaatctgaccgtggagctgtgaagcgctcaaacccgagtgttgtatacagtcgtaatgcgtaagtccatgaggaaccgactactgttacctctgttggtgtgtttctcctttattctcttttattattatttgttattgcaaatactacaactttgatcaac

SEQ ID NO: 147 - DNA, 130 bp, Arabidopsis thaliana
  source 1..130: mol_type = genomic DNA
gtaaggatttttatgatatagtatgcttatgtattttgtactgaaagcatatcctgcttcattgggatattactgaaagcatttaactacatgtaaactcacttgatgatcaataaacttgattttgcag

SEQ ID NO: 148 - DNA, 91 bp, Arabidopsis thaliana
  source 1..91: mol_type = genomic DNA
gtaacattccttagttacctttcttttctttttccatcataagtttatagattgtacatgctttgagatttttctttgcaaacaatctcag

SEQ ID NO: 149 - DNA, 108 bp, Arabidopsis thaliana
  source 1..108: mol_type = genomic DNA
gtgctcttgaaattggaactcttcttttgttgtctaaacctatcaatttctttgcggaaatttatttgaagctgtagagttaaaattgagtcttttaaacttttgtag

SEQ ID NO: 150 - DNA, 101 bp, Arabidopsis thaliana
  source 1..101: mol_type = genomic DNA
gtaagttgttacttatgattgttttcctctctgctacatgtattttgttgttcatttctgtaagatataagaattgagttttcctctgatgatattattag

SEQ ID NO: 151 - DNA, 121 bp, Arabidopsis thaliana
  source 1..121: mol_type = genomic DNA
gttagtatcatatgaagaaatacctagtttcagttgatgaatgctattttctgacctcagttgttctcttttgagaattatttcttttctaatttgcctgatttttctattaattcattag

SEQ ID NO: 152 - protein, 124 aa, Arabidopsis thaliana
GTAAATCCTGGTCCACACTTTTACGATAAAAACACAAGATTTTAAACTATGAACTGATCAATAATCATTCCTAAAAGACCACACTTTTGTTTTGTTTCTAAAGTAATTTTTACTGTTATAACAG

SEQ ID NO: 153 - protein, 136 aa, Arabidopsis thaliana
GTAAGAGGTCAAAAGGTTTCCGCAATGATCCCTCTTTTTTTGTTTCTCTAGTTTCAAGAATTTGGGTATATGACTAACTTCTGAGTGTTCCTTGATGCATATTTGTGATGAGACAAATGTTTGTTCTATGTTTTAG

SEQ ID NO: 154 - DNA, 150 bp, Arabidopsis thaliana
  source 1..150: mol_type = genomic DNA
gtaagttctgcatttggttatgctccttgcattttaggtgttcgtcgcacttccatttccatgaatagctaagattttttttctctgcattcattcttcttgcctcagttctaactgtttgtggtatttttgttttaattattgctacag

SEQ ID NO: 155 - DNA, 121 bp, Arabidopsis thaliana
  source 1..121: mol_type = genomic DNA
gtaaagcaactgtgttttaatcaatttcttgtcaggatatatggattataacttaatttttgagaaatctgtagtatttggcgtgaaatgagtttgctttttggtttctcccgtgttatag

SEQ ID NO: 156 - DNA, 136 bp, Arabidopsis thaliana
  source 1..136: mol_type = genomic DNA
gtaaagtttccaactttcctttaccatatcaaactaaagttcgaaactttttatttgatcaacttcaaggccacccgatctttctattcctgattaatttgtgatgaatccatattgacttttgatggttacgcag

SEQ ID NO: 157 - DNA, 121 bp, Arabidopsis thaliana
  source 1..121: mol_type = genomic DNA
gtctgtctttcctatttcatatgtttaatcctaggaatttgatcaattgattgtatgtatgtcgatcccaagactttcttgttcacttatatcttaactctctctttgctgtttcttgcag

SEQ ID NO: 158 - DNA, 159 bp, Arabidopsis thaliana
  source 1..159: mol_type = genomic DNA
gtaaaatattggatgccagacgatattctttcttttgatttgtaactttttcctgtcaaggtcgataaattttattttttttggtaaaaggtcgataatttttttttggagccattatgtaattttcctaattaactgaaccaaaattatacaaaccag

SEQ ID NO: 159 - DNA, 109 bp, Arabidopsis thaliana
  source 1..109: mol_type = genomic DNA
gtaaggacttctcatgaatattagtggcagattagtgttgttaaagtctttggttagataatcgatgcctcctaattgtccatgttttactggttttctacaattaaag

SEQ ID NO: 160 - DNA, 189 bp, Solanum tuberosum
  source 1..189: mol_type = genomic DNA
gtttgtttctgcttctacctttgatatatatataataattatcattaagtagtagtaatataatatttcaaatatttttttcaaaataaaagaatgtagtatatagcaattgcttttctgtagtttataagtgtgtatattttaatttataacttttctaatatatgaccaaaacatggtgatgtttag

SEQ ID NO: 161 - DNA, 94 bp, Cucumber mosaic virus
  source 1..94: mol_type = other DNA
gtttatttacaagagcgtacggttcaatccctgcctcccctgtaaaactaccctttgaaaacctctctttcttaatcttttctttgtaattcct

SEQ ID NO: 162 - DNA, 74 bp, Brome mosaic virus
  source 1..74: mol_type = other DNA
gtagaccacggaacgaggttcaatcccttgtcgaccacggttctgctacttgttctttgtttttcaccaacaaa

SEQ ID NO: 163 - DNA, 107 bp, Citrus tristeza virus
  source 1..107: mol_type = other DNA
aatttcacaaattcaacctgttcgcccagaaaatacgtctggcacaacagggatccggaataggtccagcctttaagctctaatattcccacaacaaaaattacact

SEQ ID NO: 164 - DNA, 107 bp, Beet yellows virus
  source 1..107: mol_type = other DNA
gtttttaaccatccttctactagacgtacactcgtacatcctctagtatttcctttatttatcttcccataagcccctgcctttaacgtttaactctcgctatcgac

SEQ ID NO: 165 - DNA, 206 bp, Cowpea mosaic virus
  source 1..206: mol_type = other DNA
tattaaaatcaatacaggttttgataaaagcgaacgtggagaaatccaaacctttctttctttcctcaatctcttcaattgcgaacgaaatccaagctttggttttgctgaaacaaatacacaacgtatactgaatttggcaaatttctctctctctctctgtcattttctttcttctgtcgggactttcttagtcttgacccaac

SEQ ID NO: 166 - DNA, 84 bp, Potato virus X
  source 1..84: mol_type = other DNA
gaaaactaaaccatacaccaccaacacaaccaaacccaccacgcccaattgttacacacccgcttggaaaagcaagtctaacaa

SEQ ID NO: 167 - DNA, 161 bp, Potato virus A
  source 1..161: mol_type = other DNA
aaaataaacaaactacaaaacacaatcaagaaatcaaacgaattagagcaatcaatcttctaaatcttcaagcagttcacaacattttaaacacaatcaaaacttgaacaagttcaatcaaacacccaaattcagtttaaatactcaaaacgcaagcatca

SEQ ID NO: 168 - DNA, 184 bp, Potato virus Y
  source 1..184: mol_type = other DNA
aattaaaacaactcaatacaacataagaaaaacaacgcaaaaacactcataaacgctcattctcactcaagcaacttgctaagtttcagtttaaatcatttccttgcaattctctagaacaatattggaaaccatttcaactcaacaagcaatttcatcacttccaaccaatttcagatcctca

SEQ ID NO: 169 - DNA, 167 bp, Pepper mottle virus
  source 1..167: mol_type = other DNA
aaattaaaacataacatacaacataaacgaaagcaatcaaattttcaagcatttttcttgagctctttgatttttcctgcataaattaagcactttgatcaacaacatagtctcgatttgaatatttcaattgtttccagttttctctaatagcactccatactaaa

SEQ ID NO: 170 - DNA, 190 bp, Bean yellow mosaic virus
  source 1..190: mol_type = other DNA
aaaaaatataaaaactaaacaagacaatacaagacataacgcattcagaccttcaaacattcgcaagctttaaacaactttgtgtgaatttcgagtataagatttctaaaattctaaaattaaagtaattagtctttctttaagtgtcaatcaaatttgagtttttcgttattactattgcaagcttata

SEQ ID NO: 171 - DNA, 91 bp, Barley stripe mosaic virus
  source 1..91: mol_type = other DNA
gtatgtaagttgcctttgggtgtaaaatttcttgcatgcacataatcgtaatcgattcttcttgatctctaaacaacactttcccgttagc

SEQ ID NO: 172 - DNA, 115 bp, Wheat stripe mosaic virus
  source 1..115: mol_type = other DNA
cgaaagttaacactgagtacacacgatcccttgataccagcagcatctgtgagcttgtttggttaggcaacgcgggtcgaggtttactctgattgtacactggaaattatcagca

SEQ ID NO: 173 - DNA, 79 bp, Rice yellow mottle virus
  source 1..79: mol_type = other DNA
acaattgaagctaggaaaggagcatattgcgaaagcatccctccttccgacgaacaattgtagccacactgcatcgtgt

SEQ ID NO: 174 - DNA, 139 bp, Maize dwarf mosaic virus
  source 1..139: mol_type = other DNA
aaaaacaacaagactcaacacaacacaaccaaacacgaccaaacacaaccaaattacacgttattggagcacattcagtttgcaggcaacggttcgtttgcaaggtgcatcgaaaagcctctctgaacacacgatcgca

SEQ ID NO: 175 - DNA, 138 bp, Zucchini yellow mosaic virus
  source 1..138: mol_type = other DNA
aaattaaaacaaatcacaaagactacagaaatcaacgaacaagcagacgatttctaaaccgtgtttacaaacaagcaatctataattcgcacagcatcaagaatttctgcaatcactttgtttattttagacacaaca

SEQ ID NO: 176 - DNA, 132 bp, Watermelon mosaic virus
  source 1..132: mol_type = other DNA
aaattaaaactactcataaagacatcaaacaaaacaaacgcaaacaaattctcaagttttcaagctatttcaagcaatttgcattttcgatatttataagtttacgattcatcaatatcaacaacaacacga

SEQ ID NO: 177 - DNA, 148 bp, Sugarcane mosaic virus
  source 1..148: mol_type = other DNA
aaaacaacaaaactcaatacaacacaacaaaacacatccaagcaaaccaacgacatttgcaatcaaacttcagcgcacggctcaaaagagaaggctctttgagaacgctctctgaacttccctccttcggcattcgacttccggcgag

SEQ ID NO: 178 - DNA, 68 bp, Tobacco mosaic virus
  source 1..68: mol_type = other DNA
gtatttttacaacaattaccaacaacaacaaacaacaaacaacattacaattactatttacaattaca

SEQ ID NO: 179 - DNA, 71 bp, Tomato mosaic virus
  source 1..71: mol_type = other DNA
gtatttttacaacaattaccaacaacaacaacaaacaacaacaacattacattttacattctacaactaca

SEQ ID NO: 180 - DNA, 67 bp, Turnip vein-clearing virus
  source 1..67: mol_type = other DNA
gtttagttttattgcaacaacaacaacaaattacaataacaacaaacaaaatacaaacaacaacaac

SEQ ID NO: 181 - DNA, 69 bp, Pepper mild mottle virus
  source 1..69: mol_type = other DNA
gtaaatttttcacaatttaacaacaacaacacaaacaacaaacaacattacaaacaaaatacaactaca

SEQ ID NO: 182 - DNA, 63 bp, Turnip crinkle virus
  source 1..63: mol_type = other DNA
ggtaatctgcaaatccctggcacccgcctaaaattgccctcatcaaccttctctctattcacg

SEQ ID NO: 183 - DNA, 165 bp, Tomato bushy stunt virus
  source 1..165: mol_type = other DNA
naaattctccaggatttctcgacctagttcgtttatctggtgacttgcgctaccgttgctttgcgtagagaatttctctccataattattatctttagttgtggggtttgaaggttgggtctacctttcggggggataaattgtaacttccaacaaacaagcgac

SEQ ID NO: 184 - DNA, 33 bp, Tomato spotted wilt virus
  source 1..33: mol_type = other DNA
agagcaatcaggtaacaacgattttaagcaaac

SEQ ID NO: 185 - DNA, 32 bp, Watermelon bud necrosis virus
  source 1..32: mol_type = other DNA
agagcaatcgtgcaacaataagaatatcagta

SEQ ID NO: 186 - DNA, 87 bp, Turnip yellow mosaic virus
  source 1..87: mol_type = other DNA
gtaatcaactaccaattccagctctcttttgacaactggtcttatacccacttccgtacacttgcaaccctcgtaagacaattgcaa

SEQ ID NO: 187 - DNA, 281 bp, Cucumber mosaic virus
  source 1..281: mol_type = other DNA
cggtctccctcttcgggcgggatctgagttggcggtaatctgcaaaccgtctgaagtcactaaacacattgtgtggtgaacgggttgtccatccagctaacggctaaaatggtcagtcgtggagaaatccacgccagtagacttacaagtctctgaggcacctttgaaaccatctcctaggtttcttcggaaggacttcggtccgtgtacttctagcacaacgtgctagtttcagggtacgggtgccccccactttcgtgggggtctctaaaaggagacca

SEQ ID NO: 188 - DNA, 274 bp, Brome mosaic virus
  source 1..274: mol_type = other DNA
tgcgcttgtctctgtgtgagacctctgctcgaggagagccctgttccaggtaggaacgttgtggtctaactcaagactagctgaatcggtgctataaccgatagtcgtggttgacacgcagacctcttacaagagtgtctaggcgcctttgagagttactctttgctctcttcggaagaacccttaggggttcgtgcatgggcttgcatagcaagtcttagaatgcgggtgtcgtacagtgttgaaaaacactgtaaatctctaaaagagacca

SEQ ID NO: 189 - DNA, 273 bp, Citrus tristeza virus
  source 1..273: mol_type = other DNA
ttgaagtggacggaataagttcctcgcggaactttgtgttgggttggtaaagacccttatgatggtgatatatcactagacaataaccggatgggtaaagtctttaaaatgatcgaggggaaaattaaccgtatcctctcgttggtctaagctcccacagagtggtagtggtctcaagtgaggcttaacgtatgcgtgaaccaaagaagttctccttagagtgtgtgttgtttacccaacgcactgtccctatggggggccaacataggtcca

SEQ ID NO: 190 - DNA, 182 bp, Beet yellows virus
  source 1..182: mol_type = other DNA
tagagaagtgacggaggcgacctacctaccgtgtaatttaagtcgtcacagagtgacaacggcaccaagtggtgcttagtgcgtatgtaaattacgaagtgcaaaaaatttttctttttatattaagaaaatttttgcacactcctagcgaagtcccgctaggaagaaaaaataaggggccc

SEQ ID NO: 191 - DNA, 72 bp, Potato virus X
  source 1..72: mol_type = other DNA
ctacgtctacataaccgacgcctaccccagtttcatagtattttctggtttgattgtatgaataatataaat

SEQ ID NO: 192 - DNA, 227 bp, Potato virus A
  source 1..227: mol_type = other DNA
taaccgaagtgccgtactattactaagtaagagttcctgttagtatccttgtcttattattagaatacgtttatctttcaacaagtatgatgttcgtgctctcacctcgcaacagtgagtttgagtgggaaataaatactagtattctatggccttacttgttatatagacccaccacatagtgagattttatctcggtgactggttttatgtttcaactgtcaggg

SEQ ID NO: 193 - DNA, 328 bp, Potato virus Y
  source 1..328: mol_type = other DNA
tgtagtgtctctccggacgatatataagtatttacatatgcagtaagtattttggcttttcctgtactacttttatcataattaataatcgtttgaatattactggcagataggggtggtatagcgattccgtcgttgttagtgaccttagctgtcggttctgtattattaagtcttagataaaaagtgccgggttgttgttgtgtgactgatctatcgattaggtgatgctgtgattctgtcatagcagtgactatgtctggatttagttacttgggtgatgctgtgattctgtcatagcagtgactgtaaacttcaatcaggagac

SEQ ID NO: 194 - DNA, 266 bp, Pepper mottle virus
  source 1..266: mol_type = other DNA
ctgatgtggtctctgggatgaaatattattatatgtagtatgcaatatatagtatggcttttctcgttccagtctttatattaatgagagtaacttaagtaagtaatttgtacttcaaggattaatcaaggtgactctctgacactctcagtgaggtgacttgtttagtctgagtttacttattgtgagtataaagaatctctcagaaaacgagagtgacttctagacacactctaggaggtgatcgtagttggcatgagagagac

SEQ ID NO: 195 - DNA, 171 bp, Bean yellow mosaic virus
  source 1..171: mol_type = other DNA
agtatccgtctttaaattctctataatttggcgttacattacttaatactatgtattagtgaggtttcacctccagcattttaaattcagtatgtgtatcattctctctactctgacagggtaagcagttagtgaggttgcctcgtgtgagcctgatctttgtagagcgag

SEQ ID NO: 196 - DNA, 257 bp, Barley stripe mosaic virus
  source 1..257: mol_type = other DNA
aaaaaaaaaaaaaaaaaaatgtttgatcagatcattcaaatctgatggtgcccatcaaccatatgatgggagtgtttgcaagtccactataatcgaacttgaaaacgatgcctgaattggaaaccatgaatcttaacggattctggagagaaaatttaggaattggtatgtaagctacaacttccggtagctgcgtcacactttaagagtgtgcatactgagccgaagctcagcttcggtcccccaagggaagacca

SEQ ID NO: 197 - DNA, 350 bp, Wheat stripe mosaic virus
  source 1..350: mol_type = other DNA
gcgttgtcactcgtccgaagacgttaaactacggtgtcgttcattcgacgtgagattctgagttatgggtattgctacaaacccacacgaggtggtcgtccgtgcctgacattaagttgttgggatagaccagggcaagtcgggactttggctagaagtttgtgggtaacttcactgttaaaccctctggttcaacgtcagaaccacctaggagataatactctgggtttagttggcgtctgttgtaattatttataattcagcattttaaaatttcaagaaggtctttgaccatatagttgtactgggtgtgagttgtaccagtgtgttgttaactatgtttgtgtata

SEQ ID NO: 198 - DNA, 246 bp, Rice yellow mottle virus
  source 1..246: mol_type = other DNA
atccacggattggctacgagatcgacttaccctgaaaaggatgttgagcgttcttgaacgcggcccaatcctacgagatgatactggtgactatcctacgtgaggagttgcactcacgcttcaacccaaagcgacccatgcactggacagtgcttacccagatggttttcggagctactgggcggacctttcaccaaaccgaattccccactctttccgagagaattctcgggatgggtgggggag

SEQ ID NO: 199 - DNA, 250 bp, Maize dwarf mosaic virus
  source 1..250: mol_type = other DNA
tacggggttcaacttttacgcagtaatttagtaatatataagtaagctattgtggtgaggttgtacctcgttagttttatatatatattatgctacgtacctactatgtctgcaagtgagtgaggttgcacctcgacacttatagtgggcactattactagcttcgaatcacgagacggacggtccattgagtggttctaccacgaggatgcagcgagtttcgtggtgagagacaaaaaaaaaaaaaaaa

SEQ ID NO: 200 - DNA, 213 bp, Zucchini yellow mosaic virus
  source 1..213: mol_type = other DNA
taaagggtaggtcacctacctaggttatcgattcgctgccgacgtaattctaatatttaccgctttttatgatatctttagatttcagtgtgggcctcccacctttaaagcgtaaagtttatgttagttgtccaggaatgccgtagtcctgtcggaagctttagtgtgagcctctcacggataagctcgagattagactccgtttgcaagcct

SEQ ID NO: 201 - DNA, 249 bp, Watermelon mosaic virus
  source 1..249: mol_type = other DNA
agactaggtaaactggtcacagttagcatttcgggtcgttataagttttctataatataatatgttgcactttttagtatagtgtgattttatcacctttgtactgtttatgttagtgtggtttaaccatcttagtgtgctttatattatagtttatgcataacagggagaaccattacaataccggagttgtttgtagtgtgattacatcacggttaatagccgaggtacggtaatgtttgttgtcct

SEQ ID NO: 202 - DNA, 235 bp, Sugarcane mosaic virus
  source 1..235: mol_type = other DNA
tctcctggaaaccctgtttgcagtatctatagtatgttatgtgtactagtattaaaagtgaggctttgtctcgtttctgcttttactatttacgtactataagtgtgaaccagtctgcaagatacagggttggacccagtgtcttctggtgtagcacatactagcgtcgagccatgtcacggacagcgctgaggatggctttgccatgtgtgctgcgagtctcatggtgagagac

SEQ ID NO: 203 - DNA, 204 bp, Tobacco mosaic virus
  source 1..204: mol_type = other DNA
ggtagtcaagatgcataataaataacggattgtgtccgtaatcacacgtggtgcgtacgataacgcatagtgtttttccctccacttaaatcgaagggttgtgtcttggatcgcgcgggtcaaatgtatatggttcatatacatccgcaggcacgtaataaagcgaggggttcgaatccccccgttacccccggtaggggccca

SEQ ID NO: 204 - DNA, 201 bp, Tomato mosaic virus
  source 1..201: mol_type = other DNA
atgcataggtgctgaaatataaattttgtgtttctaaaacacacgtggtacgtacgataacgtacagtgtttttccctccacttaaatcgaagggtagtgtcttggagcgcgcggagtaaacatatatggttcatatatgtccgtaggcacgtaaaaaagcgagggattcgaattcccccggaacccccggttggggccca

SEQ ID NO: 205 - DNA, 235 bp, Turnip vein-clearing virus
  source 1..235: mol_type = other DNA
gcgtagtgcgcacgatagcgcatagtgtttttctctccacttaaatcgaagagataaacttacggtgtaattccgtgagggtggcgtaaaccaaattacgcaatgttttgggttccattaaaatcgaaaccccttatttcctggatcacctgttaacgcacgtttgacgtgtattacagtgggaataagtaaaagtgagaggttcgaatcctccctaaccccgggtaggggccca

SEQ ID NO: 206 - DNA, 199 bp, Pepper mild mottle virus
  source 1..199: mol_type = other DNA
acatgatggcataaataagttgaacgaacattaaacgtccgtggcgagtacgataactcgtagtgtttttccctccacttaaatcgaagggttgtcgttgggatggaacgcaattaaatacatgtgtgacgtgtatttgcgaacgacgtaattatttttcaggggttcgaatcccccccgaaccgcgggtagcggccca

SEQ ID NO: 207 - DNA, 255 bp, Turnip crinkle virus
  source 1..255: mol_type = other DNA
tacggtaatagtgtagtcttctcatcttagtagttagctctctcttatattaagaaaagaaaacaaaaacccccaggtcgctttattttgacctgtgttagggaccaaaaacggtggcagcactgtctagctgcgggcattagactggaaaactagtgctctttgggtaaccactaaaatcccgaaagggtgggctgtggtgaccttccgaactaaaagatagcctccctcctcgcgcggggggggggcctgccc

SEQ ID NO: 208 - DNA, 370 bp, Tomato bushy stunt virus
  source 1..370: mol_type = other DNA
gacagactcttcagtctgagtttgtggagatgagtgtaaatctggcatagcatacaggttactcttgttgggttctggatgttaggatgacgagtcgactcgggctccgcactaggtttggtcgcctaggggatggagatatggaaagggtctcgtgtggtatcagtcggtcgaaagacgcgcttccaacatgggcctatggtcggataagtcttagcaataccagccagcatgaattggattcctgtttacgaaagttaggtgtcacttgtggaagcggacccagacacggttgatctcacccttcggggggctatagagatcgctggaagcactaccggacaaccggaacattgcagaaatgcagccc

SEQ ID NO: 209 - DNA, 241 bp, Tomato spotted wilt virus
  source 1..241: mol_type = other DNA
attaatagtaatgctcaacaatgcatggataatggattagatagaacttagaatacaaatttattgttattttagaattaggttagatctgattagactaaagacgatttggtgaaccaaatctatagtgtatgtaaatgtggagtcccggtatagtttcactggagggaattcttatatatcttatttgtaaagtctggttatggagagattatatgttttagttgtacctgattgctct

SEQ ID NO: 210 - DNA, 215 bp, Watermelon bud necrosis virus
  source 1..215: mol_type = other DNA
ataagccatagaatagacagtatagaaccagaagcagtaaaagagcatgacaacaaaagggttttttcttttgcaaaaggatgaaagtattctaaatcagtttaaaatgcaatgtagttgtagtatctagaatcaacagtagagtcagaaatagtatttcttaataaaattgagactgagtgtagaatacttttgttttgttgctcgattgctct

SEQ ID NO: 211 - DNA, 105 bp, Turnip yellow mosaic virus
  source 1..105: mol_type = other DNA
gttctcgatctttaaaatcgttagctcgccagttagcgaggtctgtccccacacgacagataatcgggtgcaactcccgcccctcttccgagggtcatcggaacc

SEQ ID NO: 212 - DNA, 4851 bp, Tobacco mosaic virus
  source 1..4851: mol_type = other DNA
atggcatacacacagacagctaccacatcagctttgctggacactgtccgaggaaacaactccttggtcaatgatctagcaaagcgtcgtctttacgacacagcggttgaagagtttaacgctcgtgaccgcaggcccaaggtgaacttttcaaaagtaataagcgaggagcagacgcttattgctacccgggcgtatccagaattccaaattacattttataacacgcaaaatgccgtgcattcgcttgcaggtggattgcgatctttagaactggaatatctgatgatgcaaattccctacggatcattgacttatgacataggcgggaattttgcatcgcatctgttcaagggacgagcatatgtacactgctgcatgcccaacctggacgttcgagacatcatgcggcacgaaggccagaaagacagtattgaactatacctttctaggctagagagaggggggaaaacagtccccaacttccaaaaggaagcatttgacagatacgcagaaattcctgaagacgctgtctgtcacaatactttccagacaatgcgacatcagccgatgcagcaatcaggcagagtgtatgccattgcgctacacagcatatatgacataccagccgatgagttcggggcggcactcttgaggaaaaatgtccatacgtgctatgccgctttccacttctctgagaacctgcttcttgaagattcatacgtcaatttggacgaaatcaacgcgtgtttttcgcgcgatggagacaagttgaccttttcttttgcatcagagagtactcttaattattgtcatagttattctaatattcttaagtatgtgtgcaaaacttacttcccggcctctaatagagaggtttacatgaaggagtttttagtcaccagagttaatacctggttttgtaagttttctagaatagatacttttcttttgtacaaaggtgtggcccataaaagtgtagatagtgagcagttttatactgcaatggaagacgcatggcattacaaaaagactcttgcaatgtgcaacagcgagagaatcctccttgaggattcatcatcagtcaattactggtttcccaaaatgagggatatggtcatcgtaccattattcgacatttctttggagactagtaagaggacgcgcaaggaagtcttagtgtccaaggatttcgtgtttacagtgcttaaccacattcgaacataccaggcgaaagctcttacatacgcaaatgttttgtcctttgtcgaatcgattcgatcgagggtaatcattaacggtgtgacagcgaggtccgaatgggatgtggacaaatctttgttacaatccttgtccatgacgttttacctgcatactaagcttgccgttctaaaggatgacttactgattagcaagtttagtctcggttcgaaaacggtgtgccagcatgtgtgggatgagatttcgctggcgtttgggaacgcatttccctccgtgaaagagaggctcttgaacaggaaacttatcagagtggcaggcgacgcattagagatcagggtgcctgatctatatgtgaccttccacgacagattagtgactgagtacaaggcctctgtggacatgcctgcgcttgacattaggaagaagatggaagaaacggaagtgatgtacaatgcactttcagagttatcggtgttaagggagtctgacaaattcgatgttgatgttttttcccagatgtgccaatctttggaagttgacccaatgacggcagcgaaggttatagtcgcggtcatgagcaatgagagcggtctgactctcacatttgaacgacctactgaggcgaatgttgcgctagctttacaggatcaagagaaggcttcagaaggtgctttggtagttacctcaagagaagttgaagaaccgtccatgaagggttcgatggccagaggagagttacaattagctggtcttgctggagatcatccggagtcgtcctattctaagaacgaggagatagagtctttagagcagtttcatatggcaacggcagattcgttaattcgtaagcagatgagctcgattgtgtacacgggtccgattaaagttcagcaaatgaaaaactttatcgatagcctggtagcatcactatctgctgcggtgtcgaatctcgtcaagatcctcaaagatacagctgctattgaccttgaaacccgtcaaaagtttggagtcttggatgttgcatctaggaagtggttaatcaaaccaacggccaagagtcatgcatggggtgttgttgaaacccacgcgaggaagtatcatgtggcgcttttggaatatgatgagcagggtgtggtgacatgcgatgattggagaagagtagctgtcagctctgagtctgttgtttattccgacatggcgaaactcagaactctgcgcagactgcttcgaaacggagaaccgcatgtcagtagcgcaaaggttgttcttgtggacggagttccgggctgtgggaaaaccaaagaaattctttccagggttaattttgatgaagatctaattttagtacctgggaagcaagccgcggaaatgatcagaagacgtgcgaattcctcagggattattgtggccacgaaggacaacgttaaaaccgttgattctttcatgatgaattttgggaaaagcacacgctgtcagttcaagaggttattcattgatgaagggttgatgttgcatactggttgtgttaattttcttgtggcgatgtcattgtgcgaaattgcatatgtttacggagacacacagcagattccatacatcaatagagtttcaggattcccgtaccccgcccattttgccaaattggaagttgacgaggtggagacacgcagaactactctccgttgtccagccgatgtcacacattatctgaacaggagatatgagggctttgtcatgagcacttcttcggttaaaaagtctgtttcgcaggagatggtcggcggagccgccgtgatcaatccgatctcaaaacccttgcatggcaagatcctgacttttacccaatcggataaagaagctctgctttcaagagggtattcagatgttcacactgtgcatgaagtgcaaggcgagacatactctgatgtttcactagttaggttaacccctacaccagtctccatcattgcaggagacagcccacatgttttggtcgcattgtcaaggcacacctgttcgctcaagtactacactgttgttatggatcctttagttagtatcattagagatctagagaaacttagctcgtacttgttagatatgtataaggtcgatgcaggaacacaatagcaattacagattgactcggtgttcaaaggttccaatctttttgttgcagcgccaaagactggtgatatttctgatatgcagttttactatgataagtgtctcccaggcaacagcaccatgatgaataattttgatgctgttaccatgaggttgactgacatttcattgaatgtcaaagattgcatattggatatgtctaagtctgttgctgcgcctaaggatcaaatcaaaccactaatacctatggtacgaacggcggcagaaatgccacgccagactggactattggaaaatttagtggcgatgattaaaaggaactttaacgcacccgagttgtctggcatcattgatattgaaaatactgcatctttagttgtagataagttttttgatagttatttgcttaaagaaaaaagaaaaccaaataaaaatgtttctttgttcagtagagagtctctcaatagatggttagaaaagcaggaacaggtaacaataggccagctcgcagattttgattttgtagatttgccagcagttgatcagtacagacacatgattaaagcacaacccaagcaaaaattggacacttcaatccaaacggagtacccggctttgcagacgattgtgtaccattcaaaaaagatcaatgcaatatttggcccgttgtttagtgagcttactaggcaattactggacagtgttgattcgagcagatttttgtttttcacaagaaagacaccagcgcagattgaggatttcttcggagatctcgacagtcatgtgccgatggatgtcttggagctggatatatcaaaatacgacaaatctcagaatgaattccactgtgcagtagaatacgagatctggcgaagattgggttttgaagacttcttgggagaagtttggaaacaagggcatagaaagaccaccctcaaggattataccgcaggtataaaaacttgcatctggtatcaaagaaagagcggggacgtcacgacgttcattggaaacactgtgatcattgctgcatgtttggcctcgatgcttccgatggagaaaataatcaaaggagccttttgcggtgacgatagtctgctgtactttccaaagggttgtgagtttccggatgtgcaacactccgcgaatcttatgtggaattttgaagcaaaactgtttaaaaaacagtatggatacttttgcggaagatatgtaatacatcacgacagaggatgcattgtgtattacgatcccctaaagttgatctcgaaacttggtgctaaacacatcaaggattgggaacacttggaggagttcagaaggtctctttgtgatgttgctgtttcgttgaacaattgtgcgtattacacacagttggacgacgctgtatgggaggttcataagaccgcccctccaggttcgtttgtttataaaagtctggtgaagtatttgtctgataaagttctttttagaagtttgtttatagatggctctagttgttaa

SEQ ID NO: 213 - DNA, 4851 bp, Tomato mosaic virus
  source 1..4851: mol_type = other DNA
atggcatacacacaaacagccacatcgtccgctttgcttgagaccgtccgaggtaacaataccttggtcaacgatcttgcaaagcggcgtctatatgacacagcggtagatgaatttaatgctagggaccgcaggcctaaagtcaatttttccaaagtagtaagcgaagaacagacgcttattgcaaccaaagcctacccagaattccaaattacattctacaacacgcagaatgctgtgcattcccttgcaggcggtctccgatcattagaattggaatatctgatgatgcaaattccctacggatcattgacatatgatatcggaggtaattttgcatctcatctgttcaaagggcgagcatacgttcactgctgtatgccgaatctagatgtccgcgacataatgcggcacgagggccaaaaggacagtattgaactatacctttctaggctcgagaggggcaacaaacatgtcccaaacttccaaaaggaagctttcgacagatacgctgaaatgccaaacgaagtagtctgtcacgatactttccaaacgtgtaggcattctcaagaatgttacacgggaagagtgtatgctattgctttgcatagtatatacgatatacctgccgacgagttcggcgcggcactgctgagaaagaatgtacatgtatgttatgccgctttccacttttccgagaatttacttctcgaagattcacacgtcaacctcgatgagatcaatgcatgtttccaaagagatggagacaggttgactttttcctttgcatctgagagtactcttaattatagtcatagttattctaatattcttaagtatgtttgcaaaacttacttcccagcctctaatagagaggtttacatgaaggagtttttagtaactagagttaatacctggttttgtaaattttctagaatagatactttcttattgtacaaaggtgtagcgcataagggtgtagatagtgagcagttttacaaggctatggaagacgcatggcactacaaaaagactcttgcgatgtgcaacagtgaaagaatcttgttagaggattcttcatcagttaattactggtttccaaaaatgagggatatggtgatagttccactatttgacatatctctcgagactagtaaaagaacacgcaaagaggtcttagtttcaaaggactttgtttatacagtgttaaatcacattcgtacgtaccaggccaaagcgcttacttactccaacgtgttatctttcgtcgaatcaattcgttcgagagtgatcattaacggggttactgccaggtctgagtgggatgtcgataaatcattattacagtccttgtcgatgacgttcttcctacataccaagcttgccgttctgaaagacgatcttttgattagcaagtttgcacttggaccaaaaactgtctcacaacatgtgtgggatgagatttccctagctttcggcaatgctttcccatcgatcaaggaaagattgataaaccggaaactgatcaaaattacggagaatgcgttagagatcagggtgcccgatctttatgtcactttccatgataggttagtttctgagtacaaaatgtcagtggacatgccggtgctagacattaggaaaaagatggaagaaactgaggaaatgtacaatgcactgtccgaactgtctgtacttaaaaattcagacaagttcgatgttgatgttttttcccagatgtgccaatctttagaagttgatccaatgactgcagcaaaggtaatagtagcagttatgagcaacgagagtggtcttactctcacgtttgaacagcccaccgaagctaatgttgcgctagcattgcaagattctgaaaaggcttctgatggggcgttggtagttacctcaagagatgttgaggaaccgtccataaagggttcgatggcccgtggtgagttacaattggccggattatctggcgacgttcctgaatcttcatacactaggagcgaggagattgagtctctcgagcagtttcatatggcaacagctagttcgttaattcataagcagatgtgttcgatcgtgtacacgggccctcttaaagttcaacaaatgaaaaactttatagacagcctggtagcctcgctctctgctgcggtgtcgaatctagtgaagatcctaaaagatacagccgcgattgaccttgaaactcgtcaaaagttcggagttctggatgttgcttcgaaaaggtggctagttaaaccatccgcaaagaaccatgcatggggggttgttgagactcatgcgaggaaatatcacgtcgcattactggagcacgatgaatttggcattattacgtgcgataactggcgacgggtggctgtgagttctgagtcggtagtatattctgatatggctaaactcaggactctgagaagattgctcaaagatggagaaccacacgttagttcagcaaaggtggttttggtggatggcgttccagggtgcgggaagacaaaggaaattctttcgagagttaatttcgaagaagatctaattcttgtccctggtcgtcaagctgccgagatgatcagaagaagagctaatgcgtcgggcataatagtggctacaaaggataatgtgcgcaccgtcgattcatttttgatgaattacgggaaaggggcacgctgtcagttcaaaagattgttcatagacgaaggtttgatgctgcatactggttgtgtgaatttcttggttgaaatgtctctgtgcgatattgcatatgtttatggagacacccaacaaattccgtacatcaacagagtaactggtttcccgtaccctgcgcactttgcaaaattggaggtcgacgaagtcgaaacaagaagaactactcttcgctgtccggctgatgtcacacacttcctaaatcaaaggtatgaaggacacgtaatgtgcacgtcttctgaaaagaaatcagtttcccaggaaatggttagtggggctgcgtctatcaatcctgtgtccaagccgcttaaagggaaaattttgactttcacacagtctgacaaggaggcccttctctcaaggggctacgcagatgtccatactgtacatgaggtacaaggtgagacttatgcagacgtatcgttagttcgactaacacctacgcctgtatctatcatcgcaagagacagtccgcatgttctggtctcgttgtcaagacacacaaaatccctaaagtactacaccgttgtgatggatcctttagttagtatcattagagatttagaacgggttagtagttacttattagacatgtacaaagtagatgcaggtactcaatagcaattacaggtcgactctgtgtttaaaaatttcaatctttttgtagcagctccaaagactggagatatatctgatatgcaattttactatgataagtgtcttcctgggaacagcacgttgttgaacaactacgacgctgttaccatgaaattgactgacatttctctgaatgtcaaagattgcatattagatatgtctaagtctgtagctgctccgaaagatgtcaaaccaactttaataccgatggtacgaacggcggcagaaatgcctcgccagactggactgttggaaaatctagttgcgatgattaaaagaaattttaattcaccagagttgtccggagtagttgatattgaaaatactgcatctttagtggtagataagttttttgatagttatttacttaaggaaaaaagaaaaccaaacaaaaatttttcactgtttagtagagagtctctcaataggtggatagcaaagcaagaacaagtcacaattggtcagttggccgattttgattttgtggatcttccagccgttgatcagtacaggcatatgattaaagcgcaaccgaagcagaaactggatctgtcaattcagacagaatatccagcgttgcaaacgattgtgtatcattcaaagaaaatcaacgcaatatttggtcctcttttcagtgagcttacaaggcaattacttgacagtattgactcaagcagattcttgttctttacgagaaagacaccggctcagatcgaagatttcttcggagatctagacagtcatgtcccaatggacgtacttgagttggatgtttcgaagtatgataagtctcaaaacgagtttcattgtgctgttgagtacgaaatctggaggagactgggtctggaggatttcttggcagaagtgtggaaacaagggcatagaaaaaccaccctgaaagattacactgctggtataaaaacgtgtttatggtaccagagaaagagtggtgatgttacaacttttatcggtaataccgtcatcattgcttcgtgtcttgcatcaatgctcccgatggaaaaattgataaaaggagccttctgcggagatgacagtttgttgtactttcctaagggttgtgagtatcccgatatacaacaagctgccaatctaatgtggaattttgaggccaaactgttcaagaagcaatatgggtacttctgcgggaggtacgtgattcatcacgatagaggttgcatagtatactacgaccctttgaagctgatttcgaaacttggtgctaaacacatcaaggattgggatcatttggaggagttcagaagatccctctgtgatgttgctgagtcgttgaacaattgcgcgtattacacacaattggacgacgctgttggggaggttcataaaaccgccccacctggttcgtttgtttataagagtttagttaagtatttgtcagataaagttttgtttagaagtttatttcttgatggctctagttgttaa

SEQ ID NO: 214 - DNA, 4806 bp, Turnip vein-clearing virus
  source 1..4806: mol_type = other DNA
atggcacaatttcaacaaacaattgacatgcaaactctccaagccgctgcgggacgcaacagcttggtgaatgatttggcatctcgtcgcgtttacgataatgcagtcgaggagctgaatgctcgttccagacgtcccaaggttcatttctccaaggcagtgtctacggaacagacactgattgcaacaaacgcatatccggagttcgagatttcctttactcatacgcaatccgctgtgcactccttggccggaggccttcggtcacttgagttggagtatctcatgatgcaagttccgttcggttctctgacgtacgacatcggcggtaacttttccgcgcaccttttcaaagggcgcgattacgttcactgctgcatgcctaatctggatgtacgtgacattgctcgccatgaaggacacaaggaagctatttacagttatgtgaatcgtttgaaaaggcagcagcgtcctgtgcctgaataccagagggcagctttcaacaactacgctgagaacccgcacttcgtccattgcgacaaacctttccaacagtgtgaattgacgacagcgtatggcactgacacctacgctgtagctctccatagcatttatgatatccctgttgaggagttcggttctgcgctactcaggaagaatgtgaaaacttgtttcgcggcctttcatttccatgagaatatgcttctagattgtgatacagtcacactcgatgagattggagctacttttcagaagtccggtgataatttaagttttttctttcataatgagagcactctcaattacacccacagttttagtaatataattaagtatgtgtgtaaaacgttctttcctgctagtcaacggtttgtgtatcataaggagtttttagttactagagtcaacacttggtactgtaagtttacgagagtggatacttttactcttttccgtggtgtgtaccataataatgtggattgcgaagagttttacaaggctatggacgatgcgtggcactacaaaaagacgttagcaatgcttaatgccgagaggaccatcttcaaggataacgctgcgttaaacttttggttcccgaaagtgagagacatggttatcgtccctctctttgacgcttctatcacaactggtaggatgtctaggagagagattatggtgaacaaggatttcgtttatacggtcctaaatcacataaaaacgtatcaagctaaggctttaacttacgcaaatgttctgtcctttgtggagtctattaggtctagagtgataattaacggtgtcactgccaggtctgaatgggacacagacaaggcaattctaggtccattagcaatgacatttttccttataacaaagttgggtcatgtgcaggatgaaataatcctgaaaaagttccagaagttcgacagaaccaccaatgagctgatttggacaagtctctgcgatgccctgatgggggttattccctcggtcaaggagacgcttgtgcgcggtggttttgtgaaagtagcagaacaagccttagagataaaggttcccgagctatactgtacctttgccgacagattggtactacagtacaagaaggcggaggagttccaatcgtgtgatctttccaaacctctagaagagtcagagaagtactacaacgcattatccgagctatcagtgcttgagaatctcgactcttttgacttagaggcgtttaagactttatgtcagcagaagaatgtggacccggatatggcagcaaaggtggtcgtagcaatcatgaagtcagaattgacgttgcctttcaagaaacctacagaagaggaaatctcggagtcgctaaaaccaggagaggggtcgtgtgcagagcataaggaagtgttgagcttacaaaatgatgctccgttcccgtgtgtgaaaaatctagttgaaggttccgtgccggcgtatggaatgtgtcctaagggtggtggtttcgacaaattggatgtggacattgctgatttccatctcaagagtgtagatgcagttaaaaagggaactatgatgtctgcggtgtacacagggtctatcaaagttcaacaaatgaagaactacatagattacttaagtgcgtcgctggcagctacagtctcaaacctctgcaaggtgcttagagatgttcacggcgttgacccagagtcacaggagaaatctggagtgtgggatgttaggagaggacgttggttacttaaacctaatgcgaaaagtcacgcgtggggtgtggcagaagacgccaaccacaagttggttattgtgttactcaactgggatgacggaaagccggtttgtgatgagacatggttcagggtggcggtgtcaagcgattccttgatatattcggatatgggaaaacttaagacgctcacgtcttgcagtccaaatggtgagccaccggagcctaacgccaaagtaattttggtcgatggtgttcccggttgtggaaaaacgaaggagattatcgaaaaggtaaacttctctgaagacttgattttagtccctgggaaggaagcttctaagatgatcatccggagggccaaccaagctggtgtgataagagcggataaggacaatgttagaacggtggattccttcttgatgcatccttctagaagggtgtttaagaggttgtttatcgatgaaggactaatgctgcatacaggttgtgtaaatttcctactgctgctatctcaatgtgacgtcgcatatgtgtatggggacacaaagcaaattccgttcatttgcagagtcgcgaactttccgtatccagcgcattttgcaaaactcgtcgctgatgagaaggaggttagaagagttacgctcaggtgcccggctgatgttacgtatttccttaacaagaagtatgacggggcggtgatgtgtaccagcgcggtagagagatccgtgaaggcagaagtggtgagaggaaagggtgcattgaacccaataaccttaccgttggagggtaaaattttgaccttcacacaagctgacaagttcgagttactggagaagggttacaaggatgtgaacactgtgcacgaggtgcaaggggagacgtacgagaagactgctattgtgcgcttgacatcaactccgttagagatcatatcgagtgcgtcacctcatgttttggtggcgctgacaagacacacaacgtgttgtaaatattacaccgttgtgttggacccgatggtgaatgtgatttcagaaatggagaagttgtccaatttccttcttgacatgtatagagttgaagcgggggtccaatagcaattacagatcgatgcagtattcagggacagcaacttgtttgttcagacgcccaagtcaggagattggcgagatatgcaattttactatgacgctcttcttcccggaaacagtactattctcaatgaatttgatgctgttacgatgaatttgagggatatttccttaaacgtcaaagattgcagaatcgacttctccaaatccgtgcaacttcctaaagaacaacctattttcctcaagcctaaaataagaactgcggcagaaatgccgagaactgcaggtttgctggaaaatttggttgcaatgatcaaaagaaacatgaatgcgccggatttgacagggacaattgacattgaggatactgcatctctggtggttgaaaagttttgggattcgtatgttgacaaggaatttagtggaacgaacgaaatgaccatgacaagggaaagtttttctagatggctttcgaaacaagagtcatctacagttggtcagttagcggactttaactttgtggatttgccggcagtagatgagtacaagcatatgatcaagagtcaaccaaagcaaaagttagacttgagtattcaagacgaatatcctgcattgcagacgatagtctaccattcgaaaaagatcaatgcgattttcggtccaatgttttcagaacttacgaggatgttactcgaaaggattgactcttcgaagtttctgttctacaccagaaagacacctgcacaaatagaggacttcttttctgacctagactcaacccaggcgatggaaattctggaactcgacatttcgaagtacgataagtcacaaaacgagttccattgtgctgtagagtacaagatctgggaaaagttaggaattgatgagtggctagctgaggtatggaaacaaggacacagaaaaacgaccttgaaagattatacggccggagtcaaaacatgtctttggtatcaaaggaaaagtggtgatgtgacaacctttattggtaataccatcatcattgcagcctgtttgagctcaatgatccccatggacaaagtgataaaggcagctttttgtggagacgatagcctgatttacattcctaaaggtttagacttgcctgatattcaggcgggcgcgaacctcatgtggaacttcgaggccaaactcttcaggaagaagtatggttacttctgtggtcgttatgttattcaccatgatagaggagccattgtgtattacgatccgcttaaactaatatctaagttaggttgtaaacatattagagatgttgttcacttagaagagttacgcgagtctttgtgtgatgtagctagtaacttaaataattgtgcgtatttttcacagttagatgaggccgttgccgaggttcataagaccgcggtaggcggttcgtttgctttttgtagtataattaagtatttgtcagataagagattgtttagagatttgttctttgtttga

SEQ ID NO: 215 - DNA, 4839 bp, Pepper mild mottle virus
  source 1..4839: mol_type = other DNA
atggcttacacacaacaagctaccaacgccgcattagcaagtactctccgagggaataaccccttggtgaacgatcttgctaatcggagactgtacgaatcagcggtcgaacaatgcaatgcacatgaccgcaggcccaaggttaattttttaaggtcgataagcgaagagcagacgcttatcgcaactaaggcctaccctgagttccaaatcacgttctacaacacgcagaacgctgtgcacagtctcgcaggtggacttcggtctttggaactagaatacttgatgatgcagatcccctacggttcaacgacatatgatatcgggggaaattttgctgctcacatgtttaaaggtcgtgactacgttcattgctgcatgcctaacatggacttacgtgacgtcatgcgtcacaatgctcaaaaggatagcattgaactgtacctttcaaagcttgcgcaaaagaaaaaggtaataccgccatatcaaaagccatgctttgataaatacacggacgatccgcaatcagtagtgtgctcgaaaccttttcagcactgcgaaggcgtttcgcactgcacggataaagtatacgctgtcgctttgcacagtttatacgacattccagcagatgaatttggggcagcacttctgaggagaaatgttcatgtctgctatgctgccttccacttttctgagaatcttcttttagaagattcgtatgtcagtcttgacgacataggcgctttcttctcgagagagggcgatatgttgaacttttcttttgtagcagagagtactttaaattatactcattcctatagtaatgtgcttaagtatgtgtgtaagacttacttccccgcttctagtagagaagtgtacatgaaggagtttttggtaactagggtaaatacttggttttgtaagttttcaaggttagatacctttgtactatatagaggtgtataccacagaggtgtagacaaggagcaattttacagtgcaatggaagatgcttggcattacaaaaagactttggcgatgatgaatagcgaaagaatcctcttagaggattcatcgtctgttaattattggtttccaaagatgaaagatatggtgatagtacctttgttcgacgtatctttacagaacgaggggaaaaggttagcaagaaaggaggtcatggtcagcaaggacttcgtttatactgtgcttaatcatattcgcacataccagtcgaaagcgcttacttacgccaatgtattatcgttcgttgagtcgataagatcaagagtgataatcaatggggtgactgcgcgctcagagtgggatgtggataaggctttgttgcagtccctgtcaatgacttttttcttgcagaccaaattggccatgctcaaggatgacctcgtggttcagaaattccaagtgcattccaaatcgctcactgaatatgtctgggatgagattactgctgcttttcacaattgttttcctacaatcaaggagaggttgattaacaagaaactcataactgtttcggaaaaggctcttgaaattaaagtacctgatttgtatgtaactttccacgatagattggttaaggagtacaagtcttcggtggaaatgccggtactggacgttaaaaagagcttggaagaagcagaagtgatgtacaatgctttgtcagaaatctcaattcttaaagacagtgacaagtttgatgttgatgttttttcccggatgtgtaatacattaggcgtagatccattggtggcagcaaaggtaatggtagctgtggtttcaaatgagagtggtttgaccttaacgtttgagaggcctaccgaagcaaatgtcgcacttgcattgcaaccgacaattacatcaaaggaggaaggttcgttgaagattgtgtcgtcagacgtaggtgagtcctcaatcaaggaagtggttcgaaaatcagagatttctatgcttggtctaacaggcaacacagtgtccgatgagttccaaagaagtacagaaatcgagtcgttgcagcagttccatatggtatccacagagacgattatccgtaaacagatgcatgcgatggtgtatactggtccgctaaaagttcaacaatgcaagaactatttagacagcctggtagcctcgctctctgctgcggtatcaaacctgaagaagataatcaaagacacagctgctatagatctcgagactaaggaaaaatttggagtctacgacgtgtgccttaagaaatggttggtgaaacctctatcaaaaggacatgcttggggtgtggtgatggactcagactataagtgctttgttgcgcttctcacatacgatggcgagaacattgtgtgcggagagacatggcgtagagtcgcagtgagctccgaatctttggtgtattcagatatggggaagataagagctatacgctctgtgcttaaagacggtgaaccccatataagcagtgcaaaggttacacttgttgatggtgttcctggttgcggaaagacaaaggagattctttcgagggtcaactttgacgaagatctagttctggtaccaggaaaacaggctgctgaaatgataagaagaagggcaaacagttctggtttaatcgtggcgaccaaggagaatgtaaggacggtagactctttcttaatgaattacggtcgaggtccgtgccaatacaaaaggctgtttctggatgaaggtctaatgttacaccctggttgtgttaattttctggttggcatgtctctatgctccgaggcttttgtttatggagacacccagcagattccttacatcaacagagttgcaacttttccctatcctaagcatttgagtcaactcgaggtcgatgctgttgaaactcgcagaacaacgttgcggtgtccagctgatatcaccttcttcttgaatcagaagtacgaagggcaagttatgtgcacatcaagtgttacacgctcggtgtcacacgaggtcatccaaggtgcagcggtaatgaatccagtgtctaaaccacttaaagggaaggtgattacattcactcagtcagacaagtcattgctgctctcgaggggttacgaagatgtgcataccgttcatgaggtgcaaggggaaacgtttgaagacgtctcactagtgaggctgacgccaacacccgtgggaataatttcaaagcagagtccgcacctgttggtctcattgtctaggcatacaaggtcgatcaaatattacacagttgtgctagatgcagtcgtttcagtgcttagagatctggagtgtgtgagtagttacctgttagatatgtacaaagttgatgtgtcgactcaatagcaattacagatagaatcggtgtacaaaggtgttaaccttttcgtcgcagcaccaaaaacaggagatgtttctgacatgcaatattattacgacaagtgtttgccgggaaacagtactatactcaatgagtatgatgctgtaactatgcaaatacgagagaatagtttgaatgtcaaggattgtgtgttggatatgtcgaaatcggtgcctcttccgagagaatctgagacgacattgaaacctgtgatcaggactgctgctgaaaaacctcgaaaacctggattgttggaaaatttggtcgcgatgatcaaaagaaatttcaactctcccgaattagtaggggttgttgacatcgaagacaccgcttctctagtagtagataagttttttgatgcatacttaattaaagaaaagaaaaaaccaaaaaatatacctctgctttcaagggcgagtttggaaagatggatcgaaaagcaagagaagtcaacaattggccagttggctgattttgactttattgatttaccagccgttgatcaatacaggcacatgatcaagcagcagccgaaacagcgtttggatcttagtattcaaactgaatacccggctttgcaaactattgtgtatcatagcaagaaaatcaatgcgctttttggtcctgtattttcagaattaacaagacagctgctagagacaattgacagttcaagattcatgttttatacaaggaaaacgcctacacagatcgaagaatttttctcagatctggactctaatgttcctatggacatattagagctagacatttccaagtatgacaaatcacagaacgaatttcattgtgcagtcgagtatgagatttggaaaaggttaggcttagacgatttcttggctgaagtttggaaacacgggcatcggaagacaacgttgaaagactacacagccggaataaaaacgtgtttgtggtaccagaggaaaagcggtgatgtcaccacattcattggaaacacgatcattattgctgcatgtctgtcctctatgctaccgatggagagattgattaaaggtgccttttgtggtgatgatagtatattatactttccaaagggcactgatttccccgatattcaacagggcgcaaaccttctctggaattttgaagccaagttgtttaggaagagatatggttacttttgcggtaggtacataattcaccatgacagaggctgtattgtatattatgaccctctaaaattgatctcgaaactcggtgcaaaacacatcaagaatagagaacatttagaggaatttaggacctctctttgtgatgttgctgggtcgttgaacaattgtgcgtactatacacatttgaacgacgctgtcggtgaggttattaagaccgcacctcttggttcgtttgtttatagagcattagttaagtacttgtgtgataaaaggttatttcaaacattgtttttggagtaa

SEQ ID NO: 216 - DNA, 2391 bp, Turnip crinkle virus
  source 1..2391: mol_type = other DNA
atgcctcttctacacacactcaacacagcgctcgcagtgggactcctaggagccaggtactaccctgaggttcaaaccttcttggggctgcctgactacgtgggtcacatgaagaatgtagtacggtctgttttccagggatctgggctagtagtagtgtcctccgacacagtcggtgtcagggggacgtatagtaatagaggtcagataggtagtagtctcgggtgtatactagccgttccggatagcggggcggatatagaaatagacttagataggttggtaggaacggaagaggaagccacatcctgtttggtggaggcggtaggtagtaccgcagatgtccccaggaggagagttcgtcaaaaggggcggtttgccatgcatgccgtcaacgcagcaaagctgcacttttgtggcgtcccaaaacccactgaagcgaatcgactagcggtctcaaaatggcttgtccaatactgcaaagagagacatgtcgtagacagccacatcagaacgatagtcaatacggctcttcctagagtgttcacgcctgacgcggaagacattcaggtcgtgctggatttgcacagtgtaagagcacacgaccaccgcaacgccctagccgaagcaggcaaagtgcggaagtggtgggtcaatctcgcgatgcatcccatgactgggaggtcgtggtccagggcttggaggcgattatgccgactgcctgacgaccaggcgatctcttttgtccgctaggggtgcttgcgggagctggtcgggagggagactcaaatctccaggggtgaaaacccggccatgcgcgtgttcccgttagcaaatcccccgaaggttcgacgcatcttccatatctgtggaatgggcaatggtttagactttggagtccacaacaactcactcaacaatttgagaagagggttgatggaaagagtcttttacgttgaagatgcgcagaagcaattgaaaccagccccccaaccgatcccagggattttcgggaagttgagtgggattcggagacgattggtcaggttggccggaaatcatacccctgtgcctcgggagaaatacccgtcgttctacaagggcaggagggccaccatataccaaaaggctttggattctctacatgacagaccggtatcccggaaggacgcagaactcaaaacattcgtgaaggcagaaaagatcaatttcacggctaagaaagacccggctccacgggtcatccagccgagggacccacgatataatattgaggttgggaaatacttgaaaccgtacgagcaccatttatatcgggcaattgacgctatgtggggtgggcccactgtgctgaaaggatacgatgtgggggagcttggaaacattatgagtaacacctgggataaattccggaaaacgtgtgcgataggatttgacatgaagagattcgaccagcacgtatccgtggacgccctacgatgggaacacagtgtatacaacgcgggctttaactgtcccgagttggcacagctgctaacttggcagttgaccaacaagggggttgggagagcctccgatggctttatcaaataccaagttgatggttgtcgcatgtccggagatgttaacacagccttgggcaactgcctactggcttgctctatcaccaagtacttaatgaagggaatcaaatgcaaattaatcaacaatggagacgattgtgtgctgttcttcgaagctgatgaagtcgacagggtgcgcgaaaggctgcatcattggatcgactttgggtttcaatgcatagcggaagaaccacaatacgaattggagaaagttgaattttgccagatgtcccctattttcgatggtgaagggtgggtcatggtcagaaacccccgtgtgagcctctccaaggacagctacagcaccacacaatgggcgaatgagaaagatgcagccagatggttggctgccatcggagagtgtggcttggctattgcaggtggcgtaccagtgttacaatcatattattcttgcctgaagaggaattttggacccctggccggggactacaagaagaagatgcaagatgtttcctttgatagtggattctacaggttatccaagaacgggatgaggggcagcaaagacgtgtcccaagatgctaggttcagcttttaccgggggttcggctacactccagacgagcaggaagcgcttgaggagtactacgacaacctcgaactgctctgtgagtgggaccccacgggatataaagaagaacttagtgatagatggatcctgaacgaattccctacaactctctaagcgacagcgacgcaacaggaaaacggaagaaaggcggagagaaaagtgcgaagaagagattgg

SEQ ID NO: 217 - DNA, 816 bp, Turnip crinkle virus
  source 1..816: mol_type = other DNA
atgcctcttctacacacactcaacacagcgctcgcagtgggactcctaggagccaggtactaccctgaggttcaaaccttcttggggctgcctgactacgtgggtcacatgaagaatgtagtacggtctgttttccagggatctgggctagtagtagtgtcctccgacacagtcggtgtcagggggacgtatagtaatagaggtcagataggtagtagtctcgggtgtatactagccgttccggatagcggggcggatatagaaatagacttagataggttggtaggaacggaagaggaagccacatcctgtttggtggaggcggtaggtagtaccgcagatgtccccaggaggagagttcgtcaaaaggggcggtttgccatgcatgccgtcaacgcagcaaagctgcacttttgtggcgtcccaaaacccactgaagcgaatcgactagcggtctcaaaatggcttgtccaatactgcaaagagagacatgtcgtagacagccacatcagaacgatagtcaatacggctcttcctagagtgttcacgcctgacgcggaagacattcaggtcgtgctggatttgcacagtgtaagagcacacgaccaccgcaacgccctagccgaagcaggcaaagtgcggaagtggtgggtcaatctcgcgatgcatcccatgactgggaggtcgtggtccagggcttggaggcgattatgccgactgcctgacgaccaggcgatctcttttgtccgctaggggtgcttgcgggagctggtcgggagggagactcaaatctccaggggtgaaaacccggccatg

SEQ ID NO: 218 - DNA, 2457 bp, Tomato bushy stunt virus
  source 1..2457: mol_type = other DNA
atggagaccatcaagagaatgatttggcctaagaaagagatttttgtgggtgatttcgcaaccggagtgaataggacagttccggtgaacatctttcaattggtgtgtcgtgtggttctgagatacatgaggacagggaaaatagagtgtgattctgacagcatgactaagtttatagttgaattactcaaaactgattgtgctgccaaatgggaatggttcatgaagagacggcagaggggtgattacattgtccctctatctatagcctccataccaatcataccgctgttgagttatgccactagggtacgcgcagtctcagtcaaggcttttggcaatgaactatcgttcaatgtcagggtgcctagaccatctgtacctaagaaaggattgctcctcagactggcggcaggtctagcgttagctcctatatgcgcgctggccgtgtacgctaccctacctagggaaaaactgtcggtatttaagctgagaactgaggcacgagcacacatggaggatgagagagaagcgacagattgtctggtggttgagccggcaagggaacttaagggtaaagatggtgaggatctcctcactggtagtagattgactaaggtgatcgcgtccactgggcgccctcgtcgaagaccttatgcggcaaagatcgcacaggtggcgagagcaaaggtgggttaccttaagaacagtccagagaatagactaatctaccagagggtgatgatcgagatcatggacaaagactgcgtcaggtatgttgacagggatgtcatattgcctttggctattggatgctgttttgtctatccggatggagtggaggagtcggcggcactatggggctcacaggagtccctgggtgtcaaatagggaggcctagtacgtctacctggggttgtaacacagatcaatcgagatatcccatctgatgtgttacttcctcaggaggtgctagaggttcgtacaggacctcccaatgctaaggaccgtaatatatttatggttgcaggttgcccatcacaggcacggttcttagtacataatcactgcctgaaaaaccttaaaaggggtcttgtggagagagtcttctgcgtagagagaaacgggaagctcgctcgcactccacaacctaccaaaggagcctttggacgtctttccccgttcaggaaagcggtttgtgagaaggttggggtagcccaccgacttgggtatgatgggtttctgtcatactacagcggtgcgaaactccgtacttacacacgagccgtggagagtctgcatatcacacctgtctccgagagggatagtcacttgactaccttcgtaaaagcagagaagatatcgacgtctaagggtgacccagcacctcgggtgattcagcctcgaaacccgaggtacaatgtggaacttggaagatatctacggcatatggaatccaagctgatgaaagctgttgatggcgtgttcggagagacgacatgcatcaaaggatacacagctgatgaggtaggtgcaattttccgggctaaatgggacaggtttgataagcctgtcgccatagggctcgatgcatctaggtttgatcaacactgttccgttgaagcattgcaatatgagcatagcttctacagggccatgtaccctggcaacaagctcttgggcaagttgttggaatggcagctccataataaaggtaaaggttatgttccagatggaactataacctatcgcaaggagggctgtcgcatgagtggggatataaacacctcgttgggcaactatctactgatgtgtgcaatggtacatgggtacatgcgtcatctggggattaatgagtttagtctggcaaactgtggggatgattgcgtcctaattgtcgaacgcaggaatcttaagcagatacagagaactttaccggagtatttcctcaatctgggatatactatgaaggtggagcaacctgtatttcaactggaagaggttgaattttgccaggcacacccagtacagtttcaaggcggttggaagatggttcgaaacgtccgtactgctatgagcaaggatgtgcactgtgtcaacaatatacgcgatttggcgacgaggagagcttggagtaatgctcaacatcatgggggtctagcgcttagtgctggtattccagttgtggagacgttttactctaggtttaagctttatgatgtacctcgtaaacatcaacgtattgacacggtcacaaatgtgcacaagtggcgtggatccggtgggagttatgttgtgacccctgaatctagggctagcttttgggctgcctttggactcacgggggatgagcaactggctctggaggaccgtctggaaagatgggagatggatctgtttggagaggagggtgttgacgctcatgagcccagcatcctcgactccgccgtagcttga

SEQ ID NO: 219 - DNA, 891 bp, Tomato bushy stunt virus
  source 1..891: mol_type = other DNA
atggagaccatcaagagaatgatttggcctaagaaagagatttttgtgggtgatttcgcaaccggagtgaataggacagttccggtgaacatctttcaattggtgtgtcgtgtggttctgagatacatgaggacagggaaaatagagtgtgattctgacagcatgactaagtttatagttgaattactcaaaactgattgtgctgccaaatgggaatggttcatgaagagacggcagaggggtgattacattgtccctctatctatagcctccataccaatcataccgctgttgagttatgccactagggtacgcgcagtctcagtcaaggcttttggcaatgaactatcgttcaatgtcagggtgcctagaccatctgtacctaagaaaggattgctcctcagactggcggcaggtctagcgttagctcctatatgcgcgctggccgtgtacgctaccctacctagggaaaaactgtcggtatttaagctgagaactgaggcacgagcacacatggaggatgagagagaagcgacagattgtctggtggttgagccggcaagggaacttaagggtaaagatggtgaggatctcctcactggtagtagattgactaaggtgatcgcgtccactgggcgccctcgtcgaagaccttatgcggcaaagatcgcacaggtggcgagagcaaaggtgggttaccttaagaacagtccagagaatagactaatctaccagagggtgatgatcgagatcatggacaaagactgcgtcaggtatgttgacagggatgtcatattgcctttggctattggatgctgttttgtctatccggatggagtggaggagtcggcggcactatggggctcacaggagtccctgggtgtcaaatag

SEQ ID NO: 220 - DNA, 8640 bp, Tomato spotted wilt virus
  source 1..8640: mol_type = other DNA
atgaacatccagaaaatacaaaaattaatagaaaatggaaccactttattgttatctattgaggattgtgtaggttctaaccatgatctggctttggatttacataagagaaatagtgatgagattccagaagatgtgattattaataataatgcaaaaaactatgagacgatgagagaattaattgtcaaaatcactgctgatggagaagggctaaacaaagggatggcaactgtggatgttaagaagctaggtgagatggtctctctgtttgagcaaaaatacttagaaacagagttagcaaggcatgatattttcggagagctgatctccagacacctaagaataaaacccaaacaaagaagcgaggtggagatagagcatgcactcagagaatatctggatgatctcaacaaaaagtcctgtgttaacaagctttctgatgatgagtttgagagaataaacaaagaatatgtggcaactaacgccacccctgataactatgtaatatataaagaatcaaaaaacagtgaactctgtttaatcatttatgattggaaaatatctgttgatgccaggactgaaaccaaaacaatggaaaaatactacaaaaatatctggaaatctttcaaagatataaaagtgaatggaaagccattcctagaagatcaccctgttttcgtttctattgttatattgaaacctattgctggaatgccaatcactgttactagcagtagggtattgggaaaatttgaagactctccatcagcattgcatggagaaagagtaaagcatgctagaaatgccaaactgctaaatatttcttatgttggaaaaatcgtaggaaccacgcccacagtggtgagaaactattatgcaaacactcagaaaatcaaatctgaagtcagaggaatcttaggtgatgattttggatccaaagatgtgttttttagtcactggactagcaaatacaaagagagaaatcctactgaaatagcctattctgaagatattgaaagaataattaactcacttgttacagaagaaatccctaaggaagagataatacattttttgtttggaaatttctgtttccacattgaaacgatgaatgaccagcatattgctgacaaatttaaagggtaccaaaactcttgtattaatttaaaaatagagccaaaagctgatttagctgatttgaaagaccacttgatccaaaaacagcaaatatgggaatctttgtatgggaaacaccttgagaagatcatgcttagaattagagaaaaaaagaaaaaagagaaagaaatacctgacataactacagcttttaaccagaatgccacagaatatgaagaaaagtatcctaactgttttacaaacgatctttctgaaactaaaactaacttttccatgacttggtccccaagttttgaaaaaattgaattgggctcagaagtagattacaataacgcaatcataaacaaatttcgggaaagcttcaaaagttcttcaagaattatttacaatagcccatatagtagcataaataaccaaacaaacaaagcaagagatataacaaacttggttagactgtgtttaacagagttaagttgtgatacaacaaaaatggaaaaacaggaacttgaggatgaaatagatataaacactgggagcattaaagttgagagaacaaaaaaatctaaagaatggagtaagcagggttcatgtttgaccaggaacaaaaatgaattttgcatgaaagagacaggcaaggagaacaaaactacctattttaaaggtttagcagtaatgaatataggaatgagctctaagaaaagaattctaaaaaaagaagaaataaaagaaaggatttctaaaggcctggaatatgatacctcagaaaggcaggctgacccaaatgatgattattcaagtatagacatgtcttctctgactcataggaaaaaactaattaggcacgacaatgaggacagcttaagctggtgtgaaagaattaaagattctttgtttattcttcataatggtgatataagagaggaaggcaagatcacatctgtttacaataattatgctaaaaatcccgaatgcttgtacattcaagattcagtattgaaagctgaactggagacttgtaaaaaaataaacaaattatgcaatgacctagccatttaccattactctgaagacatgatgcaattctccaaaggtttgatggtggcagacaggtatatgactaaagaaagtttcaagatactaactacagcaaatactagcatgttgctactggcatttaaaggagatggaatgaacaccggaggatcgggagttccttacatagcattgcacatagtggatgaagacatgtcagatcaatttaacatatgttatactaaagaaatttatagctatttccgaagtggtagtaattacatttatataatgagaccgcagagactcaaccaggtgaggctgctgagccttttcaaaacgcctagcaaagttcctgtatgttttgcacaattttcaaagaaagctaacgaaatggaaaaatggctgaaaaacaaagatatagaaaaagtgaatgtcttttctatgacaatgactgtaaaacagatattaataaatattgtattctcgtctgtcatgataggtactgtgacaaagctcagcaggatgggaatttttgatttcatgcggtatgctgggtttttgccactgtctgattattctaatataaaagaatacattagagataaatttgaccctgatataactaacgtggcagatatatattttgttaatggaatcaaaaaactattgttcagaatggaagatctcaatttaagcacaaatgccaagcctgttgtcgtagaccacgaaaacgatattataggaggtataacaaacttgaatataaaatgtccaataacaggatcgactttactaacactagaggatttgtacaataatgtttatttggctatttatatgatgcctaaatcattgcacaatcatgttcacaatctaacaagtttgttaaatgtccctgctgagtgggagctaaagttcagaaaagaattaggtttcaacatatttgaagacatataccctaagaaagcaatgtttgacgacaaagacctattctctataaatggagctctgaacgtgaaagcattatccgattactatctagggaatatagacaatgttggtttgatgagatcagaaatagaaaataaagaagatttcctgagcccgtgttacaagatatctactttaaaatcttcaaaaaagtgctcacaatcaaacattataagcactgatgagataatagagtgtctccagaacgcaaagattcaagatatagaaaactggaaagggaataatttggctattataaaagggcttataagaacttacaatgaggaaagaaatcgattagtggaattctttgaagataattgtgtcaattcgttgtatcttgtagaaaagcttaaagagataattaatagtggattgataactgcagggaaatctgtaacatccaaattcataagaaataaccatccattaacagtagaaacatatctcaaaacaaaactatattatagaaataatgtaacagttttaaagtctaaaaaagtgtcagaggagctttatgaccttgtaaaacagtttcataacatgatggaaatagatctagattctgttatgaaccttggtaaaggcacagaagggaagaaacacacattcttgcagatgcttgaatttgtcatgtccaaggctaaaaatgtcacagggtctgtagattttttagtttctgtttttgaaaaaatgcagagaactaaaacagacagagaaatatacttgatgagcatgaaagtgaaaatgatgctttactttatagagcacacattcaaacatgtagcacagagtgatccatcagaagctatctctataagtggagacaacaaaataagggcactttctacattatctttggacacaatcacatcttacaatgatattttgaacaaaaattcaaagaagtcaagattggctttcttatctgccgatcagtcgaaatggtcagcatcagaccttacctataaatatgttttagctatcatattaaatccaattttaactactggtgaagccagcttgatgatagaatgcattttaatgtatgttaaattgaaaaaggtttgtataccaacggatatttttttgaacctaagaaaagctcaaggaacttttgggcaaaatgaaactgccataggacttttgactaaaggtttgacgacaaacacatacccggttagcatgaactggttgcaaggcaatttaaattatctgtcgtctgtttatcattcttgtgcaatgaaagcttatcacaagactctagaatgttacaaagactgcgatttccaaactagatggattgtgcactctgatgacaatgcgacatcattgatagccagtggagaggtcgataaaatgctaacagatttttcaagctcatctctgccagaaatgttgtttagaagcattgaagctcatttcaaaagcttttgcataactttgaaccctaaaaagagttatgcttcttcatcagaagtagagtttatatctgaaagaattgtaaatggagcaattattcctctctattgcagacatttagcaaactgttgcacagaatcttcacatataagttattttgatgatttgatgtcactcagtatacatgttacaatgcttttgaggaaaggctgtcccaatgaagtaataccttttgcttatggggctgtgcaagtacaagcattaagcatctattcaatgcttcctggtgaagtgaatgatagcattaggatttttaaaaaacttggagtaagtttaaaatcaaacgagattcccacaaacatggggggctggttaacttctcctatagagccattgtctatattaggtccatcatcaaatgatcaaattatctattacaatgtgataagagattttttgaacaaaaaaagtttagaagaggtcaaagatagtgtctcttcttctagttatctacagatgagattcagagagttaaaagaaaagtatgaaagaggaactctggaagaaaaagacaaaaagatgatatttcttactaatttgtttgagaaagcatcagtgtccgaagattcagacgttctaacaatcgggatgaaatttcaaaccatgttaactcagatcataaaattgcctaatttcataaatgaaaatgctttaaataagatgtcaagttataaggatttctcaaaactttaccctaatctaaaaaagaatgaagatctatataagagtactaagaacttgaagatagacgaggatgctgttttagaggaagatgagttatatgagaagattgcgtctagcttagaaatggagtctgtccatgacataatgataaaaaatcctgaaacaattctgatagcaccattgaatgatagggattttttacttagtcagctgtttatgtacacaagcccttccaaaaggaatcaattatcgaaccaatctacagagaaacttgctttagatagggtattaaggtcaaaagctagaacatttgtggacatttcttccactgtgaagatgacttatgaagaaaacatggaaaagaaaatcttagaaatgctaaaatttgatttagattcatattgttcatttaaaacatgtgtaaatctagtaatcaaagatgttaatttcagcatgctgattccaatattggattctgcatacccttgtgaatctagaaaaagagataattacaatttcaggtggtttcagactgagaaatggatacctgttgttgaaggctctccgggactagtagtgatgcatgctgtttatggatcaaattatatagaaaatttaggtttaaaaaacatccctctaacagatgatagcattaatgttttaacaagcacatttggaacaggtctaatcatagaagatgtgaaatctctagttaaaggtaaagacagctttgaaacagaggcttttagtaattctaatgaatgtcaaagattggtgaaagcatgcaactatatgatagcagcacaaaacaggcttttagcaattaacacatgcttcactaggaaaagcttccctttctattccaagttcaatctagggagaggatttatttcaaacacactagctctcctatccaccatctacagcaaagaagaatcctatcattttgtttctacagctagttataaactagacaaaaccatcagaactgtgataagcgctcagcaagatatgaacttggaaaaaatactggacactgctgtatacatatcagataaattgcagtcacttttcccaacaattactagagaagatatagctttgatattacaaaatgtgtgccttgacagcaagcctatatggcagagtctagaagacaaaatgaaaaggattaacaattcaacagctagtggcttcacagtatcaaatgtgatcctatcacataacagtgaattgaacacaatccagaaacaaattgtctggatgtggaacatgggtttgtgttctcatagaacattagattttgttatcagatatattcgaagaagtgatgtaagatatgtgaaaactgaagaacaagacgaatcacgaaattatgtctctggaacaatgtacaaaattgggatcatgacaagaagctgttatgttcaattgatagcttctgatcatgatgtagcagtttctttgagaacaccattcgagatattgaatgaaagagagtatctttttgatacatacagagagagtatagagaaattgctgcagaaatttatgtttgataaagtgaacataataaagtcaaaacaaccacagattgtcttcttagaaccaggagatgcctgcattagaatgactacagataacaaaatgattgtcaaggttaatgccacatcaagacaaataagactagagaatgtaaaattagttgtgaagataaaatatgaaaatgtgaactctgatgtatgggatattatagaaggccaaaagtctctagtcttgaggcttcctgaagtaggggaatgtttctctgatatgtacaaaactgcagactctgaaaccgaaacaatcaaaaccataaaaaacaggctcatgacctctttaactttcatagaagcctttggaaacttatcacagcagatcaaagagattgtatatgatgatatcagagaaacaatggatgaattcttaatgaacatccgggatacctgcttagaaggtttggaaaactgcaaaagtgtagaagaatatgataattatctcgatgaagatggttttaatgacacagtggaactattcgaaaacttgctaagaacacatgataactttgaagatgagtatagtcctctgttttcagagattgttgataaagcaaaacagtacactagagatttagaaggtttcaaagaaatactgctcatgcttaaatattccctgataaatgatgcatcgggatttaaaagctatagagccactggaatgcatgctgttgaactaatggcaaaaaaacacatagaaataggagaattcaacttgttaggaatgatccaactgattaaagcttgtgaaacatgccacaacaatgactctatattaaacttagcaagtttgaggaatgttcttagcaggacatatgccacattcgggaggagaataggattgaaccatgatctggacttgcaaaacaatttaatggaaaaaagttgtgatttcaagacgctggttttaccagacataaaattatcagaactatctagggagatactgaaagaaaatgggtttgttatatctggagagaatctaaaaatggataggtctgatgaagaatttgagggtcttgctagttttaatgtgttgaggctagatgaggaagaaatgtatgaaggtttgatcaaagaaatgaaaattaaaaggaaaaagaaagggtttttattcccggcaaatacacttctactaagtgagttgataaaattcttgattggagggataaagggaaccagttttgatatagagacattgttgcggaacagttttagaccagacatattttcgaccgacagattgggtaggttgagttctagtgtacctgcactcagagtttatgcaactgtttatatggaatataagaatgcaaattgtcccttaaatgagatagctgacagcttggaaggttatctaaaactgacaaaaagcaagcctaaggagcatttcttgcatggaagagtcaagaaagccttgatacaattaagagatgaacaatcacgaactaaaaaattagaggtttataaagatatcgcaaatttcctttccagacatccactatgtttgtcagagaaaaccttgtatggaagatacacctactctgatattaatgattatatcatgcaaacaagagagattattttgagtaaaataagtgagttggatgaggttgttgaaacagatgaggacaatttcttgcttagttatctaagaggagaagaagatgcctttgatgaagatgaaattgatgaagaagaagatacagattaa

SEQ ID NO: 221 - DNA, 8669 bp, Watermelon bud necrosis virus
  source 1..8669: mol_type = other DNA
atgaacattcaaactataaacagttttctagatgcttcaggcgaaaccactgcatatctgcagagaataaaagatgaaatcatgttaatgtcaaatgttatagaacaaggttattctgaaggtaaaggtgtaattgaatctggattgagttctataatgtctatgaattatattctagacaagattgaagacatgaaatcaaaataccatcagagctcctcttctattgatcaaagagaaatggaaacagaaatctatttatttctcgataaatataaagaactagagttgatgaggcatgatctctttggtgttcttgctggaagaagattacattttgttccaaaacacagatctgatgtttttatgaaagattgtcttatgtcttatatagagttctgcagtgcttcagtgtccatttcgaacaaaatagacaaccttgatagtctaaaagaaaaattgatcttccagcacctaacaccagacaattacacaatatacaaagaaaccaaaggtgagaaagcatgtttgatgatatatgattggaaagtgtctgtagatgctgtgtctgaaggcaagacgtcagaaaactattacacaagtgtttggaaaacttttaaagatatcactatagacgaagaaccttttttagagagacacccaatattcataaccattgttgtgttgaatcctagcggtaatatgccaattgtggcaacaacttgccgggtcgtccaggagttcaggaactcaccatataaaaccttcaatgaccgcaaacgagctgctgaagcagcaaagctaatatcagttaattctctaggtcagcttataggtctgggtgctgactgttttaggcggttttactcagaaacacaatcgtttaagaactctctcttatctaaggttggcaagtatatgaacaggtcatcggaggttttctttagccactggtcatgtgaatacaggaaaactaatttatcaaacaatcaaattagtcaagatattattgatttgatcaattccttgcctaacgatgtggtggggaaggagatccttgttcattttctttttgggaattatttatacttcaaagagactatgagtgaacttcatctcaaagatagatttgaggggtacagatcacactgcaaaatgatgagaattcgtcctttggaaaatgaagaaaaacttaaagactatcttgatagaaatgagcatatttttgagagtttgtatgaaacacatctcaaaaagataaaatcagatgtgctactcagaaaatctaaagaaatagagatagaaagcatagagcgagctttcaacattaatgcagaggagtaccaaaaagagtatcctggatgtttcacaaatgatcttcaagaaactaaaacaaacttttcaatctgctggtcaccaatgacagaagaactaaagatgaatgatcttaattataataatgcaataatacaatctttcagagatgctttgagtgaacagccaaagcttattcaccataaatcatatggtggggctaaagtagacacttatttttccacaactctttttaatttagttagagcttgtctagtagatctaagtacagatacaacgggacattcaaaggctaccttagaagacgtagtggatattaaagatggcagcatccaggtaaaaagaactgaagcctcacagagatggagagaaatagggaatgtcaagactagaaatgggaatgagttcacgttatcaccgcaagcagacactgaagcaagaaagaattttttcagaggtttaaacttgatgtatgttgacatggggaagaaaaagaagatagatataaagaatgaattaaaaagcaagatccaggagtcaatggctcagcaaaagaatgaaaacatggatggcccgagcggggagtatgatgtgtcaaaagccaatatacctcaccaaacgagcctcaaagggatcacacataacaaaaagctaatcagacatgataacccagatgttaaatatcattgtgagtcaatgattgaatctatgtacgtccttcatggtatggacgaaagaaaagataaaaatagtaaaataaattctgtctacaatgaatattgctcaaatccttcttcactatttactaaaggcaatttgatagaaactgaaatgacaattgcaaagaatatccatgaagtagctaaggaactttcaatttacacatatagtgaagacatgatgcagatggcaaaaggtttgatggtggctgacaggtttatgaagaaaacagacttcaagatcttaacttgtgccaatacaagcatgatatgcctagcattcaaaggtgacggcataaacacagggaagtcaggtgtgccttacatcaccatacacaaggtagacaagagcatccaaccacactttgtttctttatacacaaaagaactaatagtgtcttttaaatcagagaattattttattaatatcatgaggccacaaaggctaaatcaggtgcgacttctcagcctgttcaaagctcctagtaaagtccctatcctcttttcacaatattccttattgagtacagagataaaaaaatggttgaatcagcaatccatagatgttttcacttgccctgaaaataagatccagtatctgcaaaagatattattctcctctgtgatcattggcactgtgaccaaactcagcagaatgggaatttttgatttcatgaggtatgcacggtttctaccactgtctgattattccaatataaaggaatatatagctgagaagtttgacccagatataacaaatgttattgattgtttttttgtttctggaattaagaatcttcttctgaaaatggaaggtataaatttaagtaatagtataaaacctctgactatagatcaagaaaatgatatgtctggaggtatatcagatttagacatcatatgccctatcacaggatctacactaaagactatagagtgtctgtataacaatgtctatcttgcaatttacatgatgccgaaatctctccacactcatgtacacaatctcacaacacttctgagtgtcccggctgaatgggaaattaagtttagagaaaaaatgggctttatgataggagatgaaattaaaccaaagaaagaaatgttcaatgattctggtccattctcaattaatggagtgctcaatgtgaaaactttgtttgattattacaagaaaaatattacaaatgttggtgcttgtagatcaaatatagaagaaaaagaggattttttgtctgctccatataaaataaaaactttaacatcatctaaaaaatgctcaaaggcagatatcataaaaagtacagagatagttgctgctttaaaatcatcatatggaaaacagccagatgatataaagggttcagacctttatatactgaagggagttctgaagtgttttgatgaagatagagattcattaaccaacttcttggaggtagaaggcttagaagagtcaaaatatttacatttttttaccaacatgatgtcaggtgataataaaatattgatgaaaactaaccaagacaaattttattataaaagtcatcctttgacagtggagacatttatgaaagttaggtatggttatttcaagacaaccactgttttaaaatcaaaaaaagtaagtgaggaattgtatgatttaatcaaagagttcaacaagataacagaggttgacctggaagctttggaaaagctaggtcgtggactaaaaggcaatcgagtcacatttatacaattattggaatttattttgatgaaatccagaaccaatgctgggaacacagatttcttggtatcaatatttgaaaagatgcagagaacaaagatggatagagagatttatcttatgagcatgaaaacaaaaatgatgttgtattttatagagcatacatacaagcatgtggctcaatctgatccttctgaagccatctcgatctctggagactacaaaattaaaaatttggcatctttatcatatgatactataactaattacaacacagctcttcagaaaaatcttgaatgcaaaatggcttttttatctgcagatcaatcaaaatggtctgcatcagatctaacctataaatacatcttggctgttattatgaatcctcttttaaccacaggagaaataaacctgatgtgtgagtgcataatgatgtatgtaaagttgaagagagtttgtattcctaccgacatctttctaaacctaaaaagagggcaaactgaatatggatcttatggaactgcactgtctgttttaacagataacttagaaacaaatacatttcctgtatccatgaactggctccaagggaatttgaattatctttcgtcagtgtaccactcttgtgcaatgatgggctatgaaaaagctatgaaaaagatgggaaactatgatttcactataagatggatggtgcattcagatgataatgctacttctatggtggttagaggggatataaaagaacttcttgccgagtttaattgcaccagtctgtcagaactgcttttccggagtatacaatcacattttaaaagttattgcataacattaaatccaaaaaagagctatgcctcagaatcagaggtagaatttatatctgaacgaataattaatggtgctgtcatacccttgtattgtagacacttagctaattgtagcacggaaagttcccataatagctattttggtgatctgatgtcactttctatacatataacaatgctcttaagaaaaggatgtcctaatgagctgataccatttgcttatgctgcaatacaaatccaatttctcagcatttactcaatgcttcctggggaagaaaatgatatatcaactattgtcaaagaaattgattttcccttatcaaaaagagaaatcccgatatgtgctggtggttggatgtatgcacctatagaattattgtctatcttaggtccttcatcaaacgatcaattgatttactacaaaatcatcctagatttttttaacctaaaagattttagtagtcttaagaaaagcgtcaactctttaggctacattgatttaagaatcaatgaattgttcaaaagaataaaatatcaaaaaataacaaatgcggataaaaaaatgatatgcatggttaacttatttaaaacaagtttgatgtctgaagactgtgacagtttaaatgtaggaatgaagttccaatccatgatcacacaaattataaaactacctagttttgttagtgaaggctcactgttgaagaactcaagtttccaagacttctgtaagctattccccaatttgaagaaaaacactgacatactcaacgcattaaaacctgttaacttggatgaaagaagccttgaagagttaaatgagagcaaatttttatcacaaatccagctagaagagttgagtaggcacatggcatctcatccagaatcgtttttgatagcaccaatgaatgacaaagattacattttgaccaatctctatacgtatagcagtgtaagcaaaaggaatcaaatgttaaatcaatcaactgagaaattggcattggatagaattttaaggtctaaagctaaaaccttcttagatcccaattcaaaagagatggtttcatataaagaaaatatgtctatgaaaatgagagagataatgagctatgctgggaatgacttcaaaattattaatactatatccagccttatggtgagagacatgaattttgaaatggtcgtctctttaatggagaacactgttgctaatgcttctattcctaaagcgaattataattttagatggttcataactgaaaaagtaccaagtgtcattgagggatcccccggtttaattgttatgtcagctgtttatggcatggattatttgatagagctaggactcaaaaaactccctttgacagaaacctctatctctatactgcatgacatctttggtaacagaaaaacatttgatgatgttaaagagtgtatacagaatgttaaaaagcaatacaagacagaagaatttcaaaatgcagatgttctaaagagatatgtattaagtataaattacatgatccagtcccaaaacaagcttctgtctatcaacacatgtttctccaggaagaatttccctttctattcaaaatataatctaggtaagacgttcataaccaatactttagctatatggagcactatatacagccgattgacaaatataaacttttacaccaatctgaattttgtaattgacaggagttctaggttgattatctcattgcaaagagacatgaatctagaaaaactaattgattgctgtgcctatgtttctgacagattgcaaagcttatttcccgatatgaccgtagagtctatccggcaagttttgtgcaggctaaattttaatggggtagatcttatgaagaaaatgaaatctgaaatagctgaggtaaaaagagccataaacaacataaagacatccactcatgtaactctctcattcaggccacaaatgatagcaatgagcaaacatgcagcatggttatacaattttggatatattaatgagaaagagttcaaatttgtcatagatcagatcagacaaagcgaagtccattatattaaaacagatgagcaagatgtcagaggttactatgtttcaggtcatacatacaaaatagggatcaaaacccagcataactatggacagcttgctatgtcaaaccaagatgtgtcaatccatctccactcaccgtatgaatacaagagagaagatgatgggaaaatatgggatgttcatgttagatctgtatataaattgcttcaaaagctcttaatggacaagcaaagtgtaattaaagcatttttaaatattagaacagaactaatgcccaatcaattttgtattcatgagagttcaaataaaactctattgatattgatcaatgatacaacccgaccaatctcattagagagaatcaaattcaaaggtgatataaaatacattccctcctctgactttgcctgggacatgatgagcaatcagtctaaatacagattgcgacaagcagaaacaggagaatgttacacagaattatacaaactaatagacaacaatgataatttgatgaacactattttaacaaatttaaagaaaagcttagaatatgggaatgaaatggagaaccttatagagcaatcaatccaagggatagatgatgcagatactattgaatatatccaagagtctgttgaccaaatccacaaattagccatagaaggtttagaaacatgtcagacatcagatgaatttgaaaactacctaaaaagagttgattttcaatctacagttgatttccataaagatcttttagagcagattgttgaggaaaaatatggttcagcagaaagactagatgttgctgtagagaagctaaccaaatggacaaacagtttatcaacatttaaagatgtgtgcacaatgttaaagttctccatggtcaatgattctaagggaattaaaacatataaagctaatggagctgatttccactcattatcagcaagtgaagtcatgacttcacaaggatttgatttgttcgaattactgaagttaataaaggcctgtgaagcttgccacaccagcaattcagtattgaacttaattgcttttaaaaatatcaaaaacaaaaccttcatcccagggtttaagagacacttgcccaatacagttcattttgactatgaaatgaaactaaataatgaagtgatgaacaaattctatgagtataaaacaatctcactacaagatataaaagtttctgatagagtaaagagggtccttgaaacaaatgggttcagtatcacaggccacaatttgaagttagaagaaacaaacttagaattgaaccccgtggagattatagatgactcttccacttatgatcaggttgccaagcaaatgaggttaacaaagaaaaagagctcatatcttatacctgctaacactctattgttaggagaactaatgaagttcttgatgctgtgcatcaaaggagaagaacatgatataatgaaacttttgagaagtcattttgcaatgcagcctgtaagagaaaatagattgctttgtatccaagatgctgttatgacatgcaggataagtggttatatccaaagacactttctcaatgacaagaaagaaatcgtactgttaggtgtagctgacagcttagagaacttcatttccttagcaactccaaactatgcaacacaggagccatttaaagcagaggctttgataaaaaaagccctggcagaagtgtatgattccggtaaatataagatactaaaaaatataagaaattatatagttgatgatgtagaatttcttacagaaaagtgtttatattcaaacataactaatgaggagataagcaacatgatatttaatgcagttagcaaaattgatctggaattatccaatttaaagccaaagaagagaaagaaaagactagacttacatgacgttttcaatggattcttgggatcagatgctactacttcggaacaacaataaaaaggaggtaatctatgggcgggaggaaagga

SEQ ID NO: 222 - DNA, 5535 bp, Turnip yellow mosaic virus
  source 1..5535: mol_type = other DNA
atggccttccaattagcattggacgcccttgcacccacgactcacagagatccctctctgcacccgattctcgaatccacagtggattcaattcgctcctcgatacagacctacccatggtccattccgaaggaacttctacccctactcaactcctacggcatcccaacatctggtttgggaacctcccaccacccccacgccgcccacaagacaatcgagacttttctcctttgcacccactggtctttccaggccaccactcccagctccgtcatgttcatgaaacccagcaagttcaacaaacttgcccaggtaaactcaaactttcgggagctgaagaactaccgcctgcaccccaacgacagcactcgttaccccttcacatcaccagaccttcccgttttccccaccattttcatgcacgacgccctgatgtattaccatccgtcccagatcatggacctgttcttncggaaaccaaacctcgaacgtctgtacgccagcctcgtagtgccacccgaggcccatctttccgaccaatccttctacccaaagttgtacacgtacacgacgacccgccacactcttcactacgtcccagagggtcacgaagccggcagctacaaccaaccgtccgacgcccactcttggctccgaatcaattccattcgcctcggcaaccaccacctctcagtgacgatcctggaatcctggggccccgtccactcgctcctcattcaacgagggacccccccccccgacccatcactccaggcccctccaacactcatgncctcagacctctttcggtcttaccaagancctcgcctcgacgtggtctccttccgaatccccgacgccatcgaacttccacaggccacattcctccaacaaccacttcgagaccgactggtcccccgagccgtctacaacgccctgttcacctataccagagcagtccgcacactccgaacttcagacccagcagcattcgtaaggatgcactcctccaaaccggaccacgattgggtcacctcgaacgcctgggacaacctgcaaaccttcgcacttctgaacgttcccctccgaccaaacgtcgtctaccacgttcttcagagcccaatcgcctccctaagcctttacctgaggcaacattggcgccgtcttaccgccaccgccgtccctatcctctccttcctaaccctcctgcagcgcttccttccattgcctatacctctagcagaggtaaaatccatcacagccttccgaagggagctttaccgaaagaaggagccccaccaccccctcgacgtcttccatctccagcaccgcgtccgcaactaccactccgcgatctcggccgtacgcccggcttccccaccccaccaaaaactcccacacgcactccagaaagccgcattactgcttctccgaccgatatcgcccctcttgacagcgaccccgttctttcggtccgaacagaagtccatgctcccgaacgccgaactttcatggaccctgaagcgcttcgctctgccctggcaagcctccctagtcctcctcgctctgtcggaatcatccatactgctccacaaactgttctccccgccaaccctccaagcccaacacgacacctaccaccgacatctccaccctggatcctacagtctccagtgggagaggacgccattgtcgattccgaggacgacagcatttcttcctttcactcccacgacttcgacagcccctccggaccgctccgaagccagtctccctcccgctttcgcctccaccttcgttccccgtccacctccagcggcatcgagccctggagcccagcctcctacgactacggcagcgcccccgacaccgattgaacccacccaacgcacccatcaaaattctgacctcgcgctcgaaagttcaacctcaaccgaacctcccccaccccccatccgatcccccgacangacgccctccgcccccgtccttttcccagaaatcaactcacctcgtcgttttcccccccaacttcccgccacgcccgatctcgaacccgcccacactccaccccctctttccatcccgcaccaagatccgactgactcagcggaccccctcatgggctcccaccttttgcaccattcactgcctgcaccccccacccacccccttccatcttcacagctgttacccgcacctttaacgaacgaccccactgcgatcggcccggtgctcccctttgaagaactccacccacgcaggtaccctgaaaacaccgccactttcctcacgaggctccgttcactcccatcaaaccatcttccacaacccaccttgaattgtcttctctccgctgtctccgaccaaaccaaggtttccgaggagcacctctgggagtccctacagacaattctcccagacagccaactcagcaatgaagagaccaacactctcgggctttcaactgaacacctcactgcgttggcccacctttacaacttccaggcaaccgtttactccgatcgcggccccatcctcttcggcccctccgacaccatcaagaggatagacatcacccacaccaccggaccgccatcccacttttcacccggcaaaagactcctaggcagccaaccctccgctaagggccatccctccgacccactcatcagagccatgaagtctttcaaagtatccggcaactaccttcccttctctgaggcccacaaccatcccacctccatctcacacgccaagaacttgatttcaaacatgaagaatggtttcgacggcgtcctctccctcctcgacgtctccacgggccaacgaaccggacccncccccaaagaacggatcatccagatagaccactaccttgacaccaaccccggcaaaaccactcctgtggtgcatttcgctggcttcgctggctgtgggaagacatatccgatccaacagctcctcaaaaccaaactgttcaaagacttccgggtctcttgccctaccacagaactcagaaccgaatggaagacagcgatggaactccacggctcccagtcatggcgctttaacacttgggagtcttccattctcaagtcatccagaatcctggtcattgatgagatctacaaaatgccaagagggtacctcgacctttccatcctcgccgaccccgccctcgagctcgtcataattctcggcgatcctctncagggcgagtaccactcccaatcgaaagactcatccaaccaccgccttccctctgaaactctcaggctgctaccatacatcgacatgtactgctggtggagttaccgcattcctcaatgcatcgcccgactcttccaaattcacagcttcaatgcctggcaaggagttatcgggtccgtttccactccccatgatcaatcccccgtcctcaccaacagtcatgcctcatctcttaccttcaacagcctgggatatcgctcctgcacgatcagctctagccaaggcctcacattctgcgaccccgccataatcgtcctggacaactacaccaagtggctctcctcggctaacggcctcgtcgccctcactcgatccagatcaggcgtccaattcatgngcccctcttcctacgtcgggggaaccaacggctcttccgccatgttttccgacgccttcaacaacagcctcatcatcatggatcgctacttcccatccctgttcccgcaactcaagctcatcacctcccccctcacaactcgcggccccaaactcaacggggccacccccagcgcatcccccacccaccgttcgccaaacttccaccttcccccacacattccgctctcctatgatcgtgattttgttacggtgaacccaactctccccgaccaaggacccgaaacaagactcgacacccactttctcccaccgtctcggctccctctccatttcgatctcccaccggctatcaccccacccccggtttccacaagcgtcgacccgccacaagcgaaagctagccccgtctacccaggcgagttcttcgattctctggcggcgttcttcttaccagcacacgacccatcaacaagggaaatactccacaaagatcaatctagcaaccagttcccctggttcgaccgacccttcagcctgtcctgccagccctcaagtctgatttccgccaagcatgcacccaaccatgatccgacccttctaccggcctccatcaacaaacgcttgcgattcagacccagtgactcaccgcaccaaatcaccgcggacgacgtggtcctaggcctgcaactctttcactctctttgtcgcgcctactcacgtcaacccaacagcaccgttccattcaaccctgaacttttcgcagaatgcatctctctgaatgagtacgcacagctcagttccaaaacccaatccaccatagtggccaacgcttcacgctccgacccagactggcgacacaccaccgtcaagatcttcgcgaaagcccaacacaaagtcaacgacggctccatcttcggctcgtggaaagcctgccagaccctcgcactcatgcacgactacgtgattctggttcttggacccgtcaagaaataccagagaatcttcgacaacgctgaccggccacctaacatctactcacactgcggcaagacacccaaccaacttcgagattggtgccaggaacatctcactcattccacccccaaaatcgcaaacgactacaccgctttcgaccagtcccagcatggagaatccgtggtccttgaagccctcaaaatgaagagactgaacattccnagccatctgattcagctccacgtccacctcaagaccaacgtctccacccagttcggccccctcacatgcatgcgcctaaccggggaacccggaacttacgacgacaacactgactataacctcgcagtcatctactcccagtatgacgtcggttcctgccccatcatggtttctggcgacgactcactcatagaccacccccttcccactcgccacgactggccatccgttctcaaacgcctccacctccgcttcaaacttgaactcacctctcaccccctcttctgtggctactacgtcggtccagccggctgcatccgcaaccccctggcccttttctgcaagctcatgatcgccgtggacgacgacgccctcgacgaccgacgactcagctacctcaccgagttcaccaccggacacctccttggcgaatcactgtggcacctcctccctgaaacccatgttcagtatcagtcagcctgctttgacttcttctgcaggcggtgcccaagacacgagaaaatgctcctcgacgactccacacccgcactcagcctcctcgaacgaatcacttcttcgccgaggtggctcaccaaaaatgccatgtacctcctccctgccaagctacgactggccatcacctctctatctcaaacgcagtccttcccagaatccatcgaggtttcccacgctgagtctgaattgcttcactacgtccaatag

SEQ ID NO: 223 - protein, 415 aa, Citrus tristeza virus
VVRSQAIPPRKASLQENLLSYESRNYNFIKTERFVGPSEFGRAMAAAVIERCFKMEEMAKIRCDIISLTEANILKWLDKRTPCQIKAVHGELKLPFSVEEQISNFKLMVKRDAKVKLDDSSLSKHPAAQNIMFHKKFINAIFSPCFDEFKNRVLSSLNDNIVFFTEMTNAGLAEIIRRIIGDDDNLFVGEVDFSKFDKSQDLFIKEYERTLYSEFGFDTELLDVWMEGEYRARATTLDGQLSFSVDGQRRSGGSNTWIGNSLVTLGILSLYYDVSKFDLLLVSGDDSLIYSSEKISNFSSEICLETGFETKFMSPSVPYFCSKFVVQTGNKTCFVPDPYKLLVKLGAPQNKLTDVELFELFTSFKDMTQDFGDQVVLEKLKLLVEAKYGFASGTTMPALCAIHCVRSNFLSFERL

SEQ ID NO: 224 - protein, 446 aa, Beet yellows virus
TQVFESGADNVVIRDSAPVNKSTDHDPQRVSSIRSQAIPKRKPSLQENLYSYESRNYNFTVCERFSGPQEFGQAMAMVMLERSFDLEKVAKVRSDVIAITEKGVRTWMSKREPSQLRALSSDLQKPLNLEEEITTFKLMVKRDAKVKLDSSCLVKHPPAQNIMFHRKAVNAIFSPCFDEFKNRVITCTNSNIVFFTEMTNSTLASIAKEMLGSEHVYNVGEIDFSKFDKSQDAFIKSFERTLYSAFGFDEDLLDVWMQGEYTSNATTLDGQLSFSVDNQRKSGASNTWIGNSIETLGILSMFYYTNRFKALFVSGDDSLIFSESPIRNSADAMCTELGFETKFLTPSVPYFCSKFFVMTGHDVFFVPDPYKLLVKLGASKDEVDDEFLFEVFTSFRDLTKDLVDERVIELLTHLVHSKYGYESGDTYAALCAIHCIRSNFSSFKKL

SEQ ID NO: 225 - protein, 295 aa, Potato virus X
GTVRQSPDFDENKIMVFLKSQWVTKVEKLGLPKIKPGQTIAAFYQQTVMLFGTMARYMRWFRQAFQPKEVFINCETTPEDMSVWALNNWNFSRPSLANDYTAFDQSQDGAMLQFEVLKAKHHCIPEEIIQAYIDIKTNAQIFLGTLSIMRLTGEGPTFDANTECNIAYTHTKFDIPAGTAQVYAGDDSALDCVPEVKHSFHRLEDKLLLKSKPVITQQKKGSWPEFCGWLITPKGVMKDPIKLHVSLKLAEAKGELKKCQDSYEIDLSYAYDHKDSLHDLFDEKQCQAHTLTCRT

SEQ ID NO: 226 - protein, 70 aa, Potato virus A
GQLGVWNGSLKAELRPKEKVDLNKTRTFTAAPIETLLGGKVCVDDFNNMFYSLHLKAPWSVGMTKFYGTW

SEQ ID NO: 227 - protein, 236 aa, Potato virus Y
GLLGIWNGSLKAELRCKEKILANKTRTFTAAPLDTLLGGKVCVDDFNNQFYSKNIECCWTVGMTKFYGGWDKLLRRLPENWVYCDADGSQFDSSLTPYLINAVLTIRSTYMEDWDVGLQMLRNLYTEIVYTPISTPDGTIVKKFRGNNSGQPSTVVDNSLMVVLAMHYALIKECVEFEEIDSTCVFFVNGDDLLIAVNPEKESILDRMSQHFSDLGLNYDFSSRTRRKEELWFMSH

SEQ ID NO: 228 - protein, 236 aa, Pepper mottle virus
GKLGVWEWALKAELRSKEKIEANKTRTFTAAPIDTLLGGKVCVDDLNNQFYSKNIECCWTVGMTKFYGGWDKLLTALPAGWIYCDADGSQFDSSLTPYLINAVLTIRYAFMEDWDIGYKMLQNLYTEIIYTPISTPDGTIVKKFRGNNSGQPSTVVDNSLMVVLAMHYAFVREGIAFEEIDSICKFFVNGDDLLIAVNPERESLLDTLSNHFSDLGLNYDFSSRTRNKSELWFMSH

SEQ ID NO: 229 - protein, 235 aa, Bean yellow mosaic virus
GRMGVWNGSLKAELRPQEKVLANKTRSFTAAPIDTLLAGKVCVDDFNNKFYSLHLKIPSTVGITKFYGGWDRLLNSLPDGWVYCDADGSQFDSSLTPYLLNAVLEMRLRLMEEWDLGEQMLKNLYTEIVYTPILTPDGTVVKKFKGNNSGQPSTVVDNTLMVIMAVYYAAEKLGIKGNLEDTLVFFANGDDLLIAIKPECESYLDKFEGLFSELGLKYDFSSRTKNKGDLWFMSH

SEQ ID NO: 230 - protein, 188 aa, Wheat stripe mosaic virus
RVYRFQLKDIEKPFKDAIVDLGKAGQGILAWSKEAHVMFMLAFRVLNDLLLKSLKPWVVYDNSMSEEQFLDKVNAAMTVTPDCAVNSVIDATACDSGQNGFTQLIERQIYARLGASELLLDWYFSFREKYILQAEHVRAPMENVKTSGEPGTLLGNSILMAAILNALVRGSGPFVLVMKGDDGFKRQA

SEQ ID NO: 231 - protein, 401 aa, Rice yellow mottle virus
KQSLTSLILQAGRFNRTVCPPGLAQAVQSLQERYPKVPPRRCLRDEWRFDDIFDEVERILCETGEVNSASSPGVPLAGLANSNGEVRGLARDLVCLAVVERLNALASVDPRQHNWTPRELVEKGLCDPVRLFVKNEPHPRRKLLERRFRLISSVSLVDQLVERMLFGPQNNTEISTWWQWPSKPGMGLLTPEQIRLVWDDVFQKHQAHPAAEADISGFDWSVQDWELWSDLAIRINRGNFQGNLRRAAISRYYCFMNSVFQLSDGTLIQQELPGLMKSGSYCTSSTNSRIRCLMAELIGSPWCIAMGDDSVEGWIEGAQSKYAALGHTCKEYYPCKTRGRELLEFNFCSHLIRRGHAELTSWPKALFRFLSSKHEDFEDLWVELHTCGVWSRIERYLRGIG

SEQ ID NO: 232 - protein, 235 aa, Maize dwarf mosaic virus
GKLGIWNGSLKAEIRPIEKTEANKTRTFTAAPLETLLAGKVCVDDFNNQFYAHHLNGPWTVGITKFYGGWNRLLEKLPDGWIYCDADGSQLDSSLTPYLINAVLNIRLQFMEPWNIGEQMLKNLYTEIVFTPIATPDGSVIKKFKGNNSGQPSTVVGNTLMVIIAFNYTLLSCGVDLEKADDVCRMYANGDDLLLAVNPTHVDILNEFGKHFAALGLNFDFESRTRDKSELWFMS

SEQ ID NO: 233 - protein, 167 aa, Zucchini yellow mosaic virus
DFFKYNKPVTVNQLDHDKFLEAVDGVIRMMCDFEFNECRFITDPEEIYNSLNMKAAIGAQYRGKKKEYFEGLDDFDRERLLFQSCERLFNGYKGLWNGSLKAELRPLEKVRANKTRTFTAAPIDTLLGAKVCVDDFNNEFYSKNLKCPWTVGMTKFYGGWDRLMRSL

SEQ ID NO: 234 - protein, 236 aa, Watermelon mosaic virus
GEKGIWNGSLKAELRPIEKVQANKTRTFTAAPIDTLLGAKVCVDDFNNQFYSFNLKCPWTVGMTKFYGGWDKLMRSLPDGWTYCHADGSQFDSSLTPLLLNAVLSIRCCFMEDWWVGKEMLENLYAEIVYTPILAPDGTIFKKFRGNNSGQPSTVVDNTLMVVIAMYYSCCKQGWSEEDIEERLVFFANGDDIILAVRDEDVWLYDTLSASFAELGLNYNFDERTKKREELWFMSH

SEQ ID NO: 235 - protein, 235 aa, Sugarcane mosaic virus
GNLGIWNGSLKAEIRPIEKTTLNKTRTFTAAPLETLLGGKVCVDDFNNQFYSHHLQGPWTVGITKFYGGWNRLLEKLPDGWIYCDADGSQFDSSLTPYLINAVVKIRLQFMEEWDLGERMLQNLYTEIVYTPIATPDGSVIKKFKGNNSGQPSTVVDNTLMVILAFNYAMLSSGIREDEIDNCCKMFANGDDLLLAVHPDFEYILDGFQNHFSNLGLNFDFTSRTKEKSDLWFMS

SEQ ID NO: 236 - protein, 1616 aa, Tobacco mosaic virus
MAYTQTATTSALLDTVRGNNSLVNDLAKRRLYDTAVEEFNARDRRPKVNFSKVISEEQTLIATRAYPEFQITFYNTQNAVHSLAGGLRSLELEYLMMQIPYGSLTYDIGGNFASHLFKGRAYVHCCMPNLDVRDIMRHEGQKDSIELYLSRLERGGKTVPNFQKEAFDRYAEIPEDAVCHNTFQTMRHQPMQQSGRVYAIALHSIYDIPADEFGAALLRKNVHTCYAAFHFSENLLLEDSYVNLDEINACFSRDGDKLTFSFASESTLNYCHSYSNILKYVCKTYFPASNREVYMKEFLVTRVNTWFCKFSRIDTFLLYKGVAHKSVDSEQFYTAMEDAWHYKKTLAMCNSERILLEDSSSVNYWFPKMRDMVIVPLFDISLETSKRTRKEVLVSKDFVFTVLNHIRTYQAKALTYANVLSFVESIRSRVIINGVTARSEWDVDKSLLQSLSMTFYLHTKLAVLKDDLLISKFSLGSKTVCQHVWDEISLAFGNAFPSVKERLLNRKLIRVAGDALEIRVPDLYVTFHDRLVTEYKASVDMPALDIRKKMEETEVMYNALSELSVLRESDKFDVDVFSQMCQSLEVDPMTAAKVIVAVMSNESGLTLTFERPTEANVALALQDQEKASEGALVVTSREVEEPSMKGSMARGELQLAGLAGDHPESSYSKNEEIESLEQFHMATADSLIRKQMSSIVYTGPIKVQQMKNFIDSLVASLSAAVSNLVKILKDTAAIDLETRQKFGVLDVASRKWLIKPTAKSHAWGVVETHARKYHVALLEYDEQGVVTCDDWRRVAVSSESVVYSDMAKLRTLRRLLRNGEPHVSSAKVVLVDGVPGCGKTKEILSRVNFDEDLILVPGKQAAEMIRRRANSSGIIVATKDNVKTVDSFMMNFGKSTRCQFKRLFIDEGLMLHTGCVNFLVAMSLCEIAYVYGDTQQIPYINRVSGFPYPAHFAKLEVDEVETRRTTLRCPADVTHYLNRRYEGFVMSTSSVKKSVSQEMVGGAAVINPISKPLHGKILTFTQSDKEALLSRGYSDVHTVHEVQGETYSDVSLVRLTPTPVSIIAGDSPHVLVALSRHTCSLKYYTVVMDPLVSIIRDLEKLSSYLLDMYKVDAGTQXQLQIDSVFKGSNLFVAAPKTGDISDMQFYYDKCLPGNSTMMNNFDAVTMRLTDISLNVKDCILDMSKSVAAPKDQIKPLIPMVRTAAEMPRQTGLLENLVAMIKRNFNAPELSGIIDIENTASLVVDKFFDSYLLKEKRKPNKNVSLFSRESLNRWLEKQEQVTIGQLADFDFVDLPAVDQYRHMIKAQPKQKLDTSIQTEYPALQTIVYHSKKINAIFGPLFSELTRQLLDSVDSSRFLFFTRKTPAQIEDFFGDLDSHVPMDVLELDISKYDKSQNEFHCAVEYEIWRRLGFEDFLGEVWKQGHRKTTLKDYTAGIKTCIWYQRKSGDVTTFIGNTVIIAACLASMLPMEKIIKGAFCGDDSLLYFPKGCEFPDVQHSANLMWNFEAKLFKKQYGYFCGRYVIHHDRGCIVYYDPLKLISKLGAKHIKDWEHLEEFRRSLCDVAVSLNNCAYYTQLDDAVWEVHKTAPPGSFVYKSLVKYLSDKVLFRSLFIDGSSC

SEQ ID NO: 237 - protein, 1616 aa, Tomato mosaic virus
MAYTQTATSSALLETVRGNNTLVNDLAKRRLYDTAVDEFNARDRRPKVNFSKVVSEEQTLIATKAYPEFQITFYNTQNAVHSLAGGLRSLELEYLMMQIPYGSLTYDIGGNFASHLFKGRAYVHCCMPNLDVRDIMRHEGQKDSIELYLSRLERGNKHVPNFQKEAFDRYAEMPNEVVCHDTFQTCRHSQECYTGRVYAIALHSIYDIPADEFGAALLRKNVHVCYAAFHFSENLLLEDSHVNLDEINACFQRDGDRLTFSFASESTLNYSHSYSNILKYVCKTYFPASNREVYMKEFLVTRVNTWFCKFSRIDTFLLYKGVAHKGVDSEQFYKAMEDAWHYKKTLAMCNSERILLEDSSSVNYWFPKMRDMVIVPLFDISLETSKRTRKEVLVSKDFVYTVLNHIRTYQAKALTYSNVLSFVESIRSRVIINGVTARSEWDVDKSLLQSLSMTFFLHTKLAVLKDDLLISKFALGPKTVSQHVWDEISLAFGNAFPSIKERLINRKLIKITENALEIRVPDLYVTFHDRLVSEYKMSVDMPVLDIRKKMEETEEMYNALSELSVLKNSDKFDVDVFSQMCQSLEVDPMTAAKVIVAVMSNESGLTLTFEQPTEANVALALQDSEKASDGALVVTSRDVEEPSIKGSMARGELQLAGLSGDVPESSYTRSEEIESLEQFHMATASSLIHKQMCSIVYTGPLKVQQMKNFIDSLVASLSAAVSNLVKILKDTAAIDLETRQKFGVLDVASKRWLVKPSAKNHAWGVVETHARKYHVALLEHDEFGIITCDNWRRVAVSSESVVYSDMAKLRTLRRLLKDGEPHVSSAKVVLVDGVPGCGKTKEILSRVNFEEDLILVPGRQAAEMIRRRANASGIIVATKDNVRTVDSFLMNYGKGARCQFKRLFIDEGLMLHTGCVNFLVEMSLCDIAYVYGDTQQIPYINRVTGFPYPAHFAKLEVDEVETRRTTLRCPADVTHFLNQRYEGHVMCTSSEKKSVSQEMVSGAASINPVSKPLKGKILTFTQSDKEALLSRGYADVHTVHEVQGETYADVSLVRLTPTPVSIIARDSPHVLVSLSRHTKSLKYYTVVMDPLVSIIRDLERVSSYLLDMYKVDAGTQXQLQVDSVFKNFNLFVAAPKTGDISDMQFYYDKCLPGNSTLLNNYDAVTMKLTDISLNVKDCILDMSKSVAAPKDVKPTLIPMVRTAAEMPRQTGLLENLVAMIKRNFNSPELSGVVDIENTASLVVDKFFDSYLLKEKRKPNKNFSLFSRESLNRWIAKQEQVTIGQLADFDFVDLPAVDQYRHMIKAQPKQKLDLSIQTEYPALQTIVYHSKKINAIFGPLFSELTRQLLDSIDSSRFLFFTRKTPAQIEDFFGDLDSHVPMDVLELDVSKYDKSQNEFHCAVEYEIWRRLGLEDFLAEVWKQGHRKTTLKDYTAGIKTCLWYQRKSGDVTTFIGNTVIIASCLASMLPMEKLIKGAFCGDDSLLYFPKGCEYPDIQQAANLMWNFEAKLFKKQYGYFCGRYVIHHDRGCIVYYDPLKLISKLGAKHIKDWDHLEEFRRSLCDVAESLNNCAYYTQLDDAVGEVHKTAPPGSFVYKSLVKYLSDKVLFRSLFLDGSSC

SEQ ID NO: 238 - protein, 1601 aa, Turnip vein-clearing virus
MAQFQQTIDMQTLQAAAGRNSLVNDLASRRVYDNAVEELNARSRRPKVHFSKAVSTEQTLIATNAYPEFEISFTHTQSAVHSLAGGLRSLELEYLMMQVPFGSLTYDIGGNFSAHLFKGRDYVHCCMPNLDVRDIARHEGHKEAIYSYVNRLKRQQRPVPEYQRAAFNNYAENPHFVHCDKPFQQCELTTAYGTDTYAVALHSIYDIPVEEFGSALLRKNVKTCFAAFHFHENMLLDCDTVTLDEIGATFQKSGDNLSFFFHNESTLNYTHSFSNIIKYVCKTFFPASQRFVYHKEFLVTRVNTWYCKFTRVDTFTLFRGVYHNNVDCEEFYKAMDDAWHYKKTLAMLNAERTIFKDNAALNFWFPKVRDMVIVPLFDASITTGRMSRREIMVNKDFVYTVLNHIKTYQAKALTYANVLSFVESIRSRVIINGVTARSEWDTDKAILGPLAMTFFLITKLGHVQDEIILKKFQKFDRTTNELIWTSLCDALMGVIPSVKETLVRGGFVKVAEQALEIKVPELYCTFADRLVLQYKKAEEFQSCDLSKPLEESEKYYNALSELSVLENLDSFDLEAFKTLCQQKNVDPDMAAKVVVAIMKSELTLPFKKPTEEEISESLKPGEGSCAEHKEVLSLQNDAPFPCVKNLVEGSVPAYGMCPKGGGFDKLDVDIADFHLKSVDAVKKGTMMSAVYTGSIKVQQMKNYIDYLSASLAATVSNLCKVLRDVHGVDPESQEKSGVWDVRRGRWLLKPNAKSHAWGVAEDANHKLVIVLLNWDDGKPVCDETWFRVAVSSDSLIYSDMGKLKTLTSCSPNGEPPEPNAKVILVDGVPGCGKTKEIIEKVNFSEDLILVPGKEASKMIIRRANQAGVIRADKDNVRTVDSFLMHPSRRVFKRLFIDEGLMLHTGCVNFLLLLSQCDVAYVYGDTKQIPFICRVANFPYPAHFAKLVADEKEVRRVTLRCPADVTYFLNKKYDGAVMCTSAVERSVKAEVVRGKGALNPITLPLEGKILTFTQADKFELLEKGYKDVNTVHEVQGETYEKTAIVRLTSTPLEIISSASPHVLVALTRHTTCCKYYTVVLDPMVNVISEMEKLSNFLLDMYRVEAGVQYQLQIDAVFRDSNLFVQTPKSGDWRDMQFYYDALLPGNSTILNEFDAVTMNLRDISLNVKDCRIDFSKSVQLPKEQPIFLKPKIRTAAEMPRTAGLLENLVAMIKRNMNAPDLTGTIDIEDTASLVVEKFWDSYVDKEFSGTNEMTMTRESFSRWLSKQESSTVGQLADFNFVDLPAVDEYKHMIKSQPKQKLDLSIQDEYPALQTIVYHSKKINAIFGPMFSELTRMLLERIDSSKFLFYTRKTPAQIEDFFSDLDSTQAMEILELDISKYDKSQNEFHCAVEYKIWEKLGIDEWLAEVWKQGHRKTTLKDYTAGVKTCLWYQRKSGDVTTFIGNTIIIAACLSSMIPMDKVIKAAFCGDDSLIYIPKGLDLPDIQAGANLMWNFEAKLFRKKYGYFCGRYVIHHDRGAIVYYDPLKLISKLGCKHIRDVVHLEELRESLCDVASNLNNCAYFSQLDEAVAEVHKTAVGGSFAFCSIIKYLSDKRLFRDLFFV

SEQ ID NO: 239 - protein, 1612 aa, Pepper mild mottle virus
MAYTQQATNAALASTLRGNNPLVNDLANRRLYESAVEQCNAHDRRPKVNFLRSISEEQTLIATKAYPEFQITFYNTQNAVHSLAGGLRSLELEYLMMQIPYGSTTYDIGGNFAAHMFKGRDYVHCCMPNMDLRDVMRHNAQKDSIELYLSKLAQKKKVIPPYQKPCFDKYTDDPQSVVCSKPFQHCEGVSHCTDKVYAVALHSLYDIPADEFGAALLRRNVHVCYAAFHFSENLLLEDSYVSLDDIGAFFSREGDMLNFSFVAESTLNYTHSYSNVLKYVCKTYFPASSREVYMKEFLVTRVNTWFCKFSRLDTFVLYRGVYHRGVDKEQFYSAMEDAWHYKKTLAMMNSERILLEDSSSVNYWFPKMKDMVIVPLFDVSLQNEGKRLARKEVMVSKDFVYTVLNHIRTYQSKALTYANVLSFVESIRSRVIINGVTARSEWDVDKALLQSLSMTFFLQTKLAMLKDDLVVQKFQVHSKSLTEYVWDEITAAFHNCFPTIKERLINKKLITVSEKALEIKVPDLYVTFHDRLVKEYKSSVEMPVLDVKKSLEEAEVMYNALSEISILKDSDKFDVDVFSRMCNTLGVDPLVAAKVMVAVVSNESGLTLTFERPTEANVALALQPTITSKEEGSLKIVSSDVGESSIKEVVRKSEISMLGLTGNTVSDEFQRSTEIESLQQFHMVSTETIIRKQMHAMVYTGPLKVQQCKNYLDSLVASLSAAVSNLKKIIKDTAAIDLETKEKFGVYDVCLKKWLVKPLSKGHAWGVVMDSDYKCFVALLTYDGENIVCGETWRRVAVSSESLVYSDMGKIRAIRSVLKDGEPHISSAKVTLVDGVPGCGKTKEILSRVNFDEDLVLVPGKQAAEMIRRRANSSGLIVATKENVRTVDSFLMNYGRGPCQYKRLFLDEGLMLHPGCVNFLVGMSLCSEAFVYGDTQQIPYINRVATFPYPKHLSQLEVDAVETRRTTLRCPADITFFLNQKYEGQVMCTSSVTRSVSHEVIQGAAVMNPVSKPLKGKVITFTQSDKSLLLSRGYEDVHTVHEVQGETFEDVSLVRLTPTPVGIISKQSPHLLVSLSRHTRSIKYYTVVLDAVVSVLRDLECVSSYLLDMYKVDVSTQXQLQIESVYKGVNLFVAAPKTGDVSDMQYYYDKCLPGNSTILNEYDAVTMQIRENSLNVKDCVLDMSKSVPLPRESETTLKPVIRTAAEKPRKPGLLENLVAMIKRNFNSPELVGVVDIEDTASLVVDKFFDAYLIKEKKKPKNIPLLSRASLERWIEKQEKSTIGQLADFDFIDLPAVDQYRHMIKQQPKQRLDLSIQTEYPALQTIVYHSKKINALFGPVFSELTRQLLETIDSSRFMFYTRKTPTQIEEFFSDLDSNVPMDILELDISKYDKSQNEFHCAVEYEIWKRLGLDDFLAEVWKHGHRKTTLKDYTAGIKTCLWYQRKSGDVTTFIGNTIIIAACLSSMLPMERLIKGAFCGDDSILYFPKGTDFPDIQQGANLLWNFEAKLFRKRYGYFCGRYIIHHDRGCIVYYDPLKLISKLGAKHIKNREHLEEFRTSLCDVAGSLNNCAYYTHLNDAVGEVIKTAPLGSFVYRALVKYLCDKRLFQTLFLE

SEQ ID NO: 240 - protein, 775 aa, Turnip crinkle virus
MPLLHTLNTALAVGLLGARYYPEVQTFLGLPDYVGHMKNVVRSVFQGSGLVVVSSDTVGVRGTYSNRGQIGSSLGCILAVPDSGADIEIDLDRLVGTEEEATSCLVEAVGSTADVPRRRVRQKGRFAMHAVNAAKLHFCGVPKPTEANRLAVSKWLVQYCKERHVVDSHIRTIVNTALPRVFTPDAEDIQVVLDLHSVRAHDHRNALAEAGKVRKWWVNLAMHPMTGRSWSRAWRRLCRLPDDQAISFVRXGCLRELVGRETQISRGENPAMRVFPLANPPKVRRIFHICGMGNGLDFGVHNNSLNNLRRGLMERVFYVEDAQKQLKPAPQPIPGIFGKLSGIRRRLVRLAGNHTPVPREKYPSFYKGRRATIYQKALDSLHDRPVSRKDAELKTFVKAEKINFTAKKDPAPRVIQPRDPRYNIEVGKYLKPYEHHLYRAIDAMWGGPTVLKGYDVGELGNIMSNTWDKFRKTCAIGFDMKRFDQHVSVDALRWEHSVYNAGFNCPELAQLLTWQLTNKGVGRASDGFIKYQVDGCRMSGDVNTALGNCLLACSITKYLMKGIKCKLINNGDDCVLFFEADEVDRVRERLHHWIDFGFQCIAEEPQYELEKVEFCQMSPIFDGEGWVMVRNPRVSLSKDSYSTTQWANEKDAARWLAAIGECGLAIAGGVPVLQSYYSCLKRNFGPLAGDYKKKMQDVSFDSGFYRLSKNGMRGSKDVSQDARFSFYRGFGYTPDEQEALEEYYDNLELLCEWDPTGYKEELSDRWILNEFPTTL

SEQ ID NO: 241 - protein, 250 aa, Turnip crinkle virus
MPLLHTLNTALAVGLLGARYYPEVQTFLGLPDYVGHMKNVVRSVFQGSGLVVVSSDTVGVRGTYSNRGQIGSSLGCILAVPDSGADIEIDLDRLVGTEEEATSCLVEAVGSTADVPRRRVRQKGRFAMHAVNAAKLHFCGVPKPTEANRLAVSKWLVQYCKERHVVDSHIRTIVNTALPRVFTPDAEDIQVVLDLHSVRAHDHRNALAEAGKVRKWWVNLAMHPMTGRSWSRAWRRLCRLPDDQAISFVR

SEQ ID NO: 242 - protein, 818 aa, Tomato bushy stunt virus
METIKRMIWPKKEIFVGDFATGVNRTVPVNIFQLVCRVVLRYMRTGKIECDSDSMTKFIVELLKTDCAAKWEWFMKRRQRGDYIVPLSIASIPIIPLLSYATRVRAVSVKAFGNELSFNVRVPRPSVPKKGLLLRLAAGLALAPICALAVYATLPREKLSVFKLRTEARAHMEDEREATDCLVVEPARELKGKDGEDLLTGSRLTKVIASTGRPRRRPYAAKIAQVARAKVGYLKNSPENRLIYQRVMIEIMDKDCVRYVDRDVILPLAIGCCFVYPDGVEESAALWGSQESLGVKXGGLVRLPGVVTQINRDIPSDVLLPQEVLEVRTGPPNAKDRNIFMVAGCPSQARFLVHNHCLKNLKRGLVERVFCVERNGKLARTPQPTKGAFGRLSPFRKAVCEKVGVAHRLGYDGFLSYYSGAKLRTYTRAVESLHITPVSERDSHLTTFVKAEKISTSKGDPAPRVIQPRNPRYNVELGRYLRHMESKLMKAVDGVFGETTCIKGYTADEVGAIFRAKWDRFDKPVAIGLDASRFDQHCSVEALQYEHSFYRAMYPGNKLLGKLLEWQLHNKGKGYVPDGTITYRKEGCRMSGDINTSLGNYLLMCAMVHGYMRHLGINEFSLANCGDDCVLIVERRNLKQIQRTLPEYFLNLGYTMKVEQPVFQLEEVEFCQAHPVQFQGGWKMVRNVRTAMSKDVHCVNNIRDLATRRAWSNAQHHGGLALSAGIPVVETFYSRFKLYDVPRKHQRIDTVTNVHKWRGSGGSYVVTPESRASFWAAFGLTGDEQLALEDRLERWEMDLFGEEGVDAHEPSILDSAVA

SEQ ID NO: 243 - protein, 296 aa, Tomato bushy stunt virus
METIKRMIWPKKEIFVGDFATGVNRTVPVNIFQLVCRVVLRYMRTGKIECDSDSMTKFIVELLKTDCAAKWEWFMKRRQRGDYIVPLSIASIPIIPLLSYATRVRAVSVKAFGNELSFNVRVPRPSVPKKGLLLRLAAGLALAPICALAVYATLPREKLSVFKLRTEARAHMEDEREATDCLVVEPARELKGKDGEDLLTGSRLTKVIASTGRPRRRPYAAKIAQVARAKVGYLKNSPENRLIYQRVMIEIMDKDCVRYVDRDVILPLAIGCCFVYPDGVEESAALWGSQESLGVK

SEQ ID NO: 244 - protein, 2879 aa, Tomato spotted wilt virus
MNIQKIQKLIENGTTLLLSIEDCVGSNHDLALDLHKRNSDEIPEDVIINNNAKNYETMRELIVKITADGEGLNKGMATVDVKKLGEMVSLFEQKYLETELARHDIFGELISRHLRIKPKQRSEVEIEHALREYLDDLNKKSCVNKLSDDEFERINKEYVATNATPDNYVIYKESKNSELCLIIYDWKISVDARTETKTMEKYYKNIWKSFKDIKVNGKPFLEDHPVFVSIVILKPIAGMPITVTSSRVLGKFEDSPSALHGERVKHARNAKLLNISYVGKIVGTTPTVVRNYYANTQKIKSEVRGILGDDFGSKDVFFSHWTSKYKERNPTEIAYSEDIERIINSLVTEEIPKEEIIHFLFGNFCFHIETMNDQHIADKFKGYQNSCINLKIEPKADLADLKDHLIQKQQIWESLYGKHLEKIMLRIREKKKKEKEIPDITTAFNQNATEYEEKYPNCFTNDLSETKTNFSMTWSPSFEKIELGSEVDYNNAIINKFRESFKSSSRIIYNSPYSSINNQTNKARDITNLVRLCLTELSCDTTKMEKQELEDEIDINTGSIKVERTKKSKEWSKQGSCLTRNKNEFCMKETGKENKTTYFKGLAVMNIGMSSKKRILKKEEIKERISKGLEYDTSERQADPNDDYSSIDMSSLTHRKKLIRHDNEDSLSWCERIKDSLFILHNGDIREEGKITSVYNNYAKNPECLYIQDSVLKAELETCKKINKLCNDLAIYHYSEDMMQFSKGLMVADRYMTKESFKILTTANTSMLLLAFKGDGMNTGGSGVPYIALHIVDEDMSDQFNICYTKEIYSYFRSGSNYIYIMRPQRLNQVRLLSLFKTPSKVPVCFAQFSKKANEMEKWLKNKDIEKVNVFSMTMTVKQILINIVFSSVMIGTVTKLSRMGIFDFMRYAGFLPLSDYSNIKEYIRDKFDPDITNVADIYFVNGIKKLLFRMEDLNLSTNAKPVVVDHENDIIGGITNLNIKCPITGSTLLTLEDLYNNVYLAIYMMPKSLHNHVHNLTSLLNVPAEWELKFRKELGFNIFEDIYPKKAMFDDKDLFSINGALNVKALSDYYLGNIDNVGLMRSEIENKEDFLSPCYKISTLKSSKKCSQSNIISTDEIIECLQNAKIQDIENWKGNNLAIIKGLIRTYNEERNRLVEFFEDNCVNSLYLVEKLKEIINSGLITAGKSVTSKFIRNNHPLTVETYLKTKLYYRNNVTVLKSKKVSEELYDLVKQFHNMMEIDLDSVMNLGKGTEGKKHTFLQMLEFVMSKAKNVTGSVDFLVSVFEKMQRTKTDREIYLMSMKVKMMLYFIEHTFKHVAQSDPSEAISISGDNKIRALSTLSLDTITSYNDILNKNSKKSRLAFLSADQSKWSASDLTYKYVLAIILNPILTTGEASLMIECILMYVKLKKVCIPTDIFLNLRKAQGTFGQNETAIGLLTKGLTTNTYPVSMNWLQGNLNYLSSVYHSCAMKAYHKTLECYKDCDFQTRWIVHSDDNATSLIASGEVDKMLTDFSSSSLPEMLFRSIEAHFKSFCITLNPKKSYASSSEVEFISERIVNGAIIPLYCRHLANCCTESSHISYFDDLMSLSIHVTMLLRKGCPNEVIPFAYGAVQVQALSIYSMLPGEVNDSIRIFKKLGVSLKSNEIPTNMGGWLTSPIEPLSILGPSSNDQIIYYNVIRDFLNKKSLEEVKDSVSSSSYLQMRFRELKEKYERGTLEEKDKKMIFLTNLFEKASVSEDSDVLTIGMKFQTMLTQIIKLPNFINENALNKMSSYKDFSKLYPNLKKNEDLYKSTKNLKIDEDAVLEEDELYEKIASSLEMESVHDIMIKNPETILIAPLNDRDFLLSQLFMYTSPSKRNQLSNQSTEKLALDRVLRSKARTFVDISSTVKMTYEENMEKKILEMLKFDLDSYCSFKTCVNLVIKDVNFSMLIPILDSAYPCESRKRDNYNFRWFQTEKWIPVVEGSPGLVVMHAVYGSNYIENLGLKNIPLTDDSINVLTSTFGTGLIIEDVKSLVKGKDSFETEAFSNSNECQRLVKACNYMIAAQNRLLAINTCFTRKSFPFYSKFNLGRGFISNTLALLSTIYSKEESYHFVSTASYKLDKTIRTVISAQQDMNLEKILDTAVYISDKLQSLFPTITREDIALILQNVCLDSKPIWQSLEDKMKRINNSTASGFTVSNVILSHNSELNTIQKQIVWMWNMGLCSHRTLDFVIRYIRRSDVRYVKTEEQDESRNYVSGTMYKIGIMTRSCYVQLIASDHDVAVSLRTPFEILNEREYLFDTYRESIEKLLQKFMFDKVNIIKSKQPQIVFLEPGDACIRMTTDNKMIVKVNATSRQIRLENVKLVVKIKYENVNSDVWDIIEGQKSLVLRLPEVGECFSDMYKTADSETETIKTIKNRLMTSLTFIEAFGNLSQQIKEIVYDDIRETMDEFLMNIRDTCLEGLENCKSVEEYDNYLDEDGFNDTVELFENLLRTHDNFEDEYSPLFSEIVDKAKQYTRDLEGFKEILLMLKYSLINDASGFKSYRATGMHAVELMAKKHIEIGEFNLLGMIQLIKACETCHNNDSILNLASLRNVLSRTYATFGRRIGLNHDLDLQNNLMEKSCDFKTLVLPDIKLSELSREILKENGFVISGENLKMDRSDEEFEGLASFNVLRLDEEEMYEGLIKEMKIKRKKKGFLFPANTLLLSELIKFLIGGIKGTSFDIETLLRNSFRPDIFSTDRLGRLSSSVPALRVYATVYMEYKNANCPLNEIADSLEGYLKLTKSKPKEHFLHGRVKKALIQLRDEQSRTKKLEVYKDIANFLSRHPLCLSEKTLYGRYTYSDINDYIMQTREIILSKISELDEVVETDEDNFLLSYLRGEEDAFDEDEIDEEEDTD

SEQ ID NO: 245 - protein, 2878 aa, Watermelon bud necrosis virus
MNIQTINSFLDASGETTAYLQRIKDEIMLMSNVIEQGYSEGKGVIESGLSSIMSMNYILDKIEDMKSKYHQSSSSIDQREMETEIYLFLDKYKELELMRHDLFGVLAGRRLHFVPKHRSDVFMKDCLMSYIEFCSASVSISNKIDNLDSLKEKLIFQHLTPDNYTIYKETKGEKACLMIYDWKVSVDAVSEGKTSENYYTSVWKTFKDITIDEEPFLERHPIFITIVVLNPSGNMPIVATTCRVVQEFRNSPYKTFNDRKRAAEAAKLISVNSLGQLIGLGADCFRRFYSETQSFKNSLLSKVGKYMNRSSEVFFSHWSCEYRKTNLSNNQISQDIIDLINSLPNDVVGKEILVHFLFGNYLYFKETMSELHLKDRFEGYRSHCKMMRIRPLENEEKLKDYLDRNEHIFESLYETHLKKIKSDVLLRKSKEIEIESIERAFNINAEEYQKEYPGCFTNDLQETKTNFSICWSPMTEELKMNDLNYNNAIIQSFRDALSEQPKLIHHKSYGGAKVDTYFSTTLFNLVRACLVDLSTDTTGHSKATLEDVVDIKDGSIQVKRTEASQRWREIGNVKTRNGNEFTLSPQADTEARKNFFRGLNLMYVDMGKKKKIDIKNELKSKIQESMAQQKNENMDGPSGEYDVSKANIPHQTSLKGITHNKKLIRHDNPDVKYHCESMIESMYVLHGMDERKDKNSKINSVYNEYCSNPSSLFTKGNLIETEMTIAKNIHEVAKELSIYTYSEDMMQMAKGLMVADRFMKKTDFKILTCANTSMICLAFKGDGINTGKSGVPYITIHKVDKSIQPHFVSLYTKELIVSFKSENYFINIMRPQRLNQVRLLSLFKAPSKVPILFSQYSLLSTEIKKWLNQQSIDVFTCPENKIQYLQKILFSSVIIGTVTKLSRMGIFDFMRYARFLPLSDYSNIKEYIAEKFDPDITNVIDCFFVSGIKNLLLKMEGINLSNSIKPLTIDQENDMSGGISDLDIICPITGSTLKTIECLYNNVYLAIYMMPKSLHTHVHNLTTLLSVPAEWEIKFREKMGFMIGDEIKPKKEMFNDSGPFSINGVLNVKTLFDYYKKNITNVGACRSNIEEKEDFLSAPYKIKTLTSSKKCSKADIIKSTEIVAALKSSYGKQPDDIKGSDLYILKGVLKCFDEDRDSLTNFLEVEGLEESKYLHFFTNMMSGDNKILMKTNQDKFYYKSHPLTVETFMKVRYGYFKTTTVLKSKKVSEELYDLIKEFNKITEVDLEALEKLGRGLKGNRVTFIQLLEFILMKSRTNAGNTDFLVSIFEKMQRTKMDREIYLMSMKTKMMLYFIEHTYKHVAQSDPSEAISISGDYKIKNLASLSYDTITNYNTALQKNLECKMAFLSADQSKWSASDLTYKYILAVIMNPLLTTGEINLMCECIMMYVKLKRVCIPTDIFLNLKRGQTEYGSYGTALSVLTDNLETNTFPVSMNWLQGNLNYLSSVYHSCAMMGYEKAMKKMGNYDFTIRWMVHSDDNATSMVVRGDIKELLAEFNCTSLSELLFRSIQSHFKSYCITLNPKKSYASESEVEFISERIINGAVIPLYCRHLANCSTESSHNSYFGDLMSLSIHITMLLRKGCPNELIPFAYAAIQIQFLSIYSMLPGEENDISTIVKEIDFPLSKREIPICAGGWMYAPIELLSILGPSSNDQLIYYKIILDFFNLKDFSSLKKSVNSLGYIDLRINELFKRIKYQKITNADKKMICMVNLFKTSLMSEDCDSLNVGMKFQSMITQIIKLPSFVSEGSLLKNSSFQDFCKLFPNLKKNTDILNALKPVNLDERSLEELNESKFLSQIQLEELSRHMASHPESFLIAPMNDKDYILTNLYTYSSVSKRNQMLNQSTEKLALDRILRSKAKTFLDPNSKEMVSYKENMSMKMREIMSYAGNDFKIINTISSLMVRDMNFEMVVSLMENTVANASIPKANYNFRWFITEKVPSVIEGSPGLIVMSAVYGMDYLIELGLKKLPLTETSISILHDIFGNRKTFDDVKECIQNVKKQYKTEEFQNADVLKRYVLSINYMIQSQNKLLSINTCFSRKNFPFYSKYNLGKTFITNTLAIWSTIYSRLTNINFYTNLNFVIDRSSRLIISLQRDMNLEKLIDCCAYVSDRLQSLFPDMTVESIRQVLCRLNFNGVDLMKKMKSEIAEVKRAINNIKTSTHVTLSFRPQMIAMSKHAAWLYNFGYINEKEFKFVIDQIRQSEVHYIKTDEQDVRGYYVSGHTYKIGIKTQHNYGQLAMSNQDVSIHLHSPYEYKREDDGKIWDVHVRSVYKLLQKLLMDKQSVIKAFLNIRTELMPNQFCIHESSNKTLLILINDTTRPISLERIKFKGDIKYIPSSDFAWDMMSNQSKYRLRQAETGECYTELYKLIDNNDNLMNTILTNLKKSLEYGNEMENLIEQSIQGIDDADTIEYIQESVDQIHKLAIEGLETCQTSDEFENYLKRVDFQSTVDFHKDLLEQIVEEKYGSAERLDVAVEKLTKWTNSLSTFKDVCTMLKFSMVNDSKGIKTYKANGADFHSLSASEVMTSQGFDLFELLKLIKACEACHTSNSVLNLIAFKNIKNKTFIPGFKRHLPNTVHFDYEMKLNNEVMNKFYEYKTISLQDIKVSDRVKRVLETNGFSITGHNLKLEETNLELNPVEIIDDSSTYDQVAKQMRLTKKKSSYLIPANTLLLGELMKFLMLCIKGEEHDIMKLLRSHFAMQPVRENRLLCIQDAVMTCRISGYIQRHFLNDKKEIVLLGVADSLENFISLATPNYATQEPFKAEALIKKALAEVYDSGKYKILKNIRNYIVDDVEFLTEKCLYSNITNEEISNMIFNAVSKIDLELSNLKPKKRKKRLDLHDVFNGFLGSDATTSEQQ

SEQ ID NO: 246 - protein, 1844 aa, Turnip yellow mosaic virus
MAFQLALDALAPTTHRDPSLHPILESTVDSIRSSIQTYPWSIPKELLPLLNSYGIPTSGLGTSHHPHAAHKTIETFLLCTHWSFQATTPSSVMFMKPSKFNKLAQVNSNFRELKNYRLHPNDSTRYPFTSPDLPVFPTIFMHDALMYYHPSQIMDLFLRKPNLERLYASLVVPPEAHLSDQSFYPKLYTYTTTRHTLHYVPEGHEAGSYNQPSDAHSWLRINSIRLGNHHLSVTILESWGPVHSLLIQRGTPPPDPSLQAPPTLMXSDLFRSYQEPRLDVVSFRIPDAIELPQATFLQQPLRDRLVPRAVYNALFTYTRAVRTLRTSDPAAFVRMHSSKPDHDWVTSNAWDNLQTFALLNVPLRPNVVYHVLQSPIASLSLYLRQHWRRLTATAVPILSFLTLLQRFLPLPIPLAEVKSITAFRRELYRKKEPHHPLDVFHLQHRVRNYHSAISAVRPASPPHQKLPHALQKAALLLLRPISPLLTATPFFRSEQKSMLPNAELSWTLKRFALPWQASLVLLALSESSILLHKLFSPPTLQAQHDTYHRHLHPGSYSLQWERTPLSIPRTTAFLPFTPTTSTAPPDRSEASLPPAFASTFVPRPPPAASSPGAQPPTTTAAPPTPIEPTQRTHQNSDLALESSTSTEPPPPPIRSPDXTPSAPVLFPEINSPRRFPPQLPATPDLEPAHTPPPLSIPHQDPTDSADPLMGSHLLHHSLPAPPTHPLPSSQLLPAPLTNDPTAIGPVLPFEELHPRRYPENTATFLTRLRSLPSNHLPQPTLNCLLSAVSDQTKVSEEHLWESLQTILPDSQLSNEETNTLGLSTEHLTALAHLYNFQATVYSDRGPILFGPSDTIKRIDITHTTGPPSHFSPGKRLLGSQPSAKGHPSDPLIRAMKSFKVSGNYLPFSEAHNHPTSISHAKNLISNMKNGFDGVLSLLDVSTGQRTGPXPKERIIQIDHYLDTNPGKTTPVVHFAGFAGCGKTYPIQQLLKTKLFKDFRVSCPTTELRTEWKTAMELHGSQSWRFNTWESSILKSSRILVIDEIYKMPRGYLDLSILADPALELVIILGDPLQGEYHSQSKDSSNHRLPSETLRLLPYIDMYCWWSYRIPQCIARLFQIHSFNAWQGVIGSVSTPHDQSPVLTNSHASSLTFNSLGYRSCTISSSQGLTFCDPAIIVLDNYTKWLSSANGLVALTRSRSGVQFMXPSSYVGGTNGSSAMFSDAFNNSLIIMDRYFPSLFPQLKLITSPLTTRGPKLNGATPSASPTHRSPNFHLPPHIPLSYDRDFVTVNPTLPDQGPETRLDTHFLPPSRLPLHFDLPPAITPPPVSTSVDPPQAKASPVYPGEFFDSLAAFFLPAHDPSTREILHKDQSSNQFPWFDRPFSLSCQPSSLISAKHAPNHDPTLLPASINKRLRFRPSDSPHQITADDVVLGLQLFHSLCRAYSRQPNSTVPFNPELFAECISLNEYAQLSSKTQSTIVANASRSDPDWRHTTVKIFAKAQHKVNDGSIFGSWKACQTLALMHDYVILVLGPVKKYQRIFDNADRPPNIYSHCGKTPNQLRDWCQEHLTHSTPKIANDYTAFDQSQHGESVVLEALKMKRLNIPSHLIQLHVHLKTNVSTQFGPLTCMRLTGEPGTYDDNTDYNLAVIYSQYDVGSCPIMVSGDDSLIDHPLPTRHDWPSVLKRLHLRFKLELTSHPLFCGYYVGPAGCIRNPLALFCKLMIAVDDDALDDRRLSYLTEFTTGHLLGESLWHLLPETHVQYQSACFDFFCRRCPRHEKMLLDDSTPALSLLERITSSPRWLTKNAMYLLPAKLRLAITSLSQTQSFPESIEVSHAESELLHYVQ

SEQ ID NO: 247 - DNA, 3199 bp, Solanum lycopersicum
  source 1..3199: mol_type = genomic DNA
tcccaaaactcattatttaattttcttctttaacaaagttgacgagacaaaagcaaaatatatacaggaaaaatgggtgatccgttgattgaagaaattgatgttctggatgcacctttaccatattctgtagagacgatgcttgatagaatctgcaaggagcaggggcaaaaaccaccgtgtactggcattagaaggaggctgagctctattggtgaaaaagggtcattagaaatgctcaaaataatatcacgtcgtcctatcaagaagagtctctctgcttttcttgtttacatgattgatcgctacccggattgtctctcctcttcctctagccccttcaattgtctactcaaacgctcttcttcccctcgtctctttccatctccagagggtaaacgtttacaaggtgaaagttcttctaaatcaaagcttgagatgggcttattggcctgtgcaagccctcagaaagttgctcgccagttatcattttgcgaggagcctgaatctaactgtagaagaacctccccttatgtcagccaacagttgatgatcctcaatgaacttgaatttagaaaattgtttctggtactgagctacattggatgcaacaagttggaagatgttatatcccctcaaattgctgatgatattgtaagaaagaaaaatctttccatgactgattttgaatcagaaatttggaatgcttttggaaaagcatgttatgctgtgtcagatagatcaaagtacttagactggaattgcagaaagacacatatctactattgccacattaagcagaacggatactgttccttcaagggtccatacttgaacacattaaggactcacttacagagagccctgggagatgacaatgtactgattgtaaaatttgttgaagatacaagttgtgccaatataattctcgaggaaggcattcttgttggcttgagacgttaccgtttctttgtgtataaagatgataaagagaggaagaaaagtccagctatgatgaagacaaaaactgcttctttgaagtgctactttgttaggtttgagtccattggaacctgcaatgatggagaatcctatgtattttctaccaaaacaatcagtcaagcaaggtgtaaattcatgcatgtgcatatggtttctaatatggcaaaatatgcagccaggctttccttaattctatcaaagacgattaagcttcaaacagatcttgattctgtcaccattgaaagaattgaagatatactttgtcgggatgaaaatggttgtattattcaagatgaagacggcgaacctcgtatacatactgatggtactggtttcatatcagaagatttagctatgcattgtcccaaagatttttcaaaagcagaatatataaaagatgaaaattatgagaattttgttgatatcgtggaccttgatgacgtgaatgtagaaagaagagtgagtgtatctcgcaataggaaaccgcctttgttgatgcagtgccgtttgttcttcaatggttgtgctgtgaaggggacttttcttgtcaatagaaagattggatcacgaaaaattcatattagaccctcaatggtgaaggttgagatagacccaacaatttcaagtataccaacttttgactcattggagatagttgcaatcagtcatagaccaaataaggcatatctgtccaagaatttaatctctctgctgagctacggaggagtccataaagaatactttatggaacttttgggaagtgcgctggaagagacgaaacaagtatatttgaggaaacgtgcagctctaaaagttgctatcaactatagagaaatggatgatgaatgtctaacagcaaggatgatatcgtctgggatacctctcaatgaacctcatctccatgctcgcttgtctaggcttgcaaagattgaaagaactaagcttagaggaggaaagcttcctataagtgacagtttttatcttatgggaacagctgaccccactggtgtactggaaagcaatgaagtctgtgttattctagataatggccaagtatctgggcgtgttttggtctatagaaatcctggtcttcactttggagatgtacatgtgatgaaagcgcgatatgtggaagagcttgcagatgttgttggtgatgccaaatatggtatatttttttcaactaaaggcccgaggtcagctgctactgagattgcaaatggtgactttgatggtgatatgtattgggtttccataaaccgtaagttggtagattcttatacaacaagtagaccatggattcgcatgcattcaactcctaacgcagttagcaaaaaaccaagtgaattttcagctgatgaattggaatatgagctttttaggcaatttctggaagcaaagtctaaaggtgccaatatgtctctggcagctgatagctggctggcatttatggatcgtcttctgacgctgcgagatgataatgtggatgatatgcatagcttgaaaggcaagatgcttcacctgattgacatctactatgatgcattagatgcacctaaaagcgggaagaaggttagcatccctcattatctgaaggcaaacaagttcccccactatatggaaaaagggaactcctgcagctatcattcaacttctattctgggtcagatttatgatcatgtcgactcatatccagatgaagatttgtgtataacagaaatctctaaactgccttgctttgaagttgaaatccctcaaagatgcatgacattgtggagaggaagatatgaagagtacaaaaaggatatgacacgggccatgaactttgattgtgaactaagaatcacctcttgcaatgaagttataaagaagtacaagatgttgctatatggtgctgtggagtttgaacaaacagtaagaaagactgaagacattttcgacgaggcccttgcaatatatcatgtaacatatgataatgcaaggatcacatacagcatagagaaatgtggttttgcttggaaagtagctggttctgcgctttgcaggatccacgccatgtatcgcaaggaaaaagacttgcccattttgccatcggttttgcaggaaatactctagacgtattgtaacattgaagtgatcaataaatatctacttagcattctattctatgtgatgacgtccaaatttacttctcaaa

SEQ ID NO: 248 - DNA, 4902 bp, Arabidopsis thaliana
  source 1..4902: mol_type = genomic DNA
gttgttgctgtctcctctctcaatggctacctcctgcgactgaaacggtaaacctttattctctttagattcgtgtgtattcatcagtatatggtcatgttacaataatatattgcttattaactgatcaatctgttactgtcctgccctgcttactatagtagacagtttctgtggttttgtaatacttaggcatgtgttaactattattagaggacttacagtgagttaaggtgtcttcgtgtgtgtttctctcaaaatgatatatttgttactctgtacatatatatatatatgctcgtggaatcctgatgagaatttggttacagctttatcaatcctctaaatagttttcaacagtgcaaggttttgtgttcctctcttgaaaatatagtctctgaagtgttaacgagctctatatgactgtttgcagagttcaggcagcaatgtaaatgagctggagaatataagcaatgataggactgagtcaatagttcaagaacgtgaaggttctgacaactaagcaaactgcttcttcaatttggttcgataactgtagataaattgtgataaaatatcttttatttgatcaatcattacattattgtagagaatcctcagccaagagattggtagctagatagataaggttgacttggagtcaacttcttccttatagctttcttcatttaatatagtaaacgtttttaactcatttttttccagagaatctgtacccttggcgttcttgtactggttcatcgtagatgattctcgacgactagttgttatggctgaagcatttgtgtcgtttggacttgagaagctttgggatctcctgagtcgagaatcagagcgattgcagggaattgatgggcaacttgatggactaaagcgtcagctgagaagtttacagtcgttgttgaaagatgcagatgccaagaaacatggaagtgatagggtgaggaatttcttggaagatgtcaaagaccttgtttttgatgctgaggatataattgaatcctatgttctgaacaaacttagtggaaaaggaaaaggggtcaagaagcatgtgagacgacttgcttgcttcttgacggatcgccacaaggttgcttcagatatcgagggtatcactaagaggatctctgaagtgattggggaaatgcagagttttgggatacaacaaatcattgatggtggtcgttcgctgtctcttcaggaaagacaaagggtgcagagggagatccgacaaacgtatcctgacagttctgaaagcgatcttgtcggggtggagcagagtgttaaagaattggttggtcatttggtggagaatgatgttcatcaagtggtttctatagctgggatgggcggtattggtaaaaccactctggctagacaagtctttcatcatgacttagtccggcgtcactttgatggattcgcatgggtctgtgtttcccaacaatttacacagaaacatgtttggcagaggatcttgcaagaacttcagccacatgatggggatattttacagatggacgaatatgcacttcagcgtaaactctttcaattgttagaggccggtagatatttagttgtcctcgatgatgtatggaaaaaagaagactgggatgtaataaaagcagtgtttccacggaaaagaggtgagctcttatggtacatacatgaagcactttttcttcttaattcataaaagtgattgttaaaaaagaaatatatagaataattgccttttttattccctagcatgagaaacacaaatatttttgcaggttggaagatgctgcttacttctcgaaatgaaggtgttgggatacatgctgatccaacatgtttaacttttagagcaagcatccttaaccctgaagaaagttggaagctctgtgagagaatagtattccctaggagagatgaaactggtacatatcttattatataatgtttagtttctctaacttttaagaaaaatacatttacatatactaatttacatgtatatatttatattattttataaattttaattttccttaaccaaaaagtaatatttgtatacatattgctattttttccttactattagaacaactaactaaaaacgtatggtaatccatatgctaatttaggcatgtataaaaaaaaaagtcaatggtaatcttgattttgaccaaaaaataattaatttaattagcatgaacaatgagtgttgttaaggttcaaaaggacaatataattattaaacattaatttaattggataacaattaaaaaaattaactattaatcctagtacagtaagtcagtaattacgaatcttgaaaattggttttggtttttttcttcctattttttataggtttattcaaattagaaatatcgaattatctacttttatggtttattcatgattggtttgattaaaatttaacgtaataaaatcaactaaatttgaaagaaacatgtattgattaacccgtgattacacgattccttgtaataaagttcaaatagaatactaagaccaagaatctagtgtattattttaatttggcagctcacatgttgaaatgtattagcttgtgatattgtgcagaagtaaggcttgatgaagaaatggaagccatgggaaaggaaatggtcacacattgtggaggactaccattagctgttaaagcgttgggaggcttgttagctaataaacatactgttcctgagtggaaaagagtttttgacaatattggatctcaaatagtaggaggatcgtggttagatgacaacagtctcaattcggtttaccgaatattgtctctgagttatgaagatttgccaacgcatttaaagcattgcttccttaacctagcccatttccccgaagattccgagatatctacgtatagtttgttctattactgggctgcagaagggatttacgatggatcaaccatcgaagatagtggagaatactacctagaagagctagtgaggagaaatttggttattgcagacgacaactatttgagttggcaatctaaatattgtcaaatgcatgacatgatgagagaagtatgtttatctaaagccaaagaagagaacttcctacaaattatcatagaccctacttgcacctctaccatcaatgctcaatctcctagtagatctcgcagactcagcatacatagtggtaaagcctttcatatattgggacacaaaaacaagacaaaggtgagatctcttatagttccgagattcgaggaagactattggatacgatcagcttcagtcttccacaacttaacattgctcagggtgttggatctttcttgggtaaagtttgaaggagggaagttaccttgtagcattggagggctcatccacttgagatacttgagtttatacgaggctaaggtatctcatctaccttctactatgcggaacctaaagcttctgctctatttgaacttacgtgttgataccgaggaaccgattcacgtgccaaatgttttgaaagagatgatacagttgaggtacctttccctacctcttaaaatggatgataaaaccaagttggaattgggtgatctagtgaacctggagtacttgtatggtttctcaacgcaacacagtagtgtgacagacctcctccgtatgactaagctccggtatctcgctgtatctttgagcgaaaggtgcaattttgaaactctatcgtcatctctccgcgaattgcgaaacctcgagacgcttaatttccttttttcgctcgaaacatatatggttgattatatgggagagtttgttctggatcattttattcatctaaaacagttgggattggcagtacgtatgtcaaagattcctgatcaacatcaattccctccccaccttgtacacttatttctaatttattgcggcatggaagaggatccaatgccaattctagaaaagttgcttcatttgaagtcggttcgtttagcacgtaaggcattcctagggagcagaatggtgtgctcaaaaggcggatttcctcaattatgtgttatagaaatatctaaagaatcagagttggaagagtggatagtagaagaagggtcgatgccatgtcttcgtactttgactatagatgattgcaaaaagttgaaggaacttccagatggactcaagtacataacatccttaaaggaactgaagattgaaggaatgaagagggagtggaaggagaaactggtaccaggtggagaagattactacaaagtccaacacattcccgatgttcaatttatcaactgtgaccagtagcaggtaaaaaataaattgtatagtgttcactttgtttttttctgttgttgttggattcgtgtgaaagtcatgtggacagtctcaactattatacattgttctaacatcgatcatctttgaaataagatgcaggaaagaccaagaagcgagccaaattctcttatattgggagatatagacgctgcttcaacagagtcatctgctgatcaacaggtttttccgaagaatatctggtattgcttatgaagaatacagattctcaagtattaacgattatgtttccagtcttggagctctcgctttttcagtgcatcgttatgttgtgcggctcagaactatattatagaaacaatgcttatattgttgtttgtttttgatgtggatgcatggaacatgcttgagaactcttttacaaaatggagaaacgaaacttgtaaaatttggatattttatgtttgttgtaaaatttggatattttgtgtttgtgtaaaatttggatattatatgttttgctttctcgtttgtgatttaacacagttcgttttgtaagctttatttacagtttacaccatcaaatcttgtc

SEQ ID NO: 249 - DNA, 2931 bp, Arabidopsis thaliana
  source 1..2931: mol_type = genomic DNA
tttctcttcttttttttccctcacttctccaacaaactcgatttcccgatttcgtcgcctcttctcgtctctccgctctcctcgccgcgagtctgtttcgccgccgtctatctcccaattccggtacatcctaaaccatttccccttttaatccaacctgtgttgatttctaatcgcgattaatctcagttaggtttaattgcttgatctcagttgaaattagggcgtaatctcattactaaatgtagcaaaaatcgacaatatagtctcgtctctctgttatagcaatcaatttgtgagattctgaattttggcagaatcctaattctgaagtttggctaatatagaacctgtaattgtgttttttcatttatgagatgttttattaactttgttagtcacaaattgatttcatgtgtataatgttcattatttcgattttgttctcgtatgcgatattacgttcttggctgtgatatctgaagtaaagctgttgtaatctaagtttttcttctcttgattttaaacagtgaccgttgttgtttagtgaatcgatgatttacactgctatcgacaatttttacctatccgacgagcagctgaaggcttcaccttcgaggaaagatgggatagatgaaacaactgaaatctctcttagaatctatggatgtgatctcatccaagagggtggaatattgctcaaactgtatcctttttcttggtctaattattaagcaagactcaaatgttacgtagctgtgattttcttaacttagattgtttattttagaccacaggcagttatggctactgggcaggttctgtttcagcgattctattgcaagaagtctttggctaaatttgatgtcaaggtaaattattttgtttctttcttctagttttgtgtgtttatgaaagtatgataattctttaggagtgtatatactcctgcctatgaccataatgatttgatatgtagtttaatttttacagatagttgctgccagctgtgtatggcttgcatcaaaactggaagaaaaccctaaaaaagctagacaggtcatcatcgtattccacaggatggagtgtcgcagggagaacttgccattagaacatctggatatgtatgccaaggttagtttgcaattgcatttgtcatattgaatgttttttttcgtatattttgtttctactcatgggatagctttatttggaagtacttttatgggatctcatcttttttcctacttgttaaatatctgcagaagttctctgagttgaaagttgaattaagcagaactgagagacatatactgaaagagatgggttttgtttgtcatgttgaacatcctcacaagttcatatcaaactaccttgccacattagaaacacctccagaattgaggcaagaagcttggaatttggccaatgataggtaatctctattctcaaaatcctaatatggatattatttcatatgatttcctaatagttagctacacatcatagtgttgataggttttagagttgatgtttatcctgaagcttggcatttctcctgttctagtttgattttgagtatgtttgttatactttctcaatatctgataattcctttatgattttatcttaatctcatgatatgtctataatgcagtctgcgtacaaccctctgtgtaaggttcagaagtgaggttgtggcttgtggggtagtgtatgctgctgcccgtaggtttcaagtaccactccctgagaatccgccgtggtggaaagcatttgatgcagataaatctagtattgacgaagtgtgtagagttcttgctcatttatacagtcttccaaaggctcagtatatctctgtttgcaaggatgggaagccatttacattttctagcagatccgggaattctcaaggtcaatcagcgacaaaggtgaggtagatcgctttcttggttttgtaatttttgtgaaaacatgagattattgtccatattactgctattatagactcttaaagttgagtgcgtttcttacacagtagtaaacagagtttctaccaccacattgcatgttatatagtattgaaaaagggctgtctactttattatttcggcttgggaaaatctgcaatccaagtgcattttctatgtctgtaatcagagctaggtttgaagtgcttttaacactgttacaggatctgttgccgggagcaggcgaggctgttgatactaaatgtactgcaggatcagctaataacgacttgaaggatggaatggttactacaccacacgaaaaggctacagattccaagaaaagtggtaccgagtcaaactctcagccaattgtaggagactcaagctatgaaagaagtaaagtaggagatagagaaagagagagtgatagagagaaggaacgaggtagagagagggacaggggtaggtctcacagaggcagagattctgacagagacagtgatagggagagagacaaactcaaagatcgaagtcatcatcggtcaagagacagattgaaggattcaggtggacattcagataaatcaaggcatcattcttctcgggaccgtgactaccgcgactcatcgaaagaccgtcgtaggcaccattaagccaatcttcttgtcatctacatccccttgagcctacttgatgttaagacagtatagtgttgtattgtgttaagagtcaaaacccatgtgtacttaatcacatgctaagatcacgttggttcgacatataaaatcgagaaagtctgatatgtttctaatttggaattttgtgaaaagtgccttaaactttggaaaagtggttttttgacttttgacttgtgagttgttgtgaccgagcagagaggagaataatagtatccaaatctgacttgtggcacatgatggtaggcttaaagcacgttcaa

SEQ ID NO: 250 - DNA, 2681 bp, Brassica rapa
  source 1..2681: mol_type = genomic DNA
gagaacgattcgggaagtggcagttcaaatcttgtgttgcagctggtaatggcttttgcctcttcctcatcgagtattgttttaagcaaatgtgaattcgatgtcttttctttccatggtgcagacgtacgtaagaattttttgtcccacgtgcttatcgagctcaaatcaaagggcatagatgttttcattgacaacgatatccgccgatcgaaaagtataggaccttttctaattgacgcgatcaaggggagccgggtcgctatagtactgttatctgaagattatgcctcctcaacttggtgcttgaatgagcttgtggaaattatgaaatgtagaagggagttcggtcaaaccgttatgcccatcttttaccaggtcgacccatcggatgtaaagaaacaaacaggcgaattcggaaaggtgtttcagaaaatatgcaaggggaaaacagaggaaaagattcgtcgctggaaagaggcactcactgaagttgcgaacatcgctggtttccatagtagcaattggaagtctgaggccgaaatgatagagaaaattgcaaccaagatctccaacaaactaaatctgtcagtcccgtgttcgtattgcgacggcttagtaggaatagaaagtcacatgacagagatgcgaagcttgctttctctcgattgtgacgaagtgcggaaggttgggattctaggtatggcgggcatcggaaaaacaactatagctagatccctgtacaacaggcattgccaaaattttcagcgtttcgatggttgctgttttctttcaaacgagattgacgaattgaagcttcaaggtatcgatcagctccaacagaaactactgataaagttattggacgatgagacccttgaagtcggcgcctcgctcggagcacacaaagtactaaaggaccgcctgttaaataaaaagttgttcattgtgcttgataacgttgacaataaacaaatcagtctcctaataggggaggcgggtaagcagctgtatcgagatggcagccggattatcataacaacaagagacaaaaagttattggataaagtcgtagacggaacttacgtggttcctaggcttaacgggcgtgaagctctcgagcttttctgctcgaaagcatttggtaatcattatcccaccgaagagtttgtcgatctgtccaacgacttcgtatgctacgcaaaaggcttaccattggcgcttaagctcctaggaaaagggctgttaacacacgatattaattattggaagaaaaagttggaatttcttcaagtgaacccggacaaagagctccagaaggaactaaaatcatcgtacaaggctctggatgacgatcaaaaaagtgttttcttagacatcgcctgttttttccgcagcgagaaggcagattttgtctcttccatattgaaatcagacgatattgacgcgaaggatgtaatgcgagaacttgaggaaaaatgcctcgtgatgatctcgtatgaccggatagagatgcatgatctactgcacgctatgggtaaggaaattggcaaagagaagagtatcagaaaagccggagaaaggcgtcgcttaagcaattgtgagttgcttctcgacatactatctctgttattcgcaaactccgggtcagaatgcttgaagggtgattttaaagcgcttaatgagattaaggctatcaaaggcttccctgccgcattttcgatgctcggagacgatccctgtggggacggtgatttcctaaagtttcatggcagtcactgcagcactcagggagacaaccgagttgtcaccgatcatgaattccaagcgtctaaaatagtagggccatttccgattgctgtgacaaatctgttagacttgatgcggcttgatctccacaacaagctacctggtaaattcgaccccaaggagctgaaagatttatccttgagatggaatcatatcaaggacgttataccaccggaaattggcgagcttgaaaggctccgtcacctagatctgggatttaactcattcaaaggggagatccctaaggaattagccgcattgcccgagcttcgcgcgaaaaatctcgaagagctagacctggaaggtcgaataccagctgagtgtggctcgttacagaacttgcggcatcttgatgccggaaataaccacctcgtcgggaatactagagactgcattaggtttgatggtctattcaagggctttaaaatcaagagtctgaaaaacttaatattgagcggatgtattaaggcaaaagacttccatatcatatctgaagagattgtataccttcacctcgaaaagtttatctgcaatataccgttcgcgattgctcatatccacaaactaatatttctgaacttagatcataatcaattcttggggattcctgacgccttttataagcttaaattcctcaaggagatgtacatcgaaggtaaatccggcgtggagtcactacccacccacaaggttctggaagtctcggatgcagactttgcggtatggtaacgccctagacgatttctacctcctttgatctgttaaatctctcggactgacgaaagagaactttcttcaccactaatctatatttctccttaatcaaaaaaaaaaaaaaaaaaaaaaaaaaaaaaaaaaaaaaaaaaaaaaaa

SEQ ID NO: 251 - DNA, 5238 bp, Capsicum annuum
  source 1..5238: mol_type = genomic DNA
atggaaatcgtaactgctattttgagcccagtcgcagaacacttgatgatactgccagttgcgcgacagattggatatttgttttactataggcgcaacatcaggtctttggaaaatgaaaataagaagctggagggtatcagaagcggggtgcagcacagaaaggatgctgaatggagaaacttacaagtcatgccaccccatgtcgagaattggttaaaggatgttaatgaaactactgctgaggtggcggttttactacgacgtagagctgaggttgaaagaggttgcttctacggttggtgtccaaacttgaagtcacgtcactcgctgagcaggaaagctaagaaaattgaacaggctatgattggtcttcaagatgaaggcacacgttatgctccttcctcctgtccagcaccacttgcagttacagtgatacacagtgatgagtttgactctagaaaacagaaggaggaagaggtcatgacagctttgaaagatgaggggatcactattgttgggatatgtggtatgggtggtgttggtaaaacaacactggctgagaaagtaagagcaagggcaaaacaagaaaggttgtttgattatgttgttgtgctaactatcagtcaacaacaaccagacattaaaaaaatacagcgcgagatcgccgaaggagtcggtctatcattagagggggacgatttgttggagcgtggagatcggctgcgttcaaggttaatgcagaaggacagtcgcgtccttgtaattttggatgatgtttggaagaaggttgatctaaagagggttggaattcccagtggtagcgatcgcaactactggtgcaaagtgatattgacgacgcgtctccgagatgtttgtgacgatatggaggctaaaaagaaagtacatgttgaaatcttatgtgaaaatgaagcatggctcctttttaggcagaaagccggtaattcagctgatgatctctctcttcctgatatagcagaagccgttgccaaagaatgcaaggggctgccacttgcaattgttactgttgcaggagcactaaagggtaaaaccaagcgttcatgggaggatgcccttttagaattaaaaaaagcagcaccaagaaatattcgaggagtgcttgcagatgtgtatcaacctctgaagataagctataatcacttagggagtgatgaagccaaggatgcctttttgctttgttccttgtttgaggaagatagtaatatttggactgaagaattacttagatacggaatggggcttggcatcttttcggaactcgaaaatttagaatgtgcaagaaatagggtgtctaatctgttagaaacattgaaaaattgtttcttgttatcccaagttccaggcaaagattatgtcaaaatgcatgatgtggtccgggacatggctatacatattgcatctgagggtaaccatatttttttggtgagccacaatgtgaactcaaaagagttcccaagaaaagactcttacaagcaatacagtcatatgtcaattgttgcaaataaatttgatgcgcgtcccagaccaatatcttgcccacgattgaagcttctgatgttaaaactccgtttcgaagagggtttcaaattacaggatgatttttttgatggaatgagtgaactcagtgtcataaaactgagtggatatgatcgaaactccattctgccctttccatcatccattcagaggttgtcaaatctgagcacgctttggctgagtaatctaaggttggatgacgtgtccattattggggaacttgtcactttagaaattctcagcatcagaggttctgacttacaggagcttccagtggagatcggaaacttggccaatctaactatgttagagtattggaatactggttacagaaaccgtatgaggatttcaccaggggtcttatcaagactagttcgattggaggaactacatatggtgggagtagaagattgtagttactccaccttgagggagctggaatcgttatcgagattgactgcactgacattagatggatgttccaaagatgtgatttacagtaacttgggcctttcctccaagttgacacggtacgctcttaaaatgggtagacactacacgtttacttcattcatgcaaacttacaacaaggctatctatctagacgtcaccaagggcaccccattgggtgattggatccgcctcctgttgaggaatagcgaatgtgtaagttcaagcggaaaggggtccaagaatgtagtgttcgagttgcagaatgtgaaagatctcaggctgtctttttgtgattcattgaatatccactgtcagaataatattccattccccaaacttgaaaggctgaaagtaaatgggtgtgatcatctacggcatcttttttgtgtgtccttggcttgccctgatgaggggacctctcgaaggacacacatcagacctgacgtaatcaagttccccaatttatattacttggaactgggatttctgaaatgcttcacacactttttcagtgacaccgttgagggcattgagttccctctgttacggaaaatgcatttctggagtttacaaaagttccaaaatttctggcctagagtcaacaatgctatcaccgactcaaatcctctttttaatgaaaaggtttcttgtcccaacctggaattgctacgactctgtgaggccaacagcttaactgctctatgctctcaccaacttccaactgcctacttcagcaaacttgtaaccttgaatgtacttaggtgtggaaaactgagaaacttgatgtctccatcagtggccagaggtcttctgaatctccgaatattactattagaagactgtgaatcaatggaagaagtgatcacagaagaggaacaacaaggagatgaaatcatgtgtaatgaacccttatttccccaattggaagagctgggacttgaaaatctgccaaatctgaggcatttcattttgacaaagcaagctcttgaatttccattcctcagagaagtgcagattcgtaactgccctgaaacgaagatatttgtccaacagagatctgtcagtacatcaagtctcaaaagtgtgaacaatgatgatgagttgaaagttgttgatctcaacaaagcgatgtttaattctaaggtttcttgtcccaacctggaagtgctacgactctataaggctaacagcataagtgctctatgctctcaccaacttccaactgcctacttcagcaaacttaaggaactaggagtagggaattgtggaaaattgagacacttgatgtctccatcagtggccagaggtcttctgaatctccgaaaactatggataggagaatgccaatcaatggaagaagtgatcacagaagaggaacaacaaggagatgaaatcatgtgtaatgaacccttatttccccaattggaagagctgggacttgaaaatctgccaaatctgaggcatttcattttgacaaagcaagctcttgaatttccattcctcagagaagtgctgattcgtaactgccctgaaacgaagatatttgtccaacagagatctgtcagtacatcaagtctcaaaagtgtgaacaatgatgatgagttgaaagttgttgatctcaacaaagcgatgtttaattctaaggtttcttgtcccaacctggaagtgctactactctataaggctaacagcataagtgctctatgctctcaccaacttccaactgcctacttcagcaaacttaaggaactaggagtatggaattgtggaaaattgagacacttgatgtctccatcagtggccagaggtcttctgaatctccgaaaactatggatacgagaatgccaatcaatggaagaagtgatcacagaagaggaacaacaaggagatgaaatcatgtgtaatgaacccttatttccccaattggaagagctgggacttgaaaatctgccaaatctgaggcatttcattttgacaaagcaagctcttgaatttccattcctcagagaagtgctgattcgtaactgccctgaaacgaagatatttgtccaacagagatctgtcagtacatcaagtctcaaaagtgtgaacaatgatgatgagttgaaagttgttgatctcaacaaagcgatgtttaattctaaggtttcttgtcccaacctggaagtgctactactctataaggctaacagcataagtgctctatgctctcaccaacttccaactgcctacttcagcaaacttaaggaactaggagtatggaattgtggaaaattgagacacttgatgtctccatcagtggccagaggtcttctgaatctccgaaaactatggatacgagaatgccaatcaatggaagaagtgatcacagaagaggaacaacaaggagatgaaatcatgtgtaatgaacccttatttccccaattggaagagctgggacttgaaaatctgccaaatctgaggcatttcattttgacaaagcaagctcttgaatttccattcctcagagaagtgctgattcgtaactgccctgaaacgaagatatttgtccaacagagatctgtcagtacatcaagtctcaaaagtgtgaacaatgatgatgagttgaaagttgttgatctcaacaaagcgatgtttaattctaaggtttcttgtcccaacctggaaaagctatatatctattcggacataactgctctatactctcaccaacttccaactacctacttcagcaaacttgggacattgaaagtagaaaattgtggaaaattgagacacttgatatctccatcagtggccagaggtcttctgaatctccgaaaactacggataggagaatgccaatcaatggaagaagtgatcacagaagaggaacaacaaggagatgaaatcatgtgtaatgaacccttatttccccaattggaaaagctgaaacttgaaaatctgccaaagctgaggcatttcattttgacgaagcaagctcttgaatttccattcctcaaattagtggtgattcgtaaatgccctgaaatgaagatatttgtccaacatggatatgtgagtacaccaagtcttgaaattgtgaacgatgatgatgaggtaaaagtagatgatttgaacgaatggatacatcagaggttcaattctaaggaagaagatggaagtgaatctgaatcttctcagggagaagattggaatcgaatctga

SEQ ID NO: 252 - DNA, 682 bp, Arabidopsis thaliana
  source 1..682: mol_type = genomic DNA
tacatgtatatatattaatgttatgctattttcgttatgtaaccaaacaaaagagcttttgagttttggtcgtacaaaaaaaaagaaagggaaaatgaagataggacctgtagggaagcatgatgctagaagcactacaattgtaaactgggacgaaggatctcacgatggcttcatctctcagatttttctatctcatggcgtcgctggaattatgtctatccaattccagttcgtgatggacggaaaactcgttttatccgatcgtcacggtccattttccggcaacatgtttgacgttatagagctcaactatccgcatgagtacataactggaatcagtggagagtattacaagtatgaagccaacaatcctcacatgaggtctctcaaattcaataccaacactagcgagtacggtccttttggcacctccggttcgagcaacgacaaatttgcttttaaactcgggaaatctcctcagttcggcggtttccatgggacttatgatgcctcgggactacagtacattggtgtttatctccgcccaaaaacagttctacccaaaatagatacgggcaatgcagaggaaacagagtcaaaaattgtactgggctgaaagtgtttgtatacgactctattctgctgattgtacattcttaattatgaaaattcttctatg

SEQ ID NO: 253 - DNA, 3741 bp, Solanum peruvianum
  source 1..3741: mol_type = genomic DNA
atggctgaaaatgaaattgaggaaatgttagagcacctgagaaggatcaagagtggaggtgatctggattggctcgacatattgcgaattgaggaacttgaaatggtgctaagagtttttagaacctttacaaagtataatgatgttcttttgcctgattccttagtcgaactcacaaagagggccaaattgattggggaaatacttcaccggttgtttggtaggattccacataaatgtaaaactaaccttaatctagaaaggctagaatcacatttgttggaattctttcaaggtaatacggcaagtttaagtcacaattatgagttgaataattttgatctgtcgaaatatatggattgtctggaaaattttctaaatgatgtactgatgatgttcttgcaaaaggataggttcttccattccagagaacaacttgcaaaacatcgatcaataaaggaactgaaaattgttcaaaagaaaataagatttttgaaatacatatatgccccagagataaatggttatgtcgactatgagaagcaggaatgtttggagaatcgaattcagttcatgactaacactgtgggacaatattgtttggcagtattagattatgtcactgagggtaaacttaatgaagaaaatgacaactttagtaaacctccttacctattatcattgattgtgttagtggagctggaaatgaagaagatttttcatggtgaagtaaaggcttcaaagtttactcaatcaaaaactttcaaggacaagaaattaccaaaaggattttcacatcatctccacaatctgttgatgtatctcagaaacaaaaagctcgagaattttcctaataatatcgctgctcaaaatattgatgtggcaatagagttcttgttggttttccttgatgctgatgtgtcaaatcatgttattaatggtaactggttgaaagaggtcttgttaaaagttggagctatagcgggtgatattctatatgtaattcaaaagcttcttcctagatcaataaacaaagatgaaactagcaacataagtctttgctcaatacagatattggagaagactaaagatctgaaggcacaagttgagacgtactacaaatccttaaaatttactccatctcagttccccacctttggtggattgagctttctgaattctcttttaaggaaactgaatgagatgtcgacatctaagtccggattaggtttcctgatgaaacctcttttagggaatttggagaaagagctatcatctcttacatccattttagagaaggagctctcatccattttccgtgatgtcgtgcaccatgaacataacattcctaaagatcttcagaggcgtaccatcaatttgtcatatgaggctgaggttgctattgattctattcttgctcagtataatgcttttttgcatattttttgctcacttcctacaattgtaaaagagatcaagcaaattaatgcagaggtgactgagatgtggtcagcggacattcctcttaatcctcactatgtggctgctccattaaaacatctgccggatcgacatagcaatcttgtaactgatgaggaggtagtgggttttgagaataaagcagaagaactaattgattatctgattagaggtacaaatgagctagacgttgtcccaattgtaggcatgggaggacaagggaaaacgacaattgctagaaagttgtacaataatgacattattgtttctcgctttgatgttcgagcatggtgcatcatttctcaaacgtataatcggagagagttattacaagatattttcagtcaagttacaggttccgacgacaatggagctacggttgatgttcttgccgacatgttgaggagaaaattaatgggaaagagatatctcattgtattggatgatatgtgggattgtatggtatgggatgacttaaggctttcttttccagatgatggaattagaagcagaatagtcgtaacaactcgacttgaagaagtgggtaagcaagtcaagtaccatactgatccttattctcttccattcctcacaacagaagagagttgccaattgttgcagaaaaaagtgtttcaaaaggaagattgcccgcctgaactacaagatgtgagtcaagcagtagcagaaaaatgcaaaggactgcccctagtggttgtcttggtagctggaataatcaaaaaaaggaaaatggaagaatcttggtggaatgaggtgaaagatgctttatttgactatcttgacagtgagttcgaagaatacagtctggcaactatgcagttgagttttgataacttaccccactgtttaaagccttgtcttctttatatgggaatgttttcggaggacgcaagaattccagcatctacattgataagtttatggattgctgaaggattcgtggagaacactgaatctgggagattaatggaagaggaagctgaaggttacttgatggatctcattagcagtaacttggtaatgctttcaaagagaacttataagggtagagtcaaatactgtcaggttcatgatgttgtgcatcacttttgcttggaaaagagtagagaagcaaagtttatgcttgcagtgaagggtcaatatatccattttcaaccttcggattggaagggaactcgagtgagcttcagttttagtgaagagctttccaagtttgcatctctggtctccaaaacacagaagcctttccatcaacacttgaggtcattgataacgaccaatcgagcaaaatctattaatgatattttctcctgtcagattagtgaattgcgacttcttaaagtcttggatttgagttcttatattgtggagtttttgtcgttagctacattcaaaccactaaatcagctgaagtacctcgcagttcaggcttttgaattctattttgatccaggatcacatcttccccatatagaaactttcattgtaatgaatcttccttattatgatatattgttaccagtgtctttttgggaaatgaaaaaattaaggcatgctcattttggtaaggctgaatttgacaagcaggggctctctgaaggatcctctaaattggaaaatttgaggatattaaagaatattgttggatttgatagggtggatgtgttatcaaggaggtgtcctaatcttcaacaacttcaaatcacatattttgggaataatgaagagcctttttgtcccaaattggagaatcttacccagcttcaacaacttcaactttcctttgcgcgtccccgcactctatccgggttacagttgccttcaaatttaaataagttggtacttgaaggaattcatataggatgtgttattcccttcattgcgggactaccaagcctggaatatctccagttacatgatgtgtgttttcctcaatcagaagagtggtgccttggagatatcacgttccataaacttaagttgttgaaactggtaaagttaaatatatcaaggtgggatgtctcagaggaatcatttccgttgcttgaaacactcgttataaagaagtgcattgacctagaggagattccacttagctttgctgatattccaacattggaacagattaaattgattgggtcctggaaagtatctctggaggattcagctgtgagaatgaaggaagaaatcaaagacactgaaggatgtgatcgtttacacctcgtcaaacaacgctcagattga

SEQ ID NO: 254 - DNA, 7158 bp, Nicotiana glutinosa
  source 1..7158: mol_type = genomic DNA
attttttcacatacagtttcttactcttttcagagaattaacgttgagtccatggcatcttcttcttcttcttctagatggagctatgatgttttcttaagttttagaggcgaagatactcgaaaaacgtttacaagtcacttatacgaagtcttgaatgataagggaataaaaacctttcaagatgataaaaggctagagtacggcgcaaccatcccaggtgaactctgtaaagctatagaagagtctcaatttgccattgttgttttctcagagaattatgcaacatcaaggtggtgtttgaatgaactagtgaagatcatggaatgcaaaactcgatttaagcaaactgttataccgatattctatgatgtggatccatcacatgttcggaaccaaaaggagagctttgcaaaagcctttgaagaacatgaaacaaagtataaggatgatgttgagggaatacaaagatggaggattgctttaaatgaagcggccaatctcaaaggctcctgtgataatcgtgacaagtgagttaaaaacatataagctgaatactttgcattcaaatgagttaaacataatcttaaataaatttttcaattttttggaataaattgatagttgattatatatgtttctatcagttaattacaaactcaataacattattacgtagataaaatttttattagttcttcaaagagtttgatttatgtgcacactctttgtatatatcacaatctttttacttttgtaggactgatgcagactgtattcgacagattgttgaccaaatctcatccaaattatgcaagatttctttatcttatttgcaaaacattgttggaatagatactcatttagagaaaatagaatccttactagagataggaatcaatggtgttcggattatggggatctggggaatggggggagtcggtaaaacaacaatagcaagagctatatttgatactcttttaggaagaatggatagttcctatcaatttgatggtgcttgtttccttaaggatattaaagaaaacaaacgtggaatgcattctttgcaaaatgcccttctctctgaacttttaagggaaaaagctaattacaataatgaggaggatggaaagcaccaaatggctagtagacttcgttcgaagaaggtcctaattgtgcttgatgatatagataataaagatcattatttggagtatttagcaggtgatcttgattggtttggtaatggtagtagaattattataacaactagagacaagcatttgatagagaagaatgatataatatatgaggtgactgcactacccgatcatgaatccattcaattgttcaaacaacatgctttcggaaaagaagttccaaatgagaattttgagaagctttcattagaggtagtaaattatgctaaaggccttcctttagccctcaaagtgtggggttctttgctgcataacctacgattaactgaatggaaaagtgctatagagcacatgaaaaataactcttattctggaattattgataagctcaaaataagttatgatggattagagcccaaacaacaagagatgtttttagatatagcatgcttcttgcgaggggaagaaaaagattacatcctacaaatccttgagagttgtcatattggagctgaatacgggttacgtattttaattgacaaatctcttgtgttcatctctgaatataatcaggttcaaatgcatgacttaatacaggatatgggtaaatatatagtgaattttcaaaaagatcccggagaacgtagcagattatggctcgccaaggaagtcgaagaagtgatgagcaacaacacagtaagtaagctaaataatgcaataatatttaatttctaattttatattctaaagacacatagggcagtcaattccagttatttgttcctcttgcttcatagtcttgacggtacatcattttagttgtttactttagttagtaggagatataaaagtaatattaattacctcattagtaaaaaaaaacattaattgcctaatttgtttagtagccgctttaatttacgttccctaattcgttttttcttatattttttagggatggattagtctagtagccacttaatctgtttgatccaatgtctttctttggattaacttgaaaattttatgacattatatataataactcaatcattcattcactttaccattattattttttatataaagttacaatttattggtactgtttcagttacaattactttccaacatggaaaacttataaactggactccaataaacttataagaaaaatgtaataatagaaaataaaattatataattaattacaaaaaagtatttttctgaagtaacatcagtatttcttaaaaagaatccaattaacattgtatcttaaactttggtattgtaaggcgtgagaaagtagtggccttatttcaatttgacgtgaagaatagaatgccttttaacgacataagggaagggggcaagaataagtttctattcagccgggctcgaagcagaaggtagaacgtaatatcttttgttggttcagctcatcaagctattacaaaagagtccgctcatattaacaaacggagtttatacgacatttgaaattatactttgtagactaatgatcttcttgttaccaggggaccatggcaatggaagcaatttgggtttcttcttattctagtactctacgctttagcaatcaggccgtgaaaaatatgaaaaggcttagggtatttaacatggggaggtcgtcgacacattatgccatcgattatctgcccaacaacttgcgttgttttgtttgcactaactatccttgggagtcatttccatctacatttgaactcaaaatgcttgttcacctccaactccgacacaattctctgcgtcatttatggacagaaacaaaggtacaatagcttgaattctattttgttgtcatttatttttctctctaactatctttgtcctttaatttggtgataatgaacaaatattattgttttttgttatgaaacaataaaagaagaagaacaatattgcagagaaagagggagatggaattcttattgaattttggggcgatttacaatggggtaagacccctctatttacaggggaaaaataacttagcctcaaaataaagctctttaaaagatagacattcactctaaatagaattctattataacacttttggcgtacttccttttttggctagaattatgatacatgtctttaaatgaacagaagttgcttttgtaatttatcaggacttatgttgaaacttatgaaaattgttattgtttatgttgtctaatactaaatataaaatacaataatattttatcgtaattttttaaaaatttgtcaaataatgcaaatgaaaaattaaattttttggtcctttaaaaatttgagaatgaaaaagtacgagttatacttcctaaaagtttgatagtgaataatatgtaaaatttaaagaatgactaatattggactaatactttaaaacaaataacttaatatacaaattatagcgagacattttcattcgttgtactgaatgcaagaaagaaaggaaaaaaaaactcatttataatatagtttgtcttctactattttaccttattgcttcaaatttgtattttatcgattttgctatatcttatgatttttttcacggtcaatattcttcttacaagaataaattttatatacctcaagtgttttgtcaatttgataaataatttttcttatatgatgaacttgtaaaataatagaattggattcttttgctaattagttaattcaacgacttaattatttattctcaacattaaaggaaataatttagtttttattaattcaaactcttagtatttgctcattctaattttcagtccaataagaattcaattttcaaatagtaagaaaagtcatatattttgaattttatgttttccgaagcattgtttgtttgtttaactctacgggagttttctaactcacattttgtataataaaattttttgagtagtagttcagtacaactctaatattaatgggctttaaataaggaaatatatattacgtaaaaatttaaatcattttaaagttctttcctaccaagtaaataagggaaaatttaataacaaaaatttagttgattttaaaatcctaaatattagaaaattaacttaaaatataatttcgtctagtgtaaaatttatttttaaagggtaaaaaagacgaacgacattaagagcctttgtaattttaatatagtataaatataaataatttacctttattcagtttcttaacaagtaattttccatatataaaaaataaatttctatattcacacaaaaataatgtgttggccctcgtaattcaaatactatcattcatttcttgtcgagggagtagtaaatacttttaggaaagttagcaataagtaatcaagaaatcaagaaaacagaggtcatttgatgcccacaaatacaaatgaaaaaacaaaacaaatgttacgaaacaataaaagaacaagaatagcctcaaagtaaaactctctgatagacatttactctaaatagaattctatttataacaatcaaaaagtttctacatttatagatagctccactagccaaatattttattattggaatcagcaaaataggttgtttctttttttattctcattctgtctgtgttctaaacagcatttgccgtctctacggaggatagatctcagctggtctaaaagattgacgcgaacaccagatttcacggggatgccaaatttggagtatgtgaatttgtatcaatgtagtaatcttgaagaagttcaccattccctgggatgttgcagcaaagtcattggtttatatttgaatgattgtaaaagccttaagaggtttccatgtgttaacgtggaatctcttgaatatctgggtctaagaagttgcgatagtttagagaaattgccagaaatctacgggagaatgaagccggagatacagattcacatgcaaggctctgggataagggaactaccatcatctatttttcagtacaaaactcatgttaccaagctattgttgtggaatatgaaaaaccttgtagctcttccaagcagcatatgtaggttgaaaagtttggttagtctgagtgtgtcgggttgctcaaaacttgaaagcttgccagaagagataggggatttagacaacttacgggtgtttgatgccagtgatactctaattttacgacctccgtcttccatcatacgcttgaacaaacttataatcttgatgtttcgaggcttcaaagatggagtgcactttgagttccctcctgtggctgaaggattacactcattggaatatctgaatctcagttactgcaatctaatagatggaggacttccggaagagattggatccttatcctctttgaaaaagttggatctcagtagaaataattttgagcatttgccttcaagtatagcccaacttggtgctcttcaatccttagacttaaaagattgccagaggcttacacagctaccagaacttcccccagaattaaatgaattgcatgtagattgtcatatggctctgaaatttatccattatttagtaacaaagagaaagaaactacatagagtgaaacttgatgatgcacacaatgatactatgtacaatttgtttgcatataccatgtttcagaatatctcttccatgaggcatgacatctctgcttcagattccttgtcactaacagtatttaccggtcaaccgtatcctgaaaagatcccgagttggttccaccatcagggttgggatagtagtgtatcagtcaatttgcctgaaaattggtatatacctgataaattcttgggatttgctgtatgttactctcgtagcttaattgacacaacagctcacttgattcccgtatgtgatgacaagatgtcgcgcatgacccagaaacttgccttatcagaatgtgatacagaatcatccaactattcagaatgggatatacattttttctttgtaccttttgctggcttatgggatacatctaaggcaaatggaaaaacaccaaatgattatgggattattaggctatctttttctggagaagagaagatgtatggacttcgtttgttgtataaagaaggaccagaggttaatgccttgttacaaatgagggaaaatagcaatgaaccaacagaacattccactgggataaggaggactcaatataacaacagaacttccttttatgtaagtctctacttctattagctacaaagtcttcttccaaaatcaatactccatccgttccagtttatgtgaacctattttttgttcgtccattctaaaaagaatgacccctttctaaatttggaaataattttggttaaacttataattctaccattaacgagaagcttttataaccacacaaatattctggggccctttttgaattgtttaggaccataaattccaaaagtcctcattttttcttaaactccgtgcccaatcaaacaagttcacgtaaattggaacggagggaatatattttttcttctcattcttttcccctatttacaggagctcatcaatgggtgatgtacatatcaacaacgagttttaaaggattccaacaagtataactttttatgctcaaatcagctccttgtattgtggagaaagctgagtacgagatgaagttgacgtccgttatcctttatgatctctctgttctttgtgttaacttgcctacttcatcagatgaataacagaagcccgttcctctcattctcaacactgtttgcacgtctgttgttacttgttaaaatggatcttgataaagtaataacatctctatattacttataagtggttttaacaagttcactcttttgcttttgcagttcaaatgggaacacaatgtatattgagaactagaacaatgacactgcatatatatatatatatgtatgtatgtaattctcgtcttttggactagaataccttgtttcattatgaaatgaattaacatcttcgcctttgctgac

SEQ ID NO: 255 - DNA, 9837 bp, Solanum lycopersicum
  source 1..9837: mol_type = genomic DNA
ggatccttctcatttttagattacaagttctatactcttgttctttatagaatatttcaattgtgaattgtaatagttgaaataagttctaagtttaataaaatttgaggaaataattcatcaattaacactcatattttctttctactattttcatcacatacatacttcaaagatatatcattttataatatcaattctaattagcatgagaacacgtgcaagagacacgtgttcaacaactaatattactaaaagtgggaacaaaaaaaattaaaatatcaaaatcatattttatttagttatttaaaggtaattttatttttattcatgatatagtgatgttcatattataatactattattgattactttcttttagggggtaaattgtatggcatggaaaaaaaatattttcagagatgatgattcttttatcattagaaaacttatattagattatttatacttgtatactcgggttagaagttttgtgttctatgagtttctttaatcatgtttgtaattatttcaaagtattgatatatttttataattttgttttactatgttattatataatattgtagagaaaatgatcaaatgccccctcaacgtataactggatttccaactacacacttaaactttacgagagtcctatcacccccctgaactatttaaaaatgaaataattatacccttaaaaaagtcataaccagatctattttcacgtgtttgacacgacatcaaattattattatttttagggataatgcccaagtaccccctcaacctatgcccgaaatttcagagacacacttatactatactaaggtcctattacccccctgaacttattttattaataattttttactcctttttagcctacgtggcactatcttgggggcccaacgatggttgactttttttttcaaactagtgccacgtaagctaaaaaggggtaaaaaaaattacttataaaataagttcaggggggtaataggaccttagtatagtataagtgtgtctctgggatttcgggcataggttgagagggtacttgtgcattttctcttatttttaccatcactagaacaccataagtccattattgggtctttgaggaagaaaagtgaataataatttatagctcgttcagagatatttgaattttgctcatttgatacctaaaattaactttaaaaaagtgagggggggaggtggggggttagaagacgaatattgtcattaatgatggtcaccgaagataaacaatgctctcaaggaagatgaggaggagcaacctatgatgtctgccacatcatcttctatggcgacaacaatttcaaatagggagagagattctacgatatttgatggattaactagattaatagctaaaattttgtagatataattgattgattgagatttgatattctattagtaaaaaaaatatttttttggttggtccaatcggagtcaaagtaaaacccatattgattttctcaaattaggtccaaagtatcctgaggtaatataaatatatgtaaatttatctcaattgattttggatgattggtaatcaagagttttatatgagttcgaaaatttattttgaatcagaaatagtcaatccggtgaagatattgatggcaacaagacttagaggtggtgaaagattgagagatttgttaataaggaaagggccaaaaataccctctaactttaatttattgattgactttatcccatccgttaaaatgaagttatttataccctcgcctttaacaaacttgtcatttctaccctccaaattaacggttgccctaaattgaccccaaatcccaatttcaatttaaattacccatttgaaattgatttcctcttttaaaccggacccaataaacttaataacattggtgaaacttcaaactttcttcccaattttgtcaaaaacagagattttacacaataatatacaactcaatatacataaaccaacaaaaatgaaaatgcaccattagaggaattgaatagctattgccatggtacaaatcgtttctacatagatgataccaaataaatgagagaacaccattacattatttggtgctgttttcttgtactccgacaacccacaacccttgagcgatcccaatggtgacaaacacaactgaagaacttcttgcagatgcacattatctccgggcaacgatgacgatcaaaaagcaagaggacgaaacccttctgcctcaatgtttcacctcttcttctgcaccatattttcttcgatattccctactttcaatcttttaatttttcgccattgatttgaaccaatagcccccaatatttcaattttttgatcttggaaaaccatgttggtaattggtagaagacagcatcgttcaaatcgatttgtgtcgattcgttggaatcagaggaaaagtagtaagaatggaacgtaccagttcgtcggaaccggaggaatattaataaaagagaagaaagtgaacgaagagagttatccttaattgagatgattctggtaacttttttgtgacgattctggtaacctttgatggagaaataagaagtcattgttcaagttattgagagagaaagaggagatgctttgttgttatttgtttactataatgggtcaggttggattgagtttgggtaataaatgatatggcaattttatttgaaattgggatgatttttattgatttgaggctttccctctaaagaagggtacatatgacaagtttttttcaacggtaaggatataaataacttttttttaatggtaagggtaaagttaaccagtaaatcaaagttgatgaagaagaaagattacaaataagaaaaataaataattgaaaatgcatatatttattgaaagagatattaaaaataaagttttagtaatagattttgatgttcactctccaaagagagtgaaatacactaactatgccagctaagcattcagggaggtaattatttcagttttaaatagtacagagggtaataggactcccgtgaagtttaattgtgtagttgaaaatccaaaaatacattgaggtgacattcaatcattttctaaatattaaaaatttaaagatccataaggggcttacaccctactcatggcttacgtcttgccttttactaagtaaattgtccaagagttgctcaagcatattagtggcctaaagcaaaaatcacttattaataatttttatataattgatttcttctagatttcaattgataataataccattgttattttaaattatttttcatgagatataatattccaaatatgtcaaatttcttttaataattccttcatttcatctaataattccttcatttcatgaaaagtttactttttatacaaataatattcaatattttttttaaaaaaatactccttataacctattattattaaatatgaaacccttaagttttggggtctaagacacatgtctttttttagcactgtcgagtcacctctaaaattgtctcgccttacgcgcgtgttcgttaaaacactgcgcagaatgattattataaaaggaagtgttatttgtagttttgatgatgtgacaaactcagagaccttgtaaaggtaccaggttctcaacatgagttttgatgatgtgatatactcaggaaccttgtaaaggtaccaggttcccaacatgaatagcctgttgactgccagccggagaaggtacagaatgggtgcacatttaccaatggcgtgagaaaagtcagaccttttcaacaaatggcaagagtttaaggaaagggacttgtctatacaatgtcactttcctaaacatcattccttagtttttgcaacttgaaaaagtactctcacgaacatttgcaaaggctatagaaaatccaagtgaagaattattcaaataacaactgaaaattcagaagcatatcgtgtagttgtttgagaatatattcttgtggtcttacattgtaaactgttcctaaatctataaaggaatcagtgtggtggtgttgaaattctaagttgtcttgaagggatagcttagtgggtagaataacttctacttatgcttatcaagcaaaagagttattgcttgatcgtgagattaaaaactttctctcacatttgtgtaactggttttacttttacttgcgaattttagtgaaacagttgtgaaaatcctgtgagacaggtcgtggttttactctcttaagcaaggaggtttccatgtaaaattattgtgttgtcaagctgcatttactttctgtttatactttgtgtgtcaagggacctggtccattgactgataagtagacgcataaattctaacagtaagatacttctcctttttctttaatacaagtaatgtaatttatctctaagaaaatataaaagttcaacaaatgaaagggcaagtatgaaaaaaataataatacaaacttacctcttcaattttaaacaatgattggtataaaaagatgctgccccacgttgtctctctctttcttttttatcgttcacatttttaggaaacttgggctacagcaaaagcaaaagtcattactatactcatttttttgtagctacttaaaaaagagaagaaaaaaatggctgaaattcttcttacatcagtaatcaatgaatctgtaaaaatagctggaaatctactgattcaagaaggaacacgtttattttggttgaaagaggacatcgattggctccagagagaaatgagacacattcgatcatatgtttgacaacgcaaaggcctaggaagttggaggtgattcaagggtcagaaacttattaaaagatattcaagaattggcaggtgatgtggaggacctcttagaacgtatagaactttaattacgtaatcaatttttgttgtttgattttatagatttagacaatatatatataattatttatcgttcaacaaagaagacgattgtgtattcgggttgttcatgaatttcaacttttactatttcattttgaattttttggttagtcatttctatcaatttgcttaggacacctgtgcggaattgttatactactccctttatttcatattacttgaatttgtgaggcaatgcctatatatattaagaaaaatattcaaggacataatttaaatcatgattctattattttcctttgtggaatcataaatataactttgtaagtagtttaatttatctcctaaagcgtacagaacttcaataaataaaaggacaaatatggaaagaatttcaaacatccttcttaaactttgaacaattcaattattatgaacaatgcaaaaacttcaaaaattcactttaatataaaataaaggtaatataatataacatgattttttttttaaaaaagaaaaacatatttgttacatatcactgttgggactcgtcctagggcaaaactctggcaaaacgcctcgagactgaactttgggtcttagttcggtaagaatcacgccctaaactgcagattgtacgtcctaagtacgcccaacacccaacgttcggggctcgactaacatatcttatacaaagtaattatgtgttaaaatctgtatagttaacatttttgaccctcatagttcttgaataaatgaatgatacttaataatttttaaatctgtagagataatagtaactcaaataattagttgtagtatcacatttttactattttataacaatgtaaagatgataatataatatgtaacatttctttcaaaacatatagcaaatttttactttttcttgcttattattgattttcttggttttgtcatttgtgtcaaaactatcctattttatttaactatttgaaaataattttattttgattcatgatatagtgatatttttattataataatattattgattattttcttttagggggtaaaaattttaacatcgatagggcgctcaaagcttacgccttgtacttaaagacgcccccttgacaagactgcagcgagtgattgtcatagaaaaaagaaatttctcctttttcattaatgtgcagctgccccacgttgtcactccccttcttctttatcatttccttcttgacattattaggagacttggccgtggactccatctaccactaaaaagctaaagccatcagtatactcattttttggtagctactgaaaaagagagaaaaaaaaatggctgaaattcttcttacatcagtaatcaataaatctgtagaaatagctggaaatttactgattcaagaaggaaagcgtttatattggttgaaagaggatatcgattggctccagagagaaatgagacacattcgatcttatgttgacaacgcaaaggccaaggaagctggaggtgattcaagggtcaaaaacttattgaaagatattcaagaattggcaggtgatgtggaggatctcttagatgacttccttccaaaaattcaacaatccaataagttcaattattgccttaagaggagttcttttgcagatgagtttgctatggagattgagaagataaagagaagggttgttgacattgaccgaataaggaaaacttacaacatcatagatacagataacaataatgatgattgtgttctgctggatcggagaagattattcctacatgctgatgaaacagagatcatcggtttggatgatgacttcaatatgctacaagccaaattacttaatcaagatttgcattatggagttgtttccatagttggcatgcccggtctggggaaaacaactcttgccaagaaactttataggctcattcgtgatcaatttgagtgttctggactggtctacgtttcacaacagccaagagcgagtgaaatcttacttgacattgccaaacaaattggactgacggaacagaaaatgaaggaaaatttggaggacaacctgcgatcactcttgaaaataaaaaggtatgttatcctcctagatgacatttgggatgtggaaatttgggatgatctgaaacttgtccttcctgaatgtgattcaaaagtcggcagtagaatgataatcacgtctcgaaatagtaatgtaggcagatacataggaggggaatcctccctccatgcattgcaacccctagaatccgagaaaagctttgaactctttaccaagaaaatctttaattttgatgataataatagttgggccaatgcttcacctgacttggtgaatattggtagaaatatagttgggagatgtggaggtataccgctagccatagtggtgactgcaggcatgttaagggcaagagaaagaacagaacatgcgtggaacagagtacttgagagtatgggccataaagttcaagatggatgtgctaaggtattggctctcagttacaatgatttacctattgcctcaaggccatgtttcttgtactttggcctttaccccgaggaccatgaaattcgtgcttttgatttgataaatatgtggattgctgagaagtttatagtagtaaatagtggtaataggcgagaggctgaggatttggcggaggacgtcctaaatgatttggtttctagaaacttgattcaacttgccaaaaggacatataatggaagaatttcaagttgtcgcatacatgacttgttacatagtttgtgtgtggacttggctaaggaaagtaacttctttcacaccgcgcatgatgcatttggtgatcccggcaatgttgctaggctccgaaggattacattctactctgacaatgtcatgattgagttcttccgttcaaatcctaagcttgagaagcttcgtgtacttttctgtttcgcaaaagacccttccatattttctcatatggcttattttgacttcaaattgttgcacacattggttgtagtcatgtctcaaagttttcaagcatatgtcactatcccaagcaaatttgggaacatgacttgcttacgctatctgagattggaggggaatatttgtggaaaactgccaaatagtattgtcaagctcacacgtctagagaccatagacattgatcgacgtagcctcattcaacctccttctggtgtttgggagtctaaacatttgagacatctttgttatagagattatggacaagcatgtaacagttgcttttctataagctcattttacccaaatatttactcattgcatcctaacaatctacaaaccttgatgtggatacctgataaattttttgaaccgaggttgttgcaccgattgatcaatttaagaaaactgggtatactgggagtgtccaattctaccgttaagatgttatcaatatttagccctgtgcttaaggcgctggaggttctgaagctcagtttttccagtgacccgagtgaacaaataaagttgtcatcgtatccacatattgctaagttgcatttgaatgttaacagaacaatggccttgaactctcaatcatttcctccaaatctcatcaagcttactctagcctactttagtgtagaccgttatatactggcagtacttaagacatttcccaaattaagaaaacttaaaatgttcatctgcaagtataatgaagaaaagatggatctctcgggcgaggcaaatggttatagctttccgcaacttgaagttttgcatattcatagcccgaatgggttgtctgaagtaacgtgcacggatgatgtcagtatgcccaaattgaaaaagctgttacttacaggattccattgccgaatcagtttatcggaacggcttaaaaagctgagtaaatgaacatctcaacaggtcagtttgctagtataactatttacgtacaggggtgcatcacagcaacgtgagtgtagtagtgttgtttcttgttgtggttgtttgttggttgttcagatctgaaagtgtgaagctcattagaacacgtctcatagtgatattaaatttacttttaaacaataaaggcgtgtaataagtcattgtaataattaaatcatgtaactgatttttcacgagagaaaatttatgtcattttcctttgtaaagataaagtagtcattggttccaattgtaagattaaatacttgaatacataatatcaggattttgaacacgataatcttacatagaaatcattaggggaacatacctgatgaggaagacatcttcacacacaaaaacgaaagtgttagtcgtaaattgatttctacctccttttcctaactttatgttaccacaatcgtcagcgatagaattattctagagaatatgtggttaactctagtgggtggagggaggaccaattcatagaggttgtgatttaatctgatacgtccatcaattaaccaatgtacggacgagatctattacttaataaatattatttatgatattacttggattacgactaaacttgggtcataagtaagaaataattaataataattcttacagtctcccacttggcccaataaccatatatcattaatatttaataaatattagttgcgcatacaatagatctcttctataatgtcaatcatgcataccacaatatgacaaactactaatgcgagttttgacggttgcacataaattttaagctacatacttccttccatatactactacattagcaacttatcatactaggttcataaggtataaaaacatataacattacggtccacaataatgcctcatataaactcatcttgtaatttctcaaaacaataatgtgtacaccattacgagaaacaagatgttcagaaacacataatttgagctc

SEQ ID NO: 256 - DNA, 3947 bp, Capsicum chacoense
  source 1..3947: mol_type = genomic DNA
tggtggtgcatttctgtcttcagctttgaatgttctctttgataggcttgctcctcatggtgatctgctcaacatgtttcagaagaataagaatgatgttcgactcttaaagaagctgaaaatgactttggtcggccttcaggttgtgttaagtgatgcagagaataagcaggcatcaaatcaacatgtgagccagtggcttaatgaacttcgaggtgctgtggacggtgctgaaaacttaatggaacaagtcaattatgaggctttgaggcttaaggtggaaggtcggcatcaaaatcttgcagaaacaaacaaccagcaagtaagtgacctcaaactgaacttgagtgatgattattttctcgacataaaggagaagttggaagaaaccattgaaacattggaggatttgcaaaagcaaatcggtgaccttggcttacagaagcatttagatttgggtaagaaactagaaactagaacaccttcaacttctttggtcgatgaatctaaaatccttggtagaatgattgaaaaagagagattgattgaccgtttattgtcaagtgattcaaatggagaaaatctgactgttgtccctattgttggaatggggggcgtgggcaagacaacacttgctaaaattgtttacaacgataagaaggtgaaagatcattttggcttgaaagcttggttttgtgtttcggaggcatatgatgctttcagaataacaaaaggattacttcaagaaattggatcattcgacttaaaggatgacaacaatcttaatcagctacaggtaaaattgaaggaaagcctaaagggaaaaagatttcttgttgtccttgatgacttgtggaatgatgactgtgatgagtgggatgacttgaaaaatctttttgtacaaggagctatgggaagtaagatccttgtgacgacacgtaaggaggatgttgccttgatgatgggtaatggggcaatcaatgtgaagactctgtctgatgaagtctcttgggatctattcaaacagcattcattaaaaaacagggatccggaggaacatccagaacttgaagaggttggaaagcaaattgcagacaagtgcaaaggattgcctttagctctaaaggcacttgctggtattttatgccgcaaatcagaggtgtacgagtggaaaaacgtcttaagaagtgaaatatgggagctgccaaggcgtaagaatggtatattaccagagttgatgatgagctacaatgatcttcctgcacatttgaagcgatgttttgctttttgtgcaatatatcccaaagattataaattttgcaaagagcaagttattcacctgtggattgctaatggtctggtacaacagttgcattctggtaaccaatactttaatgagttgagatcaagatcattgttcgaaagggtcccagagtcttctgaaagatacggagggaaattcttaatgcatgatcttgtcaatgatttggcccaaattgcatcttcaaaactttgtgtcaggttggaagagtgccaaggatctcatatattggaacaaagtcggcacacgtcgtattcaatggggagagatggtgactttgagaaattgaaaccgctctctaagtcagagcagctgaggacattgcttccaatctctatccagttcctttaccgccctaaactaagcaagagggtgctgcataacatattgccaagactaacttacttaagggcattatcattgtcatgttatgcgattgtggagcttccaaaagatttgtttatcaaatttaagctcctgagatttttggacctttctcggacagagattacaaaattgcccgattctatctgtgcgttgtataacttggagacacttctcctgtcatcttgtgatgatcttgaggagctaccgcttcagatggagaagttgatcaacttgcggcaccttgacatcagcaacacttctcgcttgaagatgccgctacatctgagcaagttgaaaagcctccaagtgctagtgggagccaagtttctactaggtggcccctgtggttggagaatggaagatttgggtgaagcacattacatgtatggatctctatcaattttagaattgcaaaatgtggttgatagaagggaagctcagaaggcgaagatgagggataagaagaagaatcatgttgagaagttatcgttggagtggagtggaagtgatgcggacaattcacaaaccgaaagagacatacttgatgagctacgtccacacacaaaaataaaagaagtcgaaatctccggatatagagggacacagtttccaaattggctagctgatgattcgtttcttaagctgctagtacaattgtctcttagcaactgcaaggactgtttttccttgccagcactaggacagcttccttgtttgaaattcctttccattagaaagatgcatcgaataacagaggtgatggaagaattctatggtagtccgtcctctgaaaagccttttaacactcttgagaagcttgaatttgcagagatgcctgagtggaagcagtggcacgtactagggaacggagagtttcctgcacttcgggacctttcaattgaagattgccccaagttggttggaaatttcctcgagaatctttgttctctgacgaaattgagaatctcaatatgtcctgaactcaatttggagacacccatccaactttcaagtctaaaatggtttgaagtttctggttcttttaaggctggatttatttttgatgaagctgaactgttcaccttaaatattttgaattgcaactctcttacctccttgcctactagcactctgccgagtacgttgaagacaatatggatatgtcgttgccggaaattgaaattggaggcaccagatagtagtaggatgatttctgacatgtttctggaggaattgagactggaggaatgtgattctgtatcatcaactgagttggtcccaagagcacgcactttgactgtgaagaggtgccaaaaccttactaggtttttgattcctaatgggactgaaagactcgatatttggggttgtgagaatcttgaaatattttcggtggcatgtgggacccagatgacgtttttgaatatccactcttgcgcaaagctgaagcggctgccagaatgtatgcaggaactccttccatctcttaaggaactgcatctgtggaattgtccagaaatagaatcctttcctgatggaggattgcccttcaatttacaactcctcgtgatcaactattgcgagaaactggtgaacagtcgaaaggagtggcgtctacagagactccattctctcagagagttgttcatccgccacgatggcagtgacgaagagattgttggtggtgagaattgggagttgcctttctctattcaaaggcttaccatagacaatctgaaaacattaagcagccaacttctcaaaagcctcacctctcttgaaactctagattttcgtaatttacctcaaattcggtcactgctagaacaagggcttccctcctctttttctaagctatatttatacagccatgatgagctccattcactacaaggtcttcagcacctcaattcggttcaaagtctattgatctggaattgccctaatctccaatctcttgcagaatcagcgttgccctcctccctctctaagttgaccatcagggattgccctaatctccaatcccttcccaaatcagcatttccctcctccctctctgagctgaccatcgagaattgccctaatctccaatcccttccagtaaaagggatgccctcttccctctctatactatctatttgcaaatgcccatttctcgaaccactcctagaatttgacaagggggagtactggccagaaattgctcatattcctgaaatatatatcggtcgcactatgt

SEQ ID NO: 257 - DNA, 18284 bp, Solanum tuberosum
  source 1..18284: mol_type = genomic DNA
tgcgcaattcttactgttttataccttttctccctctcttcctctccatcattttcagccttatggatattattgttatgttcctcatgagtatcaacatgcatattcttttctccaaattgttgttcatctcttacaatattattatcataaatttcaccaacattcgtatgatttcggccatttgcttctagaccttttatcgatttctccctttgtattttttctctcaatacaagttgccataagtatttcacaatttccttgttgaatggattttccaagcaaaaataagctccattttccaaagcgttcttggctaagagtctattgagtttatcacctacaactgcataattatattgagaagttaaaaattaaaattaaattatatcatacattatgagaatagttaatttcacacatatatttactgaattttatctgttatgacaacaactttgttatgaaacaatcatttatcatataactataactaaaaacaagattaacaatggatagatgtcgtctcttgacaatagattaacgataaattttatagctaattatatttttgtggtgtattaattgaaacaactgactttacccaatatttataacaagaagtgaaaaatagaattataaatacttaccaagagagattatatttaaggttacagcttgtgtcaagagttcaaaacaatgtaaatctgatgaattgacatcgattatcatcatgtcaatttttttcttttctttggagagcattgacattgccgcaggagtcgtaactgtcgtaactgtatatatccatacattttaaagttaaagttagtgaagaacatgaaaaaaatattatacacaaagttatcatttggatatgtttatttaatttctcattcaaattcaattatgaaatttcatattatgttgctatactttaatttatgaaataacacatattaatcaacttatatcgtaaacggtgtgtgtaatgacccgaaaggtcattttggtaatttttcgtggaaatgactattttgccctttcggtagttgccccgagtcccatgttttatggttgtaaagttagtttgaggaaaagttggtaaaaagttgagtttttgagaagttgagtttttatgagttaaagttggttaaaaagtgctttttcgagttatttggagtttcgggactcggattgaatttccgtcgattccggcaattttagaatgtcgaaacgggtctgtgtgaagttacggagttgaatttggagttgaaacgaagaattgaggtcctaagttgctaaagttgtgaaattgtgataaagagttgactttggtcaacatatgaggttccgaggctcggattgaaattccgaaagtaccgttggtttcgggaggcgattctaagtctagaatgagtcttggttgaatttttagacgctctgtttgagtttcgaattttttttgcgttaaactagtttcttggcatcttattgaatttcgggtcaaggagtcctcgaattcaaattccgacggttccattgagtccggaacgtcgaatttagtgggggtacatatttagtttgtgtgcacgagattccgaacgaatcccgagggtccaacggggacttaaactttggtgttattgttgtgtttcagctgcaatagcagtcctttttaagtcaaaaaacagtagccattttcccccaacttgaaaaatatccatttctacatttttagactttgagagctcgaaaataggtgatttcaagtgggttttcacaaggaattcattgggtaagttatttccaacttatatctttgatttccatcgattatttatggattttaacatcaaaatttgagatcccaactgaaaaatttgggggtttttgcctagtccgaatttaatagaaaatttgagtttgtgaactcatttcaactcctttttcgaaacggttttcactattggattctaaatttcttggggaacatttttcactaaaaatttccagatttcgagaatattttttcggaacgagttttttttgaccattttacccttttctccaaatttcacgatattggtgttgttagattcgtattgattgtgagattccatttatgaatagattgtggtgatttggagcgtgctcgaaagggtaaaactcaaatttgagttactagttgaagtgttttgaggcaagtgacttctaaactttgttaaactcttagactacacatgactactttcctaattgtgttggggagtaatggggattgaggatgggttttatttgttgattgaaattgttgtaaatgaaagatggggaataaaacgagctaagtgtgttatatgtgacttgaatttgttgaataagtcatgtgataaccgatattgaggggatagaagagcatgagtaagctatgattgatacagacattgatgttgagacagatgatgtgtaatactatgatatggttgtgattgagacagacgatgtgtaatactatgatgtggtcgcgatatggttgtgattgagacagataatctgtaatactatgatgtgatcgtgatatgattgtgattgatgacatgtgcatattcattattcatctcatgtgtgaactatctgttgcatgagttctgagacactgatatgaggatggatggctatgagacacagttgagactagctccggctagagatatatgagatggactagctccggctagcgatttggatgccgatgggatctggttccggcggtgatacatggtccatgtgtggcccccatgggttctgatttgagtattcagcgcggactgattacgtcaacagatatgtatcgtaggacagacatgcatcatgactatatgacattattattgcatttgcatcgcatttgacttcatctttgtctgtggtgtgtggagtttacctatttgcccctcttcatgtgatatatgatctatttgctcttacatgaggatatgaggttgatgttgagacactgttggatatatctgttgattatgaattgtgtagtataggttgttggttcgctgttagaatgaagtctcggtggttcggttgggattgaaaggagttgtttgtagctgctagtttagcttagtttagtgttacttgcgagtacctgttgcttttggtactcacccttgcttctacacagtggtgtaggttgacagctctatcagattcgacttattactcatcttcaaattagagcttccagacttacttgagaggtagcggttcattccagacgtgccctcaagttatctatatttattgttttgttctattatagaactttactatgagacttgtatattttattcagattccgtactagaggtttgtacatgtgacaaccaattctggggtttcattgagtttatttaaagacttccgcttatctttctatcttattcttgttttattaattccgtatcgtcgggtttttgggtgttaggcatcacatccggttttggagtgtgacagtgtgtgcaatcttactaatatataatattactttagagtaactaactgtaggaatatataatagagaagattctataggaataattctaaagaatacattctaatttattctttgacttgttgaaaacaaataaacactgaatatatattagattaaatactattaaagcaagatataataggataaaaagttttaagataaatttatgtaaaaagttttaaggttattttatttcataaataagtaacgagagtttaggagatttaacaaattattagaaaggagttaccaaaattatgttgaaaaggtttaacatagcttgattaaggaacaatcgatattaaatactaacaaagtaattgaaaatgaaacaaaaataaatgaggaaaaaatcacatgaaaagatttttcttttcttgtctacatctaataaaagacaaaaaagaaattgaagaaaaaaatcatgaaaatcatatgtccctatttatttgtttgtctacatcgaataaaagacaaaaaagtcatctcagataataatgatagtcagatcatctcttatcatgtctttatctcgctcctctctgttgggttctaaagggtgattagggcttgcaaataatatgattgataaattagttgacaaaaacttatactaaaaactaatattattatatgaaaactaatataaagaaaaatattaaaactgttgagagattaaatctccccataaacaaaactcactaaacgactacattgtggattctattatgttgtgctatgagaatagggatcttcaatttatagatctccaaatttttcctctaaggaaagaataaaccaaatatggaagaaaattatatttttcttttagaaaaagttcaagcatttatggtaatactttgacttttctttaaagaaaaaataaacttcaaataagataagaaaatcagggcaaaaccctaacactctcttcgatcccttactcttattttgtgcctcaatcatccaagtgaatttgttttctttctaaaacgatatatagatttgcaaaaatcaaagatctgtaatttcaaaatcatttatgagggacctaattattttctcctccaacacgatgtcactctaggccgattgacaaagaataagtttcctttttattttttgtacaaaaaagtcaagtgtgaaataattaatataaacttaaactacctcctttatggaaaaatatccgataaaattagaacaacacatactttaacataaaattattgaacctcttaaaaattacacaatcgttatggagaaagctaatcgagtatgtgacatggttataacaaaaacaaaaatggagaatctaatttaattccttataatcatacaaaattcatttattaacttgtaaaacaacatacacaagcatagaaataatgttatgataacaaggaaaggaaaagttctcaataaacatcatatcaattaattctctctatatataatgaaagtcagacagaaattagttctagatatatcacctttgtatccattgaactctagtaaatcaaccattggattagaaaccaattcctcatcttgatataccagcaacacagaaacctcttcagtcaaatcataaaaaggttctgtcattagattaatttgaatttgtaagaaaaacacttacaactgaagctatttataaagtatcatttactggcttatgagcctgtttagagataattatatataaataattttatctaaatatctagataatccctcaaatttgacacaaattgtaatttagatacttgaatttatctaaaagagaccaaataaatacttttactattgtcatatacgcactcatgaacaccttatgctgacatggcaaatttatgtgtattgtaaatgcttgtgttattacattattgaatcacaataaaaagattatttcttaaaaaaattaaatttttgattgacttttattccaacaatcaaattatacaacttggggttcattaactatttctattaatatcaaaatttaacattgattattggatattatttgaagttattgaagatgacattatatttattaagtattaattacacttcttgaatagttggaagattctttgatttgtgtccataattcaatagttcaaatggtgaatgtcttgtcttcaagtaacggctaatggtcttagaattaggccttatttatttttgttcggataaattagcccagagatattctaaatagagtatgatattgtgcactttgaccaagttagcataattttttttttttcaaaaagtctcacacattatggaaaaattacgcgagttggcaaatactactaggttattagtcattgagggtagggtatagtttaatttatttactgtcagtaaatacagtttcagtttttttgccattaataatgagacccaccacctctttgtatacctgtcacaccccaaaatcggatgtgatggcacgtgcccaaaccccaccggacacgtcagcctaacacccaaaaacccgacgatacgaaattaataaaacaagaataagatagaaagataagcggaagtctttaaataaactcaacataaccccagaattggttgtcacatgtacaaacctctaatacggaatctgaataaaatatacgagtctcatagtaaagttctagaatagaacagaacaataaatatagataacttgagggcacgtctggaatgaaccgctacctctcaagtaagtctggaagctctaatctgaagatgggtaataagccggatatgacagagctgtcaacctacaccactgtgtagaagcaagggtgagtaccaaaagcaacaggtactcgcaagtaacactaaactaagctaaactagcagctacaaacaactcctttcaatcccaaccgaaccaccgaaacttcattctaacagcgaaccaacaaccaatactacacaattcataatcaacagatatatccaacagtgtctcaacatcaacctcatatcctcatgtaagagcaaatagatcatatatcacatgaagaggggcaaataggtaaagtccacacaccacagacaaagatgaagtcaaatgcgatgcaaatgcaataatgatgtcatgtagtcgtgatgcatgtctgtcctaagatacacatctgttgacgtaatcagaccgcgctgaatactcaaatcagaacccatgggggccacacatggaccatgtatcaccgccagaaccagatcccatcggcatccaaatcgctagccggagctagtccatctcatatatctctagccggagctagtctcaactgtgtctcatatccatccatcctcatatcagtgtctcagaactcatgcaacagatagttcacacatgggatgaataatgaatatgcacgtcatcaatcacaatcatatcacgatcacatcatagtattacacattatctgtctcaatcacaaccatatcacgaccacatcatagtattacacatcatctgtctcaatcacaaccatatcacgaccacatcatagtattacacatcatctgtatcaacatcaatgtctgtatcaatcatagcctactcatgctcttctatcccctcaatatcagttatcacatgacttattcaacaaattcaagtcacatataacacatttagctcgttttattccccatctttcaattacaacaatttcaatcaacaaataaaactcatcctcaatccccattactccccaacacaattaggaaagtagtcatatgtagtctaagaatttaacaaagtttagaagtcacttgcctcaaaacacttcaactagtaactcaaatctgagttttactcttccgagcacgctccaaatcaccacaatctattcataaatggaatcccacaatcaatacgaatctaacaacaccaatatcgtgaaatttggagaaaagggtaaaatggtcaaaaaaaatctcgttccgaaaaatattttcgaaatctggaaatttttagtgaaaaatgttccccaagaaatttagaatccaatagtgaaaaccgtttcgaaaaaggagttgaaatgagttcacaaactcaaattttctattaaattcggattaggcaaaaaaccccaaattttacagttgagatctcaaattttgatgttaaaatccataaataatcgatggaaatcaaagatctaagttggaaataacttacccaatgaattccttgcgaaaatccacttgaaatcacctattttcgagctctcaaagtctaaaaatggagaaatgggtatttttcaagttggggaaaatggctactgttttttttgacttaaaagggctgctattgcagctgaaacacaaccataacaccaaagtttaagtccccgttggaccctcgggattcgttcgaaatctcgtgcacacaaactaaatatgtacccccactaaattcgacgttccggactcaatggaaccgtcggaatttaaattcgaggactccttgacccgaaattcaataagatgccaagaaactagtttaacgccaaaaaaattcgaaactcaatcggagcgtctaaaaattcaaccaagactcattctagacttagaatcgccccccgaaaccaacggtactcttggaatttcaatctgagcctcggaaccttatatgttgaccaaagtcaactctttatcaaaatttcacaactttagcaacttaggacctcaattcttcgtttcaactccaaattcaactccgtaacttcacacagacccgttttgacattctaaaactgccggaatcgacggaattccgatccgagtcccgaaactccaaataactcgaaaaagcactttttaaccaactttaactcataaaaactaaacttctcaaaaactcaactttttaccaacttttcctcaaactaactttacaaccacaaaacatgggactcgaggtaactaccgaaagggcaaaatagtcacttccacgaaaaattaccaaaatgacctttcgggtcattacaataccgaatcaacaaagccttcatcggcctttatttatgattttatacaaaatcaaatttatctctcatctcctctcctctcctcatttcctatttttctcctaaaataactctttcacttccaatttgaaattcgaatttcactttctccctccagtcgtgttttactttttgcaggtaaccgcctaaatcataggtgaacctcttttttttttttttttcatttttcaattgtatatgtattgtgcttgttagtgtttggataattttttctcaaaattccctcattacttattagataatcatttttatagaaaataaaatggatgattcgactagaggattatgagaggtacgtcattgcatgtcaaagtttttaataatcaaccttcattttcactctgtttaactcaagattttggagtcaatgcagggtctatggaaaaatctaaacaaattctagagtaaaaatctattgaagaattgagatccaagaaaaaaatgacccaattgcacttccagaagtcatcaacaatgtcaaggcaagcgacattaaaattgttgaaggagaaagtaagaggaaagccaaagatagtgattctgaggaggttgtgtctccttcattagatcaagacaaatacgaagaacatcaggtatttgcttaaaacacaattgtatgtagatatttgtatattttgttagtgatatacaaaattgtatgtagtatatgtatattttctgcttacatcacaattgtatatagatatttgtatattttgttagttatatacaaaattgcttgaagtatatgtatattttttgcttaaatcataattgtatatatatatttgtatatcttgtaagttatatacaatagtatgaattaaacaatatacaaaccttacattattatatatacagttaggttacaccaaaaattatcaaattaaagcacaacttttttatcgaatcatatacaattcatatatataattgacttagtaattttatacaactacttacacttatacatggtataagaattttgcacaattacttacatatatacaatattatcaattaaacaatatacaaatcgtataacttatatatacagtaaaattacaacaacaacaacaaaaattatcaaattaaagcacaccgttgttgtcgaatcatatacacttcatatataaaaattgtgtcattcaatttttcgaacaaaaaattagaattgaattggtaataaaaaatttatctaatcttgtataaacaaaattaaattattgcaaaccattagaatgaaaaaaacaaaaataatccgttttccaaaatttcaattatatactatacaaatcaattgtatactttcttgctgttcaaaacatgaagtttccttgaaagaaacgcttacctagcgttgaatatacaagaatattgattaatcttatgcttcagtcgtttgaggaacccagttgttatggtgtttctattgctatagaactcctttttggaaaaatatttgattttggacgattagcttgaacattgggactatataaattttttattaccgtatttagcactcatgtatccatttattaaaaaaaaatgtataaattatatttttaaaagaaaatatacaaaattaatgcttcatagcaaactaaactatgcccattgaatgtaattactaaactatacctatagagcgttatttcattaaatacgtttatcatatatgaaattttcccttaagagatcctacaccttatatatagcttctcaaatgtggaaattcaatctcacacccaacaatctttccctcagactaagtttcatggcccaatatcacaatgatccacgagtcaattcatgagattcactatgtgcatcacccacatcgtctaagtattttatggcaatcaagccctacaactagcttcttctttatatatatatgtgtgtgtatatgtgcgcgcgcgcgcatctctaattaatctcgtaaagggattaaggggccaatttcaaagaattaggcgattttcttagtttttcgtgtgtgttaacccataaatattttggtgatatggttttcggacgatttcttttgtgcaacttatatggaacccttcgtagggagttagtctcacactttttagagtccattttgggcactcaggggctaatttataggaaataggtgatcttctcagtccgtctgtattagcccatgaatattttggtgatatgtcttccgaataatttctttgtaaaatctttacgggaccctccatagggagttaatggagcagtacgtatagtctcacaattttagagttcattttgggcatttaggggccaatttacaggaattaggtgactttctcagtgttttgtgtgtgttagcccattaatatttggtgatatgactttcagacgatttctttgctacacatttacgaaaccctctgtagggagtcgggggagcagtacgtacaatctcacaattttagagtccattttagacatttaggggccaatttaaagaaattggacaattttctcagtttttcgtgtctgttagccattaatatattggtgaatatgacctacggatgatttctaatagaaatctttacgaaaccttcaatagggagttgggggagcaatacgtaccgtctgacaatttttagagtccattttgggcatttaagggccaatttacaggaattagacaattttctcagtatttttccatgtgttagcccataaatattttgttgctttgacttttagagtctaaacttctcatgtatattaagagatatttatgcttggttaattgaatcgaactaggaatagagaaattcctacttggatcttaatatttctctctctttgatttggaaaattctacgaagttgctttcaatggaattaaaatcataaatctattgtatgtaagaaacatacttatattcatgaatagatatgtgtagggtctaataatgaattatcacaattttttctactttttcctgtcagagtcctgctttttctttttctttttcttttttaactttggtctctgcttttgtctacatgatgataaggttggtggacctagctggaaatgtgatggaaatagctagtaaaagaaagaactttgcattttctgttttcttaaaaactgaaaaattacataacttgtggcaatttgttcattttcatactgagagatatttctattttttggatatatggcttatgctgctgttacttcccttatgagaaccatacatcaatcaatggaacttactggatgtgatttgcaaccgttttatgaaaagctcaaatctttgagagctattctggagaaatcctgcaatataatgggcgatcatgaggggttaacaatcttggaagttgaaatcgtagaggtagcatacacaacagaagatatggttgactcggaatcaagaaatgtttttttagcacagaatttggaggaaagaagcagggctatgtgggagatttttttcgtcctggaacaagcactagaatgcattgattccaccgtgaaacagtggatggcaacatcggacagcatgaaagatctaaaaccacaaactagctcgcttgtcagtttacctgaacatgatgttgagcagcccgagaatataatggttggccgtgaaaatgaatttgagatgatgctggatcaacttgctagaggaggaagggaactagaagttgtctcaatcgtagggatgggaggcatcgggaaaacaactttggctacaaaactctatagtgatccgtgcattatgtctcgatttgatattcgtgcaaaagcaactgtttcacaagagtattgtgtgagaaatgtactcctaggccttctttctttgacaagtgatgaacctgatgatcagctagcggaccgactgcaaaagcatctgaaaggcaggagatacttggtagtcattgatgacatatggactacagaagcttgggatgatataaaactatgtttcccagactgttataatggaagcagaatactcctgactactcggaatgtggaagtggctgaatatgctagttcaggtaagcctcctcatcacatgcgcctcatgaattttgacgaaagttggaatttactacacaaaaagatctttgaaaaagaaggttcttattctcctgaatttgaaaatattgggaaacaaattgcattaaaatgtggaggattacctctagcaattactgtgattgctggacttctctccaaaatgggtcaaagattagatgagtggcaaagaattggggaaaatgtaagttcggtcgttagcacagatcctgaagcacaatgcatgagagtgttggctttgagttaccatcacttgccttctcacctaaaaccgtgttttctgtattttgcaattttcacagaggatgaacagatttctgtaaatgaacttgttgagttatggcctgtagagggatttttgaatgaagaagagggaaaaagcatagaagaggtggcaacaacatgtataaacgaacttatagatagaagcttaattttcatccacaattttagttttcgtggaacaatagaaagttgtggaatgcatgatgtgacccgtgaactctgtttgagggaagctcgaaacatgaattttgtgaatgttatcagaggaaagagtgatcaaaattcatgtgcacaatccatgcagcgttcctttaagagtcgaagtcggatcagaatccataaggtggaagaattggcttggtgtcgtaacagtgaggctcattctattatcatgttgggtggattcgaatgcgtcacactggaattgtctttcaagctagtaagagtactagatcttggtttgaatacatggccaatttttcccagtggagtactttctctaattcatttgagatacctatctttgcgttttaatccttgcttacagcagtatcaaggatcgaaagaagctgttccctcatcaataatagacattcctctatcgatatcaagcctatgctatctgcaaacttttaaacttaaccttccatttcccagttattatcctttcatattaccatcggaaattttgacgatgccacaattgaggacgctgtgtatgggctggaattacttgcggagtcatgagcctacagagaacagattggttttgaaaaatttgcaatgcctcaatcaattgaaccctcggtattgtacagggtctttttttagactatttcccaatttaaagaagttgcaagtatttggcgtcccagaagactttcgcaatagccaggacctgtatgattttcgctacttatatcagctcgaagaattgacatttcgtttatattatccatatgctgcttgctttctaaaaaacactgcaccttcaggttctacgcaagatcctctgaggtttcagacggaaatattgcacaaagagattgatttcgggggaactgcacctccaactttactcttacctcctccggatgcttttccacaaaaccttaagagtttaacttttaggggagaattctctgtggcatggaaggatttgagcattgttggtaaattacccaaactcgaggtccttatactatcatggaatgccttcataggcaaggagtgggaagtagttgaggaagggtttcctcacttgaagttcttgtttctggatgatgtatacattcgatactggagagctagtagtgatcactttccgtaccttgaacgagttattcttagagattgccgtaatttggattcaatccctcgagattttgcagatataaccacactagctcttattgatatagattactgtcaacaatctgttgtgaattccgccaagcaaattcaacaggacattcaagacaactatggaagctctatcgaggtccatactcgtcatcttttgtaagacatcttcttccttgctttacaacaataattaactcatcatcatagtaaactcgataataatctggataatagccttagtaagtcaaattgcaccaattcaacaaaagttcttgatgctgtcattgtgtttgatttgaatccttccaatattgtgtaacttgttatacttgcatgttcattcttgattttgggaagtgtaacatttcatttttcatcttttgtggctagcattcccaagagtgtgacaacagttgaagatgatgatgatagtgtgacaacagatgaagatgatgatgatgatgactttgagaaagaagttgcttcttgccgcaataatgtgtaagttcttatacctgcatgctcattcttgctataatgttctcttgttccttaattatgggacatctgacatattattttccatgttttgcgtcttttatttttctgcagcgagtagttaaggtgttctgaggactagccagttctctgaaataaatgtcaaatcagaagccaaatgtgtgagtgtttgttttgttcgttttcattttttctgcataaggtggcaggatgattgcaaatggcttgtaatttaattgtatatgatctttcgtatagccatttgtcagtggttcttaagatactccaaattttatgcacatacatacatactgtacaggccagaacagactccagtaacgtgtgtttcctttcttgggagtcctcaatctacctcgcaaaggctaaatccagtggcaccagctttattactaaaacattcacacgggaacagttgagaaaaactaggcctccataccaaacacacccttaaacttgagctggttgatagagactagagagtagagagcactacatggattatggacctagctaaaagaaagaccttttgtttgaagataagcttaagaaattcgcacactctctgtcaccttgacacaagtgttctcctcgaccccaactaataatgtatgatcacaaatttcctgtcttttttttaaactttggtctcttcttttgtctacatgatgataaggttagtgacctcgcatctttctactttatcctgttagtggacctagctggaaatgtgatggaaatagttagtaaaagtaagatctttgcattttctgttttcttaaaaactgaaatattacataacttgtggcaattaatttgtccattttcatactgagagtgagagagtcctattttttggatttatggcttatgctgctgttacttcccttatgagaaccatacaccaatcaatggaaattattcaatgtgatttgcaaccgttttatgaaatatgttttttgacttacaaacattgaattaaaatcttttgaacttttataaattaagatttttttcttttaaagaaatcgatactgtaatcctctatatcaacgagcttactcatgtgaaggtcaagtgataaaaccaggggccagagccagtctagacctagggggttcggagcttttgtaattggatcattgtgattacgggttgaatgtctaattttctaggcgattatgatagtattttgtatctgaataatagctcactttttctaagtaatggaaaagaaggtcaaaacgtgccactaaaagacttgactaagacaaaaatgggttgtcaagaacgtagaggagggtaggatggacagttggtcagatctagtatggataatacatggaggtagttggagtggcggctctcccaaaattctgtcatcttagatctttggattcggtcttatacatatgtgaggaaggtaatgaaaaatattggggtagaggattacaacatggggaatcaagatttcagatggtcagtcaactaactgagctactaagatttcaaaaaaaagaaaaagaagggttccatgtgacatgaaagtctcatattgcatagtttttgaatgaggcaaagaagtgaggaatcagatgaaccaccttcgatggaaaattatactatttatacatatagttaaaattgttttctatctttatattattgtagtcagctaatttgcatgtttacttattcatattttgaatagacataatacataaatacatcctttaacttggcttcaaatcaaatttatgcccttcaactttggatgtgcacaaatagacatttaaatttgtataaagttgaagaaatagacacacatgtcctacatgacatcctacatgtcattttttatcctacgtggtgtcttacgtgtattgtgtcatgtaggactcgtgtggctagtcgctcaactttatacaaatttaagtgcatacttgtgcatacccaaagtcggagaacataaacgtcaaatgaggtcaagttaaagggcacatttatgtattatgccttcttgatttcattaataatgaaaatcctgaatcatattcagattccgtcactaatcgttgaattaatatactatgtattatttattggatttttttgctatcttatttttaattgttcaaagttttgtttattatctttagcataatatctgattatattattttgatatactttttctagccctaattacttgtccatttttgaattgacacacctattaagaaaacaattattgaaatagtgagtttactattttacccatattaattatgaagtgggtgatttaaaaactcaagattttcaaaaagttctacttttttcaaagtaataaattaagggtataatatgtaaaaaaaattattctttcttgatttgtcaaaatagaaaagtaattaggaataactaaaaaaatggataaataattaaaaacggagggagcaatatgttatctttagcctaataatatctgattaatggccaccctaattgattggataggagaggatagacttgcttccaagtaagccaaaatataaaaagttgacaaaagggtgctaaattcgagacacatgtagtacttatataattcatgtgcggactcgttcttttgtagtactccttccgttctattttatatgtcatatttttattttatactttcattaagaaatgatgtaattttatctttctattcttatttaatgtttttttaagtcaattttataataaatgatgaatatattttcaagattaattaactactctatcaagggtataataggtaaaatatggtaatttatacataaattttataaaatgacaagtattgtggtccaactatttatagaaagagatgacatataaaatgggacggagggagttataaagttgacttaagaaaacatttaataagggtagaagggtaaagttacattatttcttaatgtaaatgtaaagtaaaaatgtaacatataaaatgggaaggagggagtagtattttctcgttttattttacgtggcactctattctcataatctatctttaaaaatgtcattttattgtaattgaaaataatttaacttaaaattctccatctacccttaattaatgaaatgatttacaattatataaatatataaaaattgttttagcttataattttctaaaatctttttttctcttatacatcgtattaagtcaaacaatactaagtcaaatggaatggcggagtatttcttttattttttttcacaccgtccatatgttttctcccatcccccagacccccactatgtatattcactccttagttgaatctgaatttagagtttagaagctt

SEQ ID NO: 258 - DNA, 396 bp, Arabidopsis thaliana
  source 1..396: mol_type = genomic DNA
atgtctacaccatcaggttcaaatccgttaccaatggccgacaagttagaagcaaaaggtcgtatagcatccatcaagttcgactatgtcaagaatggtcaacctaaagctggatcaacccatggtgtctcatatcacaatttcaccgagtggtttgatcttaaccatacatgcgatgagcatatcttatctgtgaagtgttactacgatgatggtgagatacaaggacttgtgatcaaaaccaatatcaggacgtctgcatatatgggatataacattggtactacgtttacacttgaagtcaaaggcaagaagatcgttgggtttcatggatcttttgataaaaaccttacctcgcttggagcttatttcgcaccgctttctcctgctaagtaa

SEQ ID NO: 259 - DNA, 978 bp, Pepper mild mottle virus
  source 1..978: mol_type = genomic DNA
cacaaacacgtttttattccggctgtgtagtctttcaacgttgtcttccgatgcccgtgtttccaaacttcagccaagaaatcgtctaagcctaaccttttccaaatctcatactcgactgcacaatgaaattcgttctgtgatttgtcatacttggaaatgtctagctctaatatgtccataggaacattagagtccagatctgagaaaaattcttcgatctgtgtaggcgttttccttgtataaaacatgaatcttgaactgtcaattgtctctagcagctgtcttgttaattctgaaaatacaggaccaaaaagcgcattgattttcttgctatgatacacaatagtttgcaaagccgggtattcagtttgaatactaagatccaaacgctgtttcggctgctgcttgatcatgtgcctgtattgatcaacggctggtaaatcaataaagtcaaaatcagccaactggccaattgttgacttctcttgcttttcgatccatctttccaaactcgcccttgaaagcagaggtatattttttggttttttcttttctttaattaagtatgcatcaaaaaacttatctactactagagaagcggtgtcttcgatgtcaacaacccctactaattcgggagagttgaaatttcttttgatcatcgcgaccaaattttccaacaatccaggttttcgaggtttttcagcagcagtcctgatcacaggtttcaatgtcgtctcagattctctcggaagaggcaccgatttcgacatatccaacacacaatccttgacattcaaactattctctcgtatttgcatagttacagcatcatactcattgagtatagtactgtttcccggcaaacacttgtcgtaataatattgcatgtcagaaacatctcctgtttttggtgctgcgacgaaaaggttaacacctttgtacaccgattctatctgtaattgctattgagtcgac

SEQ ID NO: 260 - DNA, 2370 bp, Bacillus thuringiensis
  source 1..2370: mol_type = genomic DNA
atgaacatgaataatactaaattaagcgcaagggccctaccgagtcttattgattattttaatggcatttatggatttgccactggtatcaaagacattatgaatatgatttttaaaacggatacaggtggtaatctaaccttagacgaaatcctaaagaatcagcagttactaaatgagatttctggtaaattggatggggtaaatgggagcttaaatgatcttatcgcacagggaaacttaaatacagaattatctaaggaaatcctaaaaattgcaaatgaacagaatcaagtcttaaatgatgttaataacaaactcgatgcgataaatacgatgcttcatatatatctacctaaaattacatctatgttaagtgatgtaatgaagcaaaattatgcgctaagtctgcaaatagaatacttaagtaagcaattgcaagaaatttctgataaattagatattattaacgtaaatgttcttattaactctacacttactgaaattacacctgcatatcaacggattaaatatgtgaatgaaaaatttgaagaattaacttttgctacagaaaccactttaaaagtaaaaaaggatagctcgcctgctgatattcttgatgagttaactgaattaactgaactagcgaaaagtgttacaaaaaatgacgttgatggttttgaattttaccttaatacattccacgatgtaatggtaggaaataatttactcgggcgttcagctttaaaaactgcttcagaattaattgctaaagaaaatgtgaaaacaagtggcagtgaagtaggaaatgtttataatttcttaattgtattaacagctctacaagcaaaagcttttcttactttaacaacatgccgaaaattattaggcttagcagatattgattatacttctattatgaatgaacatttaaataaggaaaaagaggaatttagagtaaacatccttcctacactttctaatactttttctaatcctaattatgcaaaagttaaaggaagtgatgaagatgcaaagatgattgtggaagctaaaccaggacatgcattggttgggtttgaaatgagcaatgattcaatcacagtattaaaagtatatgaggctaagctaaaacaaaattatcaagttgataaggattccttatcggaggttatttatggtgatatggataaattattgtgtccagatcaatctgaacaaatttattatacaaataatatagtatttccaaatgaatatgtaattactaaaattgattttactaagaaaatgaagactttaagatatgaggtaacagctaattcttatgattcttctacaggagaaattgacttaaataagaagaaagtagaatcaagtgaagcggagtataggacgttaagtgctaaagatgatggagtgtatatgccgttaggtgtcatcagtgaaacatttttgactccgattaatgggtttggcctccaagctgatgaaaattcaagattaattactttaacatgtaaatcatatttaagagaactactgttagcaacagacttaagcaataaagaaactaaattgatcgtcccgccaagtggttttattagtaatattgtagaaaatgggaacttagagggagaaaacttagagccgtggatagcaaataataagaatgcgtatgtagatcatacaggcggagtgaatggtactagagctttatatgttcataaggacggaggattttcacaatctattggagataagttaaaaccgaaaactgagtatgtaatccaatatactgttaaaggaaaaccttctattcatttaaaaaatgaaaatactggatatattcattatgaagatacaaataacaatttagaagattatcaaactattactaaacgttttactacaggaactgatttaaagggagtgtatttaattttaaaaagtcaaaatggagatgaagcctggggagataactttacaattttggaaattagtccttctgaaaagttattaagtccagaattaatcaatgtaaataattggattcgcacgggatcaactcatattagcggttatacactcactctctatcagggaggaggaggaaatctaaaacaaaaccttcaattagacagtttttcaacttatagagtgaatttttctgtgaccggagatgctaatgtaaggattagaaattctagggaagtgttatttgaaaaacgatatatgagcggtgctaaagatgtttctgaaattttcactacaaaattggggaaagataacttttatatagagctttctcaagggaataatttatatggtggtcctcttgtacatttttacgatgtctctattaagtaa

SEQ ID NO: 261 - DNA, 2370 bp, Bacillus cereus
  source 1..2370: mol_type = genomic DNA
atgaacaagaataatactaaattaaacgcaagggccctaccgagttttattgattattttaatggcatttatggatttgccactggtatcaaagacattatgaatatgatttttaaaacggatacaggtggtaatctaaccttagatgaaatcctaaagaatcagcagttactaaatgagatttctggtaaattggatggggtaaatgggagcttaaatgatcttatcgcacagggaaacttaaatacagaattatctaaggaaatcttaaaaattgcaaatgaacagaatcaagtcttaaatgatgttaataacaaactcgatgcgataaatacgatgcttcatatatatctacctaaaattacatctatgttaagtgatgtaatgaagcaaaattatgcgctaagtctgcaaatagaatacttaagtaaacaattgcaagaaatttctgataaattagatattattaacgtaaatgttcttattaactctacacttactgaaattacacctgcatatcaacggattaaatatgtgaatgaaaaatttgaagaattaacttttgctacagaaaccactttaaaagtaaaaaaggatagctcgcctgctgatattcttgatgagttaactgaattaactgaactagcgaaaagtgttacaaaaaatgacgttgatggttttgaattttaccttaatacattccacgatgtaatggtaggaaataatttattcgggcgttcagctttaaaaactgcttcagaattaattgctaaagaaaatgtgaaaacaagtggcagtgaagtaggaaatgtttataatttcttaattgtattaacagctctacaagcaaaagcttttcttactttaacaacatgccgaaaattattaggcttagcagatattgattatacttctattatgaatgaacatttaaataaggaaaaagaggaatttagagtaaacatccttcctacactttctaatactttttctaatcctaattatgcaaaagttaaaggaagtgatgaagatgcaaagatgattgtggaagctaaaccaggatatgcattggttggttttgaaatgagcaatgattcaatcacagtattaaaagtatatgaggctaagctaaaacaaaattatcaagttgataaggattccttatcggaggttatttatggtgatacggataaattattgtgtccagatcaatctgaacaaatatattatacaaataacatagtatttccaaatgaatatgtaattactaaaattgatttcactaaaaaaatgaaaactttaagatatgaggtaacagcgaatttttatgattcttctacaggagaaattgacttaaataagaaaaaagtagaatcaagtgaagcggagtatagaacgttaagtgctaatgatgatggagtgtatatgccattaggtgtcatcagtgaaacatttttgactccgataaatgggtttggcctccaagctgatggaaattcaagattaattactttaacatgtaaatcatatttaagagaactactgctagcaacagacttaagcaataaagaaactaaattgatcgtcccgccaagtggttttattagcaatattgtagagaacgggtccatagaagaggacaatttagagccgtggaaagcaaataataagaatgcgtatgtagatcatacaggcggagtgaatggaactaaagctttatatgttcataaggacggaggattttcacaatttattggagataagttaaaaccgaaaactgagtatgtaatccaatatactgttaaaggaaaaccttctattcatttaaaagatgaaaatactggatatattcattatgaagatacaaataataatttaaaagattatcaaactattactaaacgttttactacaggaactgatttaaagggagtgtatttaattttaaaaagtcaaaatggagatgaagcttggggagataactttattattttggaaattagtccttctgaaaagttattaagtccagaattaattaatacaaataattggacgagtacgggatcaactcatattagcggtaatacactcactctttatcagggaggacgaggaattctaaaacaaaaccttcaattagatagtttttcaacttatagagtgtatttttctgtgtccggagatgctaatgtaaggattagaaattctagggaagtgttatttgaaaaaagatatatgagcggtgctaaagatgtttctgaaatgttcactacaaaatttgagaaagataacttttatatagagctttctcaagggaataatttatatggtggtcctattgtacatttttacgatgtctctattaagtag

SEQ ID NO: 262 - DNA, 2310 bp, Bacillus cereus
  source 1..2310: mol_type = genomic DNA
atgaaaaatatgaagaaaaagttagcaagtgttgtaacctgtaccttattagcccctatgttttttaatgggaatgtaaatactgcttacgcggacaacaaaatcaatcaggattcttcaaagcaggaataccaacagaaagagatggatcgaaaaggattgcttgggtattattttaaagataaagattttagtaaccttactatgttttcaccaacacgttataatacccttatttatgaccaacaaacagcgaataaattattagataaaaaacaacaagaatatcagtctattcgctggattggtttgattcagagtaacaaaacaggtgacttcacatttgaattatcagatgatgaatgtgcgattatagaaatggatgggaaagtgatttctaataaaggtaaagaaaagcaagttgtccatttagagaaaggaaaattagttccaattaaaattgagtatcaattagacgagccattaaatatcgatgatgaaaaattcaaagggtttaaattattgaaagtagataatcaaaaacaactacatcaagtacaacaagatgaattaagaaaccctgaatttaacaaaaaagagtcacaggaatttttagcgaaagcatcgaaaataaatctttttacgaaaaaaattaagagggacattgatgagggaacggatacagacggtgactctattccggatatgtgggaagaaaatgggtatacgattcaaaatagaatcgctgttaaatggaatgactcgctagcaagtaaagggtatacaaaatttgtttctaatccccttgacagtcacacagttggtgacccttatactgactatgaaaaagcatcgagagatttagatttgtcaaatgcaaaagaaacatttaacccattggtagctgcttttccaagcgtgaatgttagcatggaaaaggtgatattatctccaaataaaaacttatctaatagtgtagaatcgcactcatctacgaattggtcttataccaatactgaaggagcatctgttgaagctgggattgggcctaaaggtttttcttttggggtaagtgcaaactatcaacattctgaaacagttgcacaggaatggggggcatctataggagatactacgcaacttaatactgcgtcagcaggatatttaaatgcaaatgttcgatacaacaatgtgggaacaggagccatttatgatgtaaaacctacaactagctttgtattagaaaagaatacaatcgcaactattacggcaaaatcaaattcaacagctttaagtatatctccgggagaaagttatccgaaaaaaggccaaaatggaattgcgataacatccatggatgattttaactcacatccaattacattaaataaaaaacaattagatcaagtattgactaataaccctattatgttagaaacagaccagacagatgggatttataagataaaagatacacatggtaatattgtcacaggtggcacatggaatggtgtaactcaacaaattaaagcaaaaacagcgtctattattgtggatgacgggaaacaggtagcagaaaaacgtgtggcggcaaaagattatgcttatccagaagataaaacaccgtctttaactttaaaagatgcactgaagctttcattcccagaagagataaaagaaacagatggattattgtactataacaacaaaccaatttatgaatcgagtgtcatgacctaccttgatgggaatacggcaaaggaagtaaaaaaacaaataaatgataaaacaggggaatttaaggatgtccaacatttatatgctgttaaacttacacccaaaatgaattttactattaaagtaccggttgcgtatgatacagccaaacaggctgttaatcttggaggggataatccatggggggctaaaggattattagggacatgggtaaatgccatggttgtagataattccggagataaagcatataaaagggttgaacctggttatctactttcacctacattggagttttcagaaggttcattagacaatttaaagaaaaattatagtttttatgttagtatgtacgtgaaatcagataaaccatttactctaagaataaatgctggaccctatagtaccaagagaaccatagaagcatcaaatgattttaaacgcgttgatattcctgcgttttatatagaaggatttccgatagacactataagattagaaggttctgactatccatcggcaatatggtggaaagatgtttcaattacagaagtgtcagcagtaaaaaaataa

SEQ ID NO: 263 - DNA, 1389 bp, Bacillus cereus
  source 1..1389: mol_type = genomic DNA
atgaaaagaatggagggaaagttgtttatggtatctaaaaagttacaattagttactaaagctttattgtttagtacagttttatctatacctttattaaataatgaagaggtaaaagctgaacatttaaatctaaattctcaaagtaaatatcctagctttcaaaatcaaaaaatcactgataatgcagaggattttaaagaggataaggaaaaagcgaaagaatggggagaagtaaaagaaaaagagtggaaattaaccgctactgaaaaaagaaaaataaatgactttttaaatgatacaaacaaaataaaaacaaattataaagaaattactttttctatggcaggttcatttgaagatgaactgaaagatttaaaagaaattgataagatgtttgataaagccaatctctcaagttctattatcacctataaaaatgtggaacccgcaacaattggatttaataagtctttaacagaaggaaatacaattaattctgatgtaatggcgcagtttaaagaacaatttctaggaaaagatattaagtttgatagttatctagatactcatttaactgtccaacaagtttctagtaaagaaagagttattttgaaggttacagtgccgagtgggaagggttctactaatccaacaaaagcaggtgttattttagatggaaatgaacacaaaatgctcattgataatgggtatgtactccatgttgataaggtatcaaaggtagtaaaaaaggggctggagtgcttgcaagtggaagggaccttaaaaaagagtcttgactttaaaaatgatataagtgctaaagcgcatagttggggcatgaaaaattatgaagaatgggctgcaaatttaaccgattcccaaagaaaagctttagatggctatgctaggcaagattataaaaaaatcaatgattatttacgaaatcaaggcggaagtggaaatgaacaattggatgcacaaataaagaacatttctgaaactttaaacaataagccaataccagaaaatattactgtgtatagatggtgtggtatgccagaatttggttatcaaattagtgagcctttacctgccttaaaagattttgaatgggaatttttaaacacaatcaaggaagacaaaggatatattagtacgagcttatcaagtgaacgtctagcggcttttgggtcaagaaaaattatattacgattacaaatcccaaaaggaagtaaaggcgcatatttaagtgccattggtggatttgcaaatgaaaaagaaattcttctggataaagatagtaagtatcatatcaataaaataacagaagtagtcattaaaggcattaagcgatatgtagttgatgcaacattattaacaaattaa

SEQ ID NO: 264 - DNA, 1104 bp, Bacillus thuringiensis
  source 1..1104: mol_type = genomic DNA
atgaaaaatagattttcaaaagtggcattatgcaccgtaccgattttaatggtttctacattcgccagttcaagcatgtcagcttttgctgcagaagccaaatcaccagatttaaatgtatctcaacaagtaataggtccctatgccgaatcttatattgatattgtgcaggatagaatgaaacaaagggataagggatcaaaattaactggtaaaccaataaatatgcaagaacaaataatagatgggtggtttctagctagattttggatatttaaggatcaaaacaataaccatcagacaaatagatttatatcctggtttaaagataatattgctagttcaaaagggtataatagtattgcggagcaaatgggtttaaaaatagaagcagaaaacgatatggatgtaacaaatatagattatacatctaagacaggcgataccatttataatggtatttcagaattgaaaaattatacaggatcaactcaaaagatgaaaacagatagttttcaaagagattatacaaaatcagaatctacttcagtaactaatggattacaattaggatttaaagttgctgctaaaggagtagttgctttggctggggcagactttgaaaccagtgttacttataatctatcaactactacaactgaaacaaatacaatatcagacaagtttactgtcccatctcaagaagttacattgcctccaggacataaagcgatagtgaaacatgatttaagaaaaatggtttattctggtactcatgatctaaagggtgatttaattgtgagttttaatgataaagagattgtacaaaaatttatttatccaaattatagagaaattaatttatctgatatccgtgaaactatgattgaaattgatgaatggaatcatgtaaaccctgtgaatttttatgaattagttggggtcaaaaatcatataaaaaatggtgaaactttgtatatagatactccagctaaatttatgtttaatggtgctaatccatattatagagcaacatttacagaatacgacgggaataataatcctgttcaaacaaaggtattaagtgaaaactttaaattgtag

SEQ ID NO: 265 - DNA, 2862 bp, Spodoptera exigua
  source 1..2862: mol_type = genomic DNA
attgtgaagtgaaatgagatcataatatatttgtgtgtagcgatatttttattaagtagataaatttaaggaccataaatgaagaacctctaacaatttataatttgtgtaaaacataataaacagtttttaactgtgaatgtgcattaccgatttagtatgtgatttaaccccagtgataagagacttatcacttgctgttatttatataactttgatctgattacgaatcttaattaattacaaaatgtatatacatcgatcgactgtgttacgactgtgtgtgtgggtgagcctgttggctctatgtggggcccaacgcgcagagcaactcctggcacagaatccttgctccagcaagacgacgtgcagtgactgcatccgcacggccagctgcgcttggcgttttgcaggagagttcaatggccctcggtgcttcaaccctgccatggagcgagatggcactgcaggatgtgaagaatcctacatattcaacccagataataaacgctctgtcgaccccatgtacaatatggagttaagcagagctaagtctagaatgggcatgtctgctggttcatcttcttatgaagagtcttacagtgcacagggcagtagctttgctgcatcgggatcggcagcaggcgcaggcgctgaagcaggtggcgaaagattggtgcagatgaaacctcagaaagtgaatctcaacctcagaatgaatcaaatgcagaaacttacatttgcgtactccagagctcaagattatcctgttgacttatattaccttatggacttgagtagatctatgaaaaacgatagagagaaactcagtaccctgggaagtttactgtctgctaccatgaggaatatgacgtccatgttcaggatcgggttcggctcctttgtagataaactagtcatgccttatgtatctacagtgcctaagaatttgatatcaccttgcgacggttgcgcagcgccttatggataccaaaatcaaatgtctctgagtactgacaccgacttctttgagaaagcagtagctaacgcagacgtgccgggcaacttggacgcccccgaaggagggttcgacgcgatcatgcaagccgtggtgtgcaagcaacagatcggctggcgagaccaggctaggcgacttcttgttttctccacagacgctggtttccattatgctggcgacggaaagctcggtggtatcgtccaacctaacgatggcgaatgtcacatgaaggacaacacgtacacacactcgacgttgcaggattaccccagcatttcacagattaatcataaggtgaagaagcacgctatcaacgtaatctttgcggtaacggcggaacagatcagcgtgtacgaacagctgagcaagcacatcgaaggttccagtacgggagtgctgagcaacgattccgataacatcgtcgacctcgtccgggaacaatacaacaaaattacgtcaactgtagaaatgaaagactcatcgagtgacgctgtgcaaatagtgtattactcatcttgtctcagcggcaaagaactcacacagacgaacaaatgcgacggattaaaggttggcgatgtcgtggaattcacggctgagattacattgaaagaatgtcccaaagaccgcagcaagtggaagcagactttcgagatctcccccgtcggtatctctgacagcctcactgttgaactggaaatggtctgcgactgtccctgtgaacagcccaatcatcacgcgtacaacgacagtccgctagtatgcagcggcgagggcgtgtctgcgtgcggggtgtgcgtgtgccggccgggccgcttcggcaagaactgcgagtgctcggcgcacggcggcgtctccgccgagcaggagcgcggctgccgccccaccaacgccagcgccggcccgctctgctccaaccgcggcacctgcatctgcggcgtctgcgagtgcaacaagatggacgacccgctcaaggtgatttctggcccgttctgcgagtgcgataacttcacgtgtgacatgaacaaaggtttgctctgctcgggccccgaccacggggaatgtgtctgtggcaaatgtagctgtactcccgagtacaccggaccagcttgccagtgtttgaaggaccaaactccttgtcgatcacctgaaaataacgaaatatgtagcggtaacggaaaatgtgtctgcggtcagtgcgtgtgcaatgtagatgacgaccgtcattattccggaaaatactgtgaaaaatgtcccacctgcccaggccgctgtggtgaattcaaagactgtgtattatgcgaggtacacaaacgtggcccgctgtacaatgccgacacagacacctgtggcgactgtgcgctctatcccataatcgaagaaggcaaaattgaagccaacgaatctcgaaacgaacatttgtgtagtttctacgacgatgaagattgtttatatgtgtacgtgtactcctacaatgagaaccagcagcttgtcattagagcacagaaggaacgggaatgtcccaagaaggtaccaatcttgggaattgtgttgggagtgatcgctgcgatagtgttggttggtttggctttactgatgttatggaagatggcgactactatacacgaccgcagagagtttgcgcgcttcgagaaagaacgtatgatggccaaatgggacacgggcgagaaccctatttacaagcaagcaacatcgaccttcaaaaatcctacatatgctggaaaataattgtattacattacacaaaatagtcagcaaataaaatagtcgtctcaaaacgtaaagcaatcgaatgccgcatttataaaattatcaagatgtcagta

SEQ ID NO: 266 - DNA, 766 bp, Helicoverpa zea
  source 1..766: mol_type = genomic DNA
tgatttcgaattccatcgttcattccaagatgttcaatcaaactcagttgtttgtttttctcgctgtattcactacgagcagtgttttagggaataacaatgatgttaaggatggcgcagcgagtggagctcacagcgaccgactaggtctttggttcggtccccggctaggcaagcgctcgctcagaatatctaccgaagataacagacaagcattcttcaaattactcgaagccgccgacgctttgaaatactattacgaccagctaccttatgagatgcaagctgatgaacctgaaaccagggtcaccaagaaggtgatcttcacccccaagttaggcagaagcctcgcatacgatgacaaaagctttgagaacgtggagttcacgcccagactcggcaggagactgtccgatgatatgcctgccacccccgctgaccaggaaatgtaccgccaagaccctgaacagattgacagcaggacaaagtacttctccccaaggctcggcagaaccatgaacttctcaccacgactcggcagggaactgtcttatgatatgatgccaaataaaatcagggtagtcaggagtacaaacaaaacgcgatcaacataatttggagcaaaaacaagacgcaaagctagtctaacctcaaaatttttataaaacgtgttattttggacgaaataatgtactgttttgtataataagtattattaaataatattaaaaattagtattttgtcgaaataaaggacttaagatat

SEQ ID NO: 267 - DNA, 3468 bp, Bacillus thuringiensis
  source 1..3468: mol_type = genomic DNA
atggataacaatccgaacatcaatgaatgcattccttataattgtttaagtaaccctgaagtagaagtattaggtggagaaagaatagaaactggttacaccccaatcgatatttccttgtcgctaacgcaatttcttttgagtgaatttgttcccggtgctggatttgtgttaggactagttgatataatatggggaatttttggtccctctcaatgggacgcatttcttgtacaaattgaacagttaattaaccaaagaatagaagaattcgctaggaaccaagccatttctagattagaaggactaagcaatctttatcaaatttacgcagaatcttttagagagtgggaagcagatcctactaatccagcattaagagaagagatgcgtattcaattcaatgacatgaacagtgcccttacaaccgctattcctctttttgcagttcaaaattatcaagttcctcttttatcagtatatgttcaagctgcaaatttacatttatcagttttgagagatgtttcagtgtttggacaaaggtggggatttgatgccgcgactatcaatagtcgttataatgatttaactaggcttattggcaactatacagatcatgctgtacgctggtacaatacgggattagagcgtgtatggggaccggattctagagattggataagatataatcaatttagaagagaattaacactaactgtattagatatcgtttctctatttccgaactatgatagtagaacgtatccaattcgaacagtttcccaattaacaagagaaatttatacaaacccagtattagaaaattttgatggtagttttcgaggctcggctcagggcatagaaggaagtattaggagtccacatttgatggatatacttaacagtataaccatctatacggatgctcatagaggagaatattattggtcagggcatcaaataatggcttctcctgtagggttttcggggccagaattcacttttccgctatatggaactatgggaaatgcagctccacaacaacgtattgttgctcaactaggtcagggcgtgtatagaacattatcgtccactttatatagaagaccttttaatatagggataaataatcaacaactatctgttcttgacgggacagaatttgcttatggaacctcctcaaatttgccatccgctgtatacagaaaaagcggaacggtagattcgctggatgaaataccgccacagaataacaacgtgccacctaggcaaggatttagtcatcgattaagccatgtttcaatgtttcgttcaggctttagtaatagtagtgtaagtataataagagctcctatgttctcttggatacatcgtagtgctgaatttaataatataattccttcatcacaaattacacaaatacctttaacaaaatctactaatcttggctctggaacttctgtcgttaaaggaccaggatttacaggaggagatattcttcgaagaacttcacctggccagatttcaaccttaagagtaaatattactgcaccattatcacaaagatatcgggtaagaattcgctacgcttctaccacaaatttacaattccatacatcaattgacggaagacctattaatcaggggaatttttcagcaactatgagtagtgggagtaatttacagtccggaagctttaggactgtaggttttactactccgtttaacttttcaaatggatcaagtgtatttacgttaagtgctcatgtcttcaattcaggcaatgaagtttatatagatcgaattgaatttgttccggcagaagtaacctttgaggcagaatatgatttagaaagagcacaaaaggcggtgaatgagctgtttacttcttccaatcaaatcgggttaaaaacagatgtgacggattatcatattgatcaagtatccaatttagttgagtgtttatctgatgaattttgtctggatgaaaaaaaagaattgtccgagaaagtcaaacatgcgaagcgacttagtgatgagcggaatttacttcaagatccaaactttagagggatcaatagacaactagaccgtggctggagaggaagtacggatattaccatccaaggaggcgatgacgtattcaaagagaattacgttacgctattgggtacctttgatgagtgctatccaacgtatttatatcaaaaaatagatgagtcgaaattaaaagcctatacccgttaccaattaagagggtatatcgaagatagtcaagacttagaaatctatttaattcgctacaatgccaaacacgaaacagtaaatgtgccaggtacgggttccttatggccgctttcagccccaagtccaatcggaaaatgtgcccatcattcccatcatttctccttggacattgatgttggatgtacagacttaaatgaggacttaggtgtatgggtgatattcaagattaagacgcaagatggccatgcaagactaggaaatctagaatttctcgaagagaaaccattagtaggagaagcactagctcgtgtgaaaagagcggagaaaaaatggagagacaaacgtgaaaaattggaatgggaaacaaatattgtttataaagaggcaaaagaatctgtagatgctttatttgtaaactctcaatatgatagattacaagcggataccaacatcgcgatgattcatgcggcagataaacgcgttcatagcattcgagaagcttatctgcctgagctgtctgtgattccgggtgtcaatgcggctatttttgaagaattagaagggcgtattttcactgcattctccctatatgatgcgagaaatgtcattaaaaatggtgattttaataatggcttatcctgctggaacgtgaaagggcatgtagatgtagaagaacaaaacaaccaccgttcggtccttgttgttccggaatgggaagcagaagtgtcacaagaagttcgtgtctgtccgggtcgtggctatatccttcgtgtcacagcgtacaaggagggatatggagaaggttgcgtaaccattcatgagatcgagaacaatacagacgaactgaagtttagcaactgtgtagaagaggaagtatatccaaacaacacggtaacgtgtaatgattatactgcgactcaagaagaatatgagggtacgtacacttctcgtaatcgaggatatgacggagcctatgaaagcaattcttctgtaccagctgattatgcatcagcctatgaagaaaaagcatatacagatggacgaagagacaatccttgtgaatctaacagaggatatggggattacacaccactaccagctggctatgtgacaaaagaattagagtacttcccagaaaccgataaggtatggattgagatcggagaaacggaaggaacattcatcgtggacagcgtggaattacttctcatggaggaatag

SEQ ID NO: 268 - DNA, 3468 bp, Bacillus thuringiensis
  source 1..3468: mol_type = genomic DNA
atggataacaatccgaacatcaatgaatgcattccttataattgtttaagtaaccctgaagtagaagtattaggtggagaaagaatagagactggttacaccccaatcgatatttccttgtcgctaacgcaatttcttttgagtgaatttgttcccggtgctggatttgtgttaggactagttgatataatatggggaatttttggtccctctcaatgggacgcatttcttgtacaaattgaacagttaattaaccaaagaatagaagaattcgctaggaaccaagccatttctagattagaaggactaagcaatctttatcaaatttacgcagaatcttttagagagtgggaagcagatcctactaatccagcattaagagaagagatgcgtattcaattcaatgacatgaacagtgcccttacaaccgctattcctctttttgcagttcaaaattatcaagttcctcttttatcagtatatgttcaagctgcaaatttacatttaccagttttgagagatgtttcagtgtttggacaaaggtggggatttgatgccgcgactatcaatagtcgttataatgatttaactaggcttattggcaactatacagatcatgctgtacgctggtacaatacgggattagagcgtgtatggggaccggattctagagattggataagatataatcaatttagaagagaattaacactaactgtattagatatcgtttctctatttccgaactatgatagtagaacgtatccaattcgaacagtttcccaattaacaagagaaatttatacaaacccagtattagaaaattttgatggtagttttcgaggctcggctcagggcatagaaggaagtattaggagtccacatttgatggatatacttaacagtataaccatctatacggatgctcatagaggagaatattattggtcagggcatcaaataatggcttctcctgtagggttttcggggccagaattcacttttccgctatatggaactatgggaaatgcagctccacaacaacgtattgttgctcaactaggtcagggcgtgtatagaacattatcgtccactttatatagaagaccttttaatatagggataaataatcaacaactatctgttcttgacgggacagaatttgcttatggaacctcctcaaatttgccatccgctgtatacagaaaaagcggaacggtagattcgctggatgaaataccgccacagaataacaacgtgccacctaggcaaggatttagtcatcgattaagccatgtttcaatgtttcgttcaggctttagtaatagtagtgtaagtataataagagctcctatgttctcttggatacatcgtagtgctgaatttaataatataattccttcatcacaaattacacaaatacctttaacaaaatctactaatcttggctctggaacttctgtcgttaaaggaccaggatttacaggaggagatattcttcgaagaacttcacctggccagatttcaaccttaagagtaaatattactgcaccattatcacaaagatatcgggtaagaattcgctacgcttctaccacaaatttacaattccatacatcaattgacggaagacctattaatcaggggaatttttcagcaactatgagtagtgggagtaatttacagtccggaagctttaggactgtaggttttactactccgtttaacttttcaaatggatcaagtgtatttacgttaagtgctcatgtcttcaattcaggcaatgaagtttatatagatcgaattgaatttgttccggcagaagtaacctttgaggcagaatatgatttagaaagagcacaaaaggcggtgaatgagctgtttacttcttccaatcaaatcgggttaaaaacagatgtgacggattatcatattgatcaagtatccaatttagttgagtgtttatctgatgaattttgtctggatgaaaaaaaagaattgtccgagaaagtcaaacatgcgaagcgacttagtgatgagcggaatttacttcaagatccaaactttagagggatcaatagacaactagaccgtggctggagaggaagtacggatattaccatccaaggaggcgatgacgtattcaaagagaattacgttacgctattgggtacctttgatgagtgctatccaacgtatttatatcaaaaaatagatgagtcgaaattaaaagcctatacccgttaccaattaagagggtatatcgaagatagtcaagacatagaaatctatttaattcgctacaatgccaaacacgaaacagtaaatgtgccaggtacgggttccttatggccgctttcagccccaagtccaatcggaaaatgtgcccatcattcccatcatttctccttggacattgatgttggatgtacagacttaaatgaggacttaggtgtatgggtgatattcaagattaagacgcaagatggccatgcaagactaggaaatctagaatttctcgaagagaaaccattagtaggagaagcactagctcgtgtgaaaagagcggagaaaaaatggagaggcaaacgtgaaaaattggaatgggaaacaaatattgtttataaagaggcaaaagaatctgtagatgctttatttgtaaactctcaatatgatagattacaagcggataccaacatcgcgatgattcatgcggcagataaacgcgttcatagcattcgagaagcttatctgcctgagctgtctgtgattccgggtgtcaatgcggctatttttgaagaattagaagggcgtattttcactgcattctccctatatgatgcgagaaatgtcattaaaaatggtgattttaataatggcttatcctgctggaacgtgaaagggcatgtggatgtagaagaacaaaacaaccaccgttcggtccttgttgttccggaatgggaagcagaagtgtcacaagaagttcgtgtctgtccgggtcgtggctatatccttcgtgtcacagcgtacaaggagggatatggagaaggttgcgtaaccattcatgagatcgagaacaatacagacgaactgaagtttagcaactgtgtagaagaggaagtatatccaaacaacacggtaacgtgtaatgattatactgcgactcaagaagaatatgagggtacgtacacttctcgtaatcgaggatatgacggagcctatgaaagcaattcttctgtaccagctgattatgcatcagcctatgaagaaaaagcatatacagatggacgaagagacaatccttgtgaatctaacagaggatatggggattacacaccactaccagctggctatgtgacaaaagaattagagtacttcccagaaaccgataaggtatggattgagatcggagaaacggaaggaacattcattgtggatagcgtggaattacttcttatggaggaataa

SEQ ID NO: 269 - DNA, 3687 bp, Bacillus thuringiensis
  source 1..3687: mol_type = genomic DNA
atgacttcaaataggaaaaatgagaatgaaattataaatgctgtatcgaatcattccgcacaaatggatctattaccagatgctcgtattgaggatagcttgtgtatagccgaggggaacaatatcgatccatttgttagcgcatcaacagtccaaacgggtattaacatagctggtagaatactaggcgtattgggcgtaccgtttgctggacaactagctagtttttatagttttcttgttggtgaattatggccccgcggcagagatcagtgggaaattttcctagaacatgtcgaacaacttataaatcaacaaataacagaaaatgctaggaatacggctcttgctcgattacaaggtttaggagattccttcagagcctatcaacagtcacttgaagattggctagaaaaccgtgatgatgcaagaacgagaagtgttctttatacccaatatatagctttagaacttgattttcttaatgcgatgccgcttttcgcaattagaaaccaagaagttccattattgatggtatatgctcaagctgcaaatttacacctattattattgagagatgcctctctttttggtagtgaatttgggcttacatcgcaggaaattcaacgctattatgagcgccaagtggaacgaacgagagattattccgactattgcgtagaatggtataatacaggtctaaatagcttgagagggacaaatgccgcaagttgggtacggtataatcaattccgtagaggtctaacgttaggagtattaggtctagtggcactattcccaagctatgacactcgcacttatccaataaatacgagtgctcagttaacaagagaagtttatacagacgcaattggagcaacaggggtaaatatggcaagtatgaattggtataataataatgcaccttcgttctctgccatagaggctgcggctatccgaagcccgcatctacttgattttctagaacaacttacaatttttagcgcttcatcacgatggagtaatactaggcatatgacttattggcgggggcacacgattcaatctcggccaataggaggcggattaaatacctcaacgcatggggctaccaatacttctattaatcctgtaacattacggttcgcatctcgagacgtttataggactgaatcatatgcaggagtgcttctatggggaatttaccttgaacctattcatggtgtccctactgttaggtttaattttacgaaccctcagaatatttctgatagaggtaccgctaactatagtcaaccttatgagtcacctgggcttcaattaaaagattcagaaactgaattaccaccagaaacaacagaacgaccaaattatgaatcttacagtcacaggttatctcatataggtataattttacaatccagggtgaatgtaccggtatattcttggacgcatcgtagtgcagatcgtacgaatacgattggaccaaatagaatcacccaaatcccaatggtaaaagcatccgaacttcctcaaggtaccactgttgttagaggaccaggatttactggtggggatattcttcgaagaacgaatactggtggatttggaccgataagagtaactgttaacggaccattaacacaaagatatcgtataggattccgctatgcttcaactgtagattttgatttctttgcatcacgtggaggtactactgtaaataattttagattcctacgtacaatgaacagtggagacgaactaaaatacggaaattttgtgagacgtgcttttactacaccttttacttttacacaaattcaaaatataattcgaacgtctattcaaggccttagtggaaatggggaagtgtatatagataaaattgaaattattccagttactgcaaccttcgaagcagaatatgatttagaaagagcgcaagaggcggtgaatgctctgtttactaatacgaatccaagaagattgaaaacagatgtgacagattatcatattgatcaagtatccaatttagtggcgtgtctatcggatgaattctgcttggatgaaaagagagaattacttgagaaagtgaaatatgcgaaacgactcagtgatgaaagaaacttactccaagatccaaacttcacatccatcaataagcaaccagacttcatatctactaatgagcaatcgaatttcacatctatccatgaacaatctgaacatggatggtggggaagtgagaacattaccatccaggaaggaaatgacgtatctaaagagaattacgtcacactaccgggtacttttaatgagtgttatccgacgtatttatatcaaaaaataggggagtcggaattaaaagcttatactcgctaccaattagaaggttatattgaagatagtcaagatttagagatatatttgattcgttataatgcgaaacatgaaacattggatgttccaggtaccgagtccctatggccgctttcagttgaaagcccaatcggaaggtgcggagaaccgaatcgatgcgcaccacattttgaatggaatcctgatctagattgttcctgcagagatggagaaaaatgtgcgcatcattcccatcatttctctttggatattgatgttggatgcacagacttgcatgagaatctaggcgtgtgggtggtattcaagattaagacgcaggaaggtcatgcaagactagggaatctggaatttattgaagagaaaccattattaggagaagcactgtctcgtgtgaagagggcagagaaaaaatggagagacaaacgtgaaaaactacaattggaaacaaaacgagtatatacagaggcaaaagaagctgtggatgctttattcgtagattctcaatatgatagattacaagcggatacaaacatcggcatgattcatgcggcagataaacttgttcatcgaattcgagaggcgtatctttcagaattacctgttatcccaggtgtaaatgcggaaatttttgaagaattagaaggtcacattatcactgcaatctccttatacgatgcgagaaatgtcgttaaaaatggtgattttaataatggattaacatgttggaatgtaaaagggcatgtagatgtacaacagagccatcatcgttctgaccttgttatcccagaatgggaagcagaagtgtcacaagcagttcgcgtctgtccggggtgtggctatatccttagtgtcacagcgtacaaagagggatatggagagggctgcgtaacgatccatgaaatcgagaacaatacagacgaactaaaatttaaaaaccgtgaagaagaggaagtgtatccaacggatacaggaacgtgtaatgattatactgcacaccaaggtacagctggatgcgcagatgcatgtaattcccgtaatgctggatatgaggatgcatatgaagttgatactacagcatctgttaattacaaaccgacttatgaagaagaaacgtatacagatgtaagaagagataatcattgtgaatatgacagagggtatgtcaattatccaccagtaccagctggttatgtgacaaaagaattagaatacttcccagaaacagatacagtatggattgagattggagaaacggaaggaaagtttatggtagatagcgtggaattactcctcatggaagaatag

SEQ ID NO: 270 - DNA, 3531 bp, Bacillus thuringiensis
  source 1..3531: mol_type = genomic DNA
atggagaataatattcaaaatcaatgcgtaccttacaattgtttaagtaatcctgaggagatacttttagatggagaaagaatatcaactggtaattcatcaattgatatctctctgtcacttgtccagcttctggtatctaactttgtaccagggggaggatttttagttggattattagattttgtatggggaatagtaggcccttctccatgggatgcatttctagtgcaaattgaacaattaattaatgaaagaatagctgcatatgctaggtctgcagcaatttctaatttagaaggattaggaaacaatttcaatatatatgtggaagcatttaaagaatgggaagcagatcctgataatccagtaaccaggactagagtagttgatcgctttcgtatacttgatgggctacttgaaagggacatcccttcatttcgaattgctggatttgaagtaccccttttatccgtttatgctcaagcggccaatttgcatctagctatattaagagattcttcaatttttggagcaagatggggattgacaacaataaatgtcaatgaaaactataataggctaattaggcatattgatgaatatgctaatcactgtgcagatacgtataatcggggataaaataatttaccaaaatctacgtatcaagattggataacatataatcgattacggagagacttaacattaactgtattagatatcgctgctttctttccaagctatgacaataggagatatccaattcagtcagttggtcaactaacaagggaaatttatacggacccattaattacttttaatccacagttacagtctgtagctcaattacctacttttaacgttatggaaagcaacgcaattagaactcctcatttatttgatgtattgaataatcttacaatttttacagattggtttagtgttggacgcaacttttattggggaggacatcgagtaatatctaaccgtataggaggaggtaacataacatctcctatatatggaagagaggcgaatcaggagcctccaagatcttttacttttaatgggcctgtttttaggactttatcaaatcctacttttagacctttacagcaaccttggccagcgccaccatttaatttacgtggtgttgaaggagtagaattttctacacctttaaatagctttacgtatcgaggaagaggtacggttgattctttaactgagttaccgcctgaggataatagtgtgcctcctcgcgaaggatatagtcatcgtttatgtcatgcaacttttgttcaaagatctggaaccccatttttaacaactggtccagtattttcttggacgcatcgtagtgctactgatcgaaatataatctacccggatgtaattaaccaaataccgttagtaaaagcattcaaccttacttcaggtacctctgtagtcagaggtccaggatttacaggaggggatatcatccgaactaacgttaatggtagtgtactaagtatgagtcttaattttagtaacacaacattacagcagtatcgtgtgtgagttcgttatgctgcttctcaaacaatggtcatgagcgtaactgttggagggagtactactggtaatcaaggattccctagtactatgagtgcaaatggggctttgacatctcaatcatttagattcgcagaatttcctgtaggtattagtgcatctggcagtcaaggtgcatcaataagtattagtaataatgtaggtagacaaatgtttcacttagatagaattgaatttctcccagttacttctacatttgaggaggaatatgatttagaaagagcgcaagaggcggtgaatgccctgtttacttctacgaaccaactagggctaaaaacagatgtaacggattatcatattgatcaagtatcaaatctagttgaatgcttatcggatgaattttgtctggatgaaaagcgagaattgtctgagaaagtcaaacatgcgaagcgactcagcgatgagcgcaatttactccaggatcgaaatttcagatccattaatgggcaactaggccgtggctggagaggaagtacggatattaccatccaaggtggagatgacgtattcaaagagaattacgtcacactgccgggtacctttgatgagtgctatccaacgtatctatatcaaaaaatagatgaatcgaaattaaaatcctatacacgttacgagttaagagggtatatcgaggatagtcaagatttagaaatctatttgattcgctacaatgcaaaacacgaaatagtaaatgtaccaggtacagggagtttatggcctctttctatagaaaattcaattgggccttgtggagaaccgaatcgctgcgcgccacaccttgaatggaatcctaatctagattgttcctgcagggacggggaaaaatgtgcccatcattcccatcatttctccttggacattgatgttggatgtacagacttaaatgaggacttaggtgtatgggtgatcttcaagattaagacgcaagatggccatgcaagactaggaaatctagagtttctcgaagagaaaccactattaggggaagcactagctcgtgtgaaaagagcggagaagaaatggagagacaaacgtgaaaaattggaatgggaaacaaatattgtttataaagaggcaaaagaatctgtagatgctttatttgtgaactctcaatatgatagattacaagcggatacgaatatcgcgatgattcatgcggcagataaacgcgttcatagaattagagaagcataccttccagaattatctgtaattccgggtgtaaatgcgggcattttcgaagaattagagggacgcattttcacagcctactctctatatgatgcgagaaatgtcattaaaaatggcgatttcaataatggtttattatgctggaacttgaaagggcatgtagatgtagaagaacaaaacaaccatcgttcagtccttgttgtcccggaatgggaagcggaggtgtcccaagaagttcgtgtctgtccaggtcgtggctatatccttcgtgttacagcgtacaaagagggatatggagagggctgcgtaaccattcatgagatcgaagacaatacagacgaactgaaatttagcaactgtgttgaagaggaagtatatccaaacaacacggtaacgtgtaatgattatactgcgactcaagaagaatacgggggtgcgtacacttcccgtaatcatggatatggcaaatcttatgaaagtaattcttccgtacaagctgattatgcgtcagtttatgaagaaaaagcggacacagatggacgaagagataatcattgcgaatctaacagagggtatggggattacacgccactaccagctggttatgtaacaaaagaattagaatacttcccagaaaccgataaggtatgggttgagattggagaaacggaaggaacattcattgtggatagtgtggaattactccttatggaggaataa

SEQ ID NO: 271 - DNA, 8373 bp, Bacillus thuringiensis
  source 1..8373: mol_type = genomic DNA
tgaaaaataaatttattatttgagaaataaaatcacttgaactcttgtcgcaaatgctaaagcctgagaattggatactatcagaaaacatgcaaatgaaaggtgaaggactcatagagattttgggaaatagttattttaaacaattcattaaattggaagatgattcaacctattttctaagactatctttcaagggaacaggtagggtacccatgattgatgaatctagttatttagttttcgcaaatgttaaggatgaaaattttactagagttattaaaaaatttgtcttcaaagggtgagtgttttattggtatttatggtacctatgtagaaaatgcaagtattatttttctaatgtatttattgttaaagagtagaaaagatataatatttaattatacaaaaattaatagaataccttttgaaagtaatattattccaaaaggaaaaagtttttttatttgtacacgctgataaaagaaagatttcttataatattgcattcagttatcatcgagataaacttgaatcattacttttagaaaagttagctccccggtccttattctccatgtaattaaggtcttgaactatccccactttcacttcgtttagaagtgagggattcctaagtaaagagttctatcgaactctaattgattaggctaaccccgcagtccttgcggttagaagccttattgcttcattctttagattgatactcgcgttaatatccctatcatggtttgtacgacaagaaggacagtcccattcacgtaggtttagatttttaacgtctttattttgatatccacaacaagaacgtaattggctggaagcaaatgttttcgatacgacaatgacttgtttgccataccattttgctttgtattctaacatgaatcgaaattgcgaccaagatacctcaataattgcttttgctaacttatgattttttaacatattcgatacttgcaaatcctctataccgataacatcgtggtttttgatgatttcagttgaaattttgtccaagtaatcttttctagtatttgatatgaattctagctatctttactctttgtttattccagcgagaagatcctttcattcttctagaaagaacacgctgtgttttcggaagttcttgtacttctgtttcaactaatagtgacacaaaatatctaccagaaggggttcgtctaacagtcgcatttacaatacgcccctctacttcgcgacttttagcaaatcgaacaaggcctagtttcggtaactttattttgttccctacaacggcaatgttttcatttgtttgttttgtggtataagattgtacgttgttcttcttagatttaaaacgcggtgcgctgttttgttttttgaaaagcgtgtataagcatccgcaaggttgcgaacagacgactgaatcgcaatactatccacttcttttagccaaacaagctctttcttcatggcaggtagtttggcagagaatgtaccataggtcaagccttttcctgtctctttgtatacttgatcccataaggataggaaatgattgaatacaaagcgagaacacccaatcgttttgttgattagaattgcttgtgcctgatttggatagatacgaaacttataggctttattcatcattatgtaattcacctccatttcggtatatgactattatacaccgaacatacattcgatagatagtggagtaacactttctgtatatctaacaattaagatggcttcctgccatcccttgttcgaattcatctcccacctactcactgggctgtggcccttcacgctccttgaggaaggagtcttcttggctaaaataataaatagatctgttttaatataagggatttgtgcccttctcgttatattcttttattagccccaaaaactagtgcaactaaatatttttataattacactgattaaatactttatttttgggagtaagatttatgctgaaatgtaataaaattcgttccattttctgtattttctcataaaatgtttcatatgctttaaattgtagtaaagaaaaacagtacaaacttaaaaggactttagtaatttaataaaaaaaggggatagtttatggaaataaataatcaaaaccaatgtgtgccttacaattgtttaagtaatcctaaggagataatattaggcgaggaaaggctagaaacagggaatactgtagcagacatttcattagggcttattaattttctatattctaattttgtaccaggaggaggatttatagtaggtttactagaattaatatggggatttatagggccttcgcaatgggatatttttttagctcaaattgagcaattgattagtcaaagaatagaagaatttgctaggaatcaggcaatttcaagattggaggggctaagcaatctttataaggtctatgttagagcgtttagcgactgggagaaagatcctactaatcctgctttaagggaagaaatgcgtatacaatttaatgacatgaatagtgctctcataacggctattccactttttagagttcaaaattatgaagttgctcttttatctgtatatgttcaagccgcaaacttacatttatctattttaagggatgtttcagttttcggagaaagatggggatatgatacagcgactatcaataatcgctatagtgatctgactagccttattcatgtttatactaaccattgtgtggatacgtataatcagggattaaggcgtttggaaggtcgttttcttagcgattggattgtatataatcgtttccggagacaattgacaatttcagtattagatattgttgcgttttttccaaattatgatattagaacatatccaattcaaacagctactcagctaacgagggaagtctatctggatttaccttttattaatgaaaatctttctcctgcagcaagctatccaaccttttcagctgctgaaagtgctataattagaagtcctcatttagtagactttttaaatagctttaccatttatacagatagtctggcacgttatgcatattggggagggcacttggtaaattctttccgcacaggaaccactactaatttgataagatcccctttatatggaagggaaggaaatacagagcgccccgtaactattaccgcatcacctagcgtaccaatatttagaacactttcatatattacaggccttgacaattcaaatcctgtagctggaatcgagggagtggaattccaaaatactataagtagaagtatctatcgtaaaagcggtccaatagattcttttagtgaattaccacctcaagatgccagcgtatctcctgcaattgggtatagtcaccgtttatgccatgcaacatttttagaacggattagtggaccaagaatagcaggcaccgtattttcttggacacaccgtagtgccagccctactaatgaagtaagtccatctagaattacacaaattccatgggtaaaggcgcatactcttgcatctggtgcctccgtcattaaaggtcctggatttacaggtggagatattctgactaggaatagtatgggcgagctggggaccttacgagtaaccttcacaggaagattaccacaaagttattatatacgtttccgttatgcttcggtagcaaataggagtggtacatttagatattcacagccaccttcgtatggaatttcatttccaaaaactatggacgcaggtgaaccactaacatctcgttcgttcgctcatacaacactcttcactccaataaccttttcacgagctcaagaagaatttgatctatacatccaatcgggtgtttatatagatcgaattgaatttataccggttactgcaacatttgaggcagaatatgatttagaaagagcgcaaaaggtggtgaatgccctgtttacgtctacaaaccaactagggctaaaaacagatgtgacggattatcatattgatcaggtatccaatctagttgcgtgtttatcggatgaattttgtctggatgaaaagagagaattgtccgagaaagttaaacatgcaaagcgactcagtgatgagcggaatttacttcaagatccaaacttcagagggatcaataggcaaccagaccgtggctggagaggaagtacggatattactatccaaggaggagatgacgtattcaaagagaattacgttacgctaccgggtacctttgatgagtgctatccaacgtatttatatcaaaaaatagatgagtcgaaattaaaagcctatacccgttatcaattaagagggtatatcgaagatagtcaagacttagaaatctatttaattcgttacaatgcaaaacacgaaatagtaaatgtaccaggtacaggaagtttatggcctctttctgtagaaaatcaaattggaccttgtggagaaccgaatcgatgcgcgccacaccttgaatggaatcctgatttacactgttcctgcagagacggggaaaaatgtgcacatcattctcatcatttctctttggacattgatgttggatgtacagacttaaatgaggacttaggtgtatgggtgatattcaagattaagacgcaagatggccacgcacgactagggaatctagagtttctcgaagagaaaccattattaggagaagcactagctcgtgtgaaaagagcggagaaaaaatggagagacaaacgcgaaacattacaattggaaacaactatcgtttataaagaggcaaaagaatctgtagatgctttatttgtaaactctcaatatgatagattacaagcggatacgaacatcgcgatgattcatgcggcagataaacgcgttcatagaattcgagaagcgtatctgccggagctgtctgtgattccgggtgtcaatgcggctatttttgaagaattagaagagcgtattttcactgcattttccctatatgatgcgagaaatattattaaaaatggcgatttcaataatggcttattatgctggaacgtgaaagggcatgtagaggtagaagaacaaaacaatcaccgttcagtcctggttatcccagaatgggaggcagaagtgtcacaagaggttcgtgtctgtccaggtcgtggctatatccttcgtgttacagcgtacaaagagggatatggagaaggttgcgtaacgatccatgagatcgagaacaatacagacgaactgaaattcaacaactgtgtagaagaggaagtatatccaaacaacacggtaacgtgtattaattatactgcgactcaagaagaatatgagggtacgtacacttctcgtaatcgaggatatgacgaagcctatggtaataacccttccgtaccagctgattatgcgtcagtctatgaagaaaaatcgtatacagatagacgaagagagaatccttgtgaatctaacagaggatatggagattacacaccactaccagctggttatgtaacaaaggaattagagtacttcccagagaccgataaggtatggattgagattggagaaacagaaggaacattcatcgtggacagcgtggaattactccttatggaggaataggaccatcccgagtatagcagttttaataaatattaattaaaatagtagtctaacttccgttccaattaaataagtaaattacagttgtaaaaaaaaacggacattactcttcaaagagcgatgtccgttttttatatggtgtgtgctaatgataagtgcgcacgaaattttattgtcaaaatagtatttacttgagaaaaagatcatgttatgtagagatattcccttataatacttgttccacattcataatttttggatgatacattacaacaaaaacagtcgcaaatttatattttctgcataaaatatatagttaagaacctaagaagagaatcaagtagtaggataaaactgaataaggaagtgtagctacaatgaataaaaaaataagaaatgaagatgagcattcatcgatagaattatcatatagtaattcaaaaaatcaaaagcataaggtaccattttgttgtaccatttcaattcctaaaggatgggaagttatatcagaatgccagcccaaaatcgtctatcaacttgattgtctgtctattataaaagaaacgtgtcgcaaagtggttgaggtaaaagattgtggtcaaacggaaatcgatgttaatgtgttaaaaataaaaggatgtatctcttttctgattaatatagaggtgaggccaaaggatgaacgatgtgtttgcttcacagattcccaaaatcaagacatagcattgtgttgtaaagataccgtatgtgtagatcatgtacttcaatgtagtgtggggcatttaccacctcttcatttaaattgtcacaatgtaacagtctgtgatgtaaaagtggtaccggtctgcgatgcggcctgtcaattcgtgaaagtgacagggggttttcaatttcatcctcacttttaaatatcgaggttccgactcccttgtatattgatgattttctcataaaaagtgactataaatataatgttaaagtttgtatatttaatatatttgcagtgggaatggaaaaggggggctttatcatcctttatagcttgtggaaagaggcgaatttaatgggaaattggtttttatttgaagtcctcgatatatgaaacccttcatgtgaatttttaaaaccgtaaccacatttaagaaaaagaaaaatgtttaaactttcatcactataacattaatatttaaatgaagtgggatatattatgcgaaacttcagatagagatagaaaatgaataactaaaaaaattcttacaagatatcattattttaatttgattattgtttctattctgcttattttatgttaaatttaatatgtacatgtaaaatggtttgaaatttagtatgattacatgcaggaaaagagtacgttcgaaaaagaacgtactcttttatatttaccttgattatcttaaaaatataatcatcatttttattaggtataaatttgatatgaaacacatacattcttaaaagtacttgttttttaatagagcaatatagtttgaactatttatttacggtatataaagctgcacgcctacactatacaggatgtatgaaaaaagttttaaaatccacagatatagcaaagtgctcatttgccatatctgtggattttaaaacataggttatgttacaaaaacattataagagattaaccgtcaaagatgtgaaccagatataagccagctagtttttttacgaatgtagtatacccaaacaatttataagacatatgtatacaaaccttaaattcaaagatttattctcaggaactctaaagtatggatgaaagagaaataagccctggttatttaaacggtgaaggaagttcaatatgataaaggaaaatatcagattagaggctctacacaactaaaaaatttggtgaaaaaatataaagaatttagtggaattacagatacttgtgggaaaaatggtggaatgaaaggtgtatcaaattggttaaaagagaaatatccagttatatggtttacgaaatttgcgggtgtacatcgttgaagtattcataccaaaggtatgaaaaatatacggctagaactcgaaaaatgattaaaaaagtaagatctattcacgtaaagcacaaagaatttggttatccacatatgaaaatccctttacaggaagagggatattttataaatcacaagaaagtatatcgcttaaagatggggctaaacatccaatctattattcgaaagaagcgttgcttctttaaagggaactattccaaattttttctgaatgttttaaatcgtgagtttaaagatcgccaacaaaatgaggcacttgttacagatattacttacctacaattccaagaggaatttcggtatctttctgttgtacaaggtgtttataataacgcaggtgtttcttggaaaatatctacgcgtaatgataatgaacttgtattagatacgattgaaatattggcacaaaaaagagacgtgcgtggaaccattctccattcagatcaaggattccagtacacatctcatgcctacaacaaacgactttccgatttaagtatcattggtaactactcccgcaaaggaaactgccataataacgtttgtatcgagtcatttttctcccatttcaaatcggagatgttgtatttgaatcattttaaaacagaagaaaatttaatacaagccaatgaaaaatatatttacttttataactatagacggttcaaaaaacgactcaaccatc

SEQ ID NO: 272 - DNA, 3516 bp, Bacillus thuringiensis
  source 1..3516: mol_type = genomic DNA
atggagatagtgaataatcagaatcaatgcgtgccttataattgtttaaataatcctgaaaatgagatattagatattgaaaggtcaaatagtactgtagcaacaaacatcgccttggagattagtcgtctgctcgcttccgcaactccaataggggggattttattaggattgtttgatgcaatatgggggtctataggcccttcacaatgggatttatttttagagcaaattgagctattgattgaccaaaaaatagaggaattcgctagaaaccaggcaatttctagattagaagggataagcagtctgtacggaatttatacagaagcttttagagagtgggaagcagatcctactaatccagcattaaaagaagagatgcgtactcaatttaatgacatgaacagtattcttgtaacagctattcctcttttttcagttcaaaattatcaagtcccatttttatcagtatatgttcaagctgcaaatttacatttatcggttttgagagatgtttcagtgtttgggcaggcttggggatttgatatagcaacaataaatagtcgttataatgatctgactagacttattcctatatatacagattatgctgtacgctggtacaatacgggattagatcgcttaccacgaactggtgggctgcgaaactgggcaagatttaatcagtttagaagagagttaacaatatcagtattagatattatttcttttttcagaaattacgattctagattatatccaattccaacaagctcccaattaacgcgggaagtatatacagatccggtaattaatataactgactatagagttggccccagcttcgagaatattgagaactcagccattagaagcccccaccttatggacttcttaaataatttgaccattgatacggatttgattagaggtgttcactattgggcagggcatcgtgtaacttctcattttacaggtagttctcaagtgataacaacccctcaatatgggataaccgcaaatgcggaaccaagacgaactattgctcctagtacttttccaggtcttaacctattttatagaacattatcaaatcctttcttccgaagatcagaaaatattactcctaccttagggataaatgtagtacagggagtagggttcattcaaccaaataatgctgaagttctatatagaagtagggggacagtagattctcttaatgagttaccaattgatggtgagaattcattagttggatatagtcatcgattaagtcatgttacactaaccaggtcgttatataatactaatataactagcctgccaacatttgtttggacacatcacagtgctactaatacaaatacaattaatccagatattattacacaaatacctttagtgaaaggatttagacttggtggtggcacctctgtcattaaaggaccaggatttacaggaggggatatccttcgaagaaataccattggtgagtttgtgtctttacaagtcaatattaactcaccaattacccaaagataccgtttaagatttcgttatgcttccagtagggatgcacgaattactgtagcgataggaggacaaattagagtagatatgacccttgaaaaaaccatggaaattggggagagcttaacatctagaacatttagctataccaattttagtaatcctttttcatttagggctaatccagatataattagaatagctgaagaacttcctattcgtggtggtgagctttatatagataaaattgaacttattctagcagatgcaacatttgaagaagaatatgatttggaaagagcacagaaggcggtgaatgccctgtttacttctacaaatcaactagggctaaaaacagatgtgacggattatcatattgatcaagtttccaatttagttgagtgtttatcggatgaattttgtctggatgaaaagagagaattatccgagaaagtcaaacatgcgaagcgactcagtgatgaacggaatttacttcaagatccaaacttcagagggatcaataggcaaccagaccgtggctggagaggaagcacggatattactatccaaggtggagatgacgtattcaaagagaattacgtcacattaccgggtacctttgatgagtgctatccaacgtatttatatcaaaaaatagatgagtcgaagttaaaagcttatacccgctatgaattaagagggtatatcgaggatagtcaagacttagaaatctatttaattcgctacaatgcaaaacacgagacagtaaacgtgccaggtacgggttccttatggccgctttcagcccaaagtccaatcggaaagtgtggagaaccgaatcgatgcgcgccacaccttgaatggaatcctaatctagattgctcctgcagagacggggaaaaatgtgcccatcattcccatcatttctccttggacattgatgttggatgtacagacttaaatgaggacttaggtgtatgggtgatattcaagattaagacacaagatggctatgcaagactaggaaatctagagtttctcgaagagaaaccactattaggggaagcactagctcgtgtgaaaagagcggagaaaaaatggagagacaaatgcgaaaaattggaatgggaaacaaatattgtttataaagaggcaaaagaatctgtagatgctttatttgtaaactctcaatatgatagattacaagcggatacgaatatcgcgatgattcatgcggcagataaacgcgttcatagcattcgagaagcgtatctgccagagctgtctgtgattccgggtgtcaatgcggctatttttgaagaattagaagggcgtattttcactgcattctccctatatgatgcgagaaatgtcattaaaaatggcgatttcaataatggcttatcatgctggaacgtgaaagggcatgtagatgtagaagaacagaacaaccatcgttcggtccttgttgttccagaatgggaagcagaagtgtcacaagaagttcgtgtttgtccgggtcgtggctatatccttcgtgttacagcgtacaaagagggatatggagagggctgtgtaacgattcatgagatcgaagacaatacagacgaactgaaattcagcaactgtgtagaagaggaagtatatccaaacaacacggtaacgtgtaataattatactgcgactcaagaagaacatgagggtacgtacacttcccgtaatcgaggatatgacgaagcctatgaaagcaattcttctgtacatgcgtcagtctatgaagaaaaatcgtatacagatagacgaagagagaatccttgtgaatctaacagaggatatggggattacacaccactaccagctggctatgtgacaaaagaattagagtacttcccagaaaccgataaggtatggattgagatcggagaaacggaaggaacattcatcgtggacagcgtggaattacttcttatggaggaataa

SEQ ID NO: 273 - DNA, 3525 bp, Bacillus thuringiensis
  source 1..3525: mol_type = genomic DNA
atggagaataatattcaaaatcaatgcgtaccttacaattgtttaagtaatcctgaagtagaaatattaagtgaagaaagaagtactggcagattaccgttagatatatccttgtcgcttacacgtttccttttgagtgaatttgttccaggtgtgggagttgcgtttggattatttgatttaatatggggttttataactccttctgaatggagtttatttcttttacagattgaacaactgattgaacaaagaattgaaacattggaaaggaaccgggcaattactacattacgagggttagcggatagctatgaagtttaccttgaggcactaagagagtgggaagaaaatcctaataatgcacaattaagggaagatgtgcgtattcgatttgctaatacagacgacgctttaataacagcaataaataattttacacttacaagttttgaaatccctcttttatcggtctatgttcaagcggcgaatctacatttatcactattaagagatgctgtatcgtttgggcagggttgggggctggatatagctactgttaataatcattataataggttaataaatcttattcatagatatacggaacattgtttggacacatacaatcaaggattagaaaacttaagaggtactaatactcgacaatggtcaagattcaatcagtttaggagagagttaacattgactgtattagatatcgttgctctttttccgaactacgatgctggagcatatccaattcaaacgtcatcccaattaacaagggaaatttatacaagttcagtaattgaagattctccagtttctgctaatatacctaatggttttaatagagcggaatttggagttagaccgccccatcttatggactttatgaattctttgtttgtaactgcagagactgttagaagtcaaactgtgtggggaggacacttagttagttcacgaaatacggctggtaaccctataaatttccctatttatgggatcttcaatcctggtggcgccatttggattgcagatgaggatccacgtcctttttatcggacattatcagatcctgtttttgtccgaggaggatttgggaatcctcattatgtacttgggcttaggggagtagcatttcaacaaactggtacgaaccacacccgaacatttagaaatagtgggaccatagattctctagatgaaatcccacctcaggataatagtggggcaccttggaatgattatagtcatgtattaaatcatgttacatttgtaaggtggcctggtgagattgcaggaagtgattcatggagagcgccaatgttttcttggacacaccgtagtgcagatcgtacaaatatcattaatccaaatataattacacaaatacctgctgtaaaagcacacaatcttcattcgggttctacggttgttagaggacccgggtttacaggtggtgatctcttacgaagaacgaatactggtacatttgcagatataagagtaaatattactgggccattatctcaaagatatcgtgtaagaattcgctatgcttctacgacagatttacaatttttcacgagaatcaatggaacttctgtaaatcaaggtaatttccaaagaactatgaatagagggggtaatttagagtctggaaactttaggactgcaggatttagtacgccttttagtttttcaaatgcgcaaagtacattcacattgggtactcaggctttttcaaatcaggaagtttatatagatcgaattgaatttgtcccggcagaagtaacattcgaggcagaatctgatttagaaagagcgcaaaaggcggtgaatgccctgtttacttctacaagccaactagggctaaaaacaaatgtaacgggttaccatattgatcaagtgtccaatttagttgcgtgtttatcggatgaattttgtctggatgaaaagagagaattgtccgagaaagttaaacatgcgaagcgactcagtgataagcggaatttacttcaagatccaaacttcagagggatcagtaggcaaccagaccatggctggagaggaagtacggatattactatccaaggaggagatgacgtattcaaagagaattacgttacgctaccgggtacttttgatgagtgctatccaacgtatttatatcaaaaaatagatgagtcgaaattaaaagcctatacccgttatcaattaagagggtatatcgaagatagtcaagacttagaaatctatttaattcgttacaattcaaaacacgaaatagtaaatgtaccaggtacagggagtttatggcctctttctgtagaaaatcaaattggaccttgtggagaaccgaatcgatgcgcgccacaccttgaatggaatcctgatttacactgttcctgcagagacggggaaaaatgtgtgcatcattctcatcatttctctttggacattgatgtcggatgtacagatttaaatgaggacctaggtgtatggttgatattcaagattaagacgcaagatggccacgcaagactagggaatctagagtttctcgaagaggaaccgttattaggcgaagcgttagcacgtgtgaagagagcggagaagaagtggagagacaaacgcgagaaactgcagttggaaacaaatattgtctataaagaggcaaaagaatctgtagatgctttatttgtaaactctcaatatgatagattacaagcggatacgaacatcgcgatgattcatgcggcagataaacgcgttcatagaatccgggaagcgtatctgccagagttgtctgtgattccaggtgtcaatgcggccattttcgaagaattagagggacgtatttttacagcgtattccttatatgatgcgagaaatgttattaaaaatggcaatttcaataatggcttattatgctggaacgtgaaagggcatgtagatgtagaagagcaaaacaaccaccgttcggtccttgttatcccagaatgggaagcagaagtgtcacaaaaagttcgtgtctgtccaggtcgtggttatatccttcgtgttacagcgtacaaagagggatatggagaaggtagcgtaacgatccatgagatcgaagacaatacagacgaattaaagtttagcaactgtgtagaagaaggatatccaaacaacacggtaacgtgtaatgagtatactatgaatcaaggggtaggagagtgtacggatgcatgtaatgtccgtaatcgtggatatgaggatgcatatggacacaatccttcaacgcctgttcattacacaacgccgtacgaagaagaaacgtatacagatgaacgaagagagaatccttgtgaagctaacaaagggtatgtgaattacacgccactaccagttggttatgtaacaaaagaattagaatacttcccagaaaccgataaggtatgggttgagattggagaaacggaaggaacattcattgtggatagtgtggaattactccttatggaggaataa

SEQ ID NO: 274 - DNA, 2920 bp, Bacillus thuringiensis
  source 1..2920: mol_type = genomic DNA
atcgatgaaaatatctctgctttttctttctttatttggtatatgctttacttgtaatcgaaaataaagcactaataagagtatttataggtgtttgaagtcatttcagttcatttttaaaggaggtttaaaagtgttagaaagttattaaggaataatacttacagtaaatcctacctatattttacaattaattatgatatttatgcataaattaaaaatgctttatttgacattacagctaagtataattttttatgaataaaattttatttgaaaattaaataatattatatgtgagggattaatatgaaactaaagaatccagataagcatcaaagcttgtctagcaatgcgaaagtagataaaatcgctacggattcactaaaaaatgaaacagatatagaattgaaaaatattaatcatgaggatttcctaagaatgtctgagcatgagagtattgatccgtttgttagtgcatcaacaattcaaacgggtattggaattgctggtaagattcttggtactctaggtgttccttttgctggacaaatagctagcctctatagttttatcttaggcgagctttggcctaaagggaaaagtcaatgggaaatctttatggaacatgtagaagagcttattgaccaaaaaatatcaacttacgcaagaaacatagcacttgcagatttaaaaggcttaggagatgctttggctgtctaccatgaatcgcttgaaagttggattaaaaatcgcaacaacgcaagggctacaagtgttgtcaagagccaatatattgctttagaactattgtttgttcaaaagctgccttcttttgcagtatcaggtgaggaagtaccattattgccaatatatgcacaagctgcaaatttacacttattattactaagagatgcttctgtttttggaaaagagtggggattatctaattcgcaaatttctacattttataatcgtcaagtcgaaagaacgagtgactattccgaccattgtgtgaaatggtatagtacaggtctaaataacttgagaggtacaaatgccgaaagctgggtccgttataatcaatttcgtaaagatatgacattaatggtactagatttaatcgcattattcccaagctatgatacacttgtatatccaattaaaaccacttctcaacttacaagagaagtatatacagacgcaattgggacagtacatccaaatgcaagttttgcaagtacgacctggtataataataatgcaccttcgttctctgccatagagtctgctgttgttcgaaacccgcatctactcgattttttagaacaagttacaatttacagcttattaagtaggtggagtaacactcagtatatgaatatgtggggaggacatagactggaattccgaacaataggtggagtgttaaatacctcaacacaagggtctactaatacttctattaatcctgtaacattaccgttcacgtctcgagacgtctataggactgaatcattggcagggctgaatctatttttaactcaacctgttaatggagtacctagggttgattttcattggaaattcgccacacttccgattgcatctgataatttttattatctagggtatgctggagttggtacgcaattacaagattcagaaaatgaattaccacctgaaacaacaggacagccaaattatgaatcatatagtcatagattatcccatataggactcatttcagcatcccacgtgaaagcattggtatattcttggacacatcgtagtgcagatcgtacaaatacaattgagccaaatagcattacacaaataccattagtaaaagcgttcaatctgtcttcaggtgccgctgtagtgagaggaccaggatttacaggtggggatatccttcgaagaacgaatactggtacatttggggatatacgagtaaatattaatccaccatttgcacaaagatatcgcgtgaggattcgctatgcttctactacagatttacaattccatacgtcaattaacggtaaagctattaatcaaggtaatttttcagcaactatgaatagaggagaggacttagactataaaacctttagaactgtaggctttaccactccatttagcttttcagatgtacaaagtacattcacaataggtgcttggaacttctcttcaggtaacgaagtttatatagatcgaattgaatttgttccggtagaagtaacatatgaggcagaatatgattttgaaaaagcgcaagagaaggttactgcactgtttacatctacgaatccaagaggattaaaaacagatgtaaaggattatcatattgaccaggtatcaaatttagtagagtctctatcagatgaattctatcttgatgaaaagagagaattattcgagatagttaaatacgcgaagcaaatccatattgagcgtaacatgtagaattaaaatctacctaaatccagaaaaataaaagggttaaatatacaattcttgtaccaatattttgagtgattagatgtaggatgaaatttaattgtatgctatttaacagtagagatattaaaaattaatttatctatacattaatagtatagacatacaaacataagagagcattgtcttttcgtaggctacaatgctctctatttactatttatttttcttttgtatcttcaaattgacgttgttctaagcgttctattgcagctcgtcgtttagtatcatcaatgtttgtataaagagatgttgtttccatagaattatgtcccatttgatttgctaataatactaaatctttattttcattatagtgattagtagcataagtatgacgtaatttatgagggcttttcttttcatcaaaagcccttgtgtatttctctgtaagctt

SEQ ID NO: 275 - DNA, 4623 bp, Bacillus thuringiensis
  source 1..4623: mol_type = genomic DNA
tcaatttaaatatttcattttgaatataataaaactaaataatatgaagtttagaatattaatgttatgagctgctatcaaaaggaaagctgctatcaaaaggaaagcaataatgaagaataaataatagcttatatttttaggaaggccaaaagataagctattaaaacatactgaattcattctaaatataggtaatatatttatatttaataaaattcgttgcattttgtgaatattttcataagctgaaccatatgatttaaactggggccaagataaatggcccaaagttataaaggcatatgtgctaaagtccaaaaaacgggaggtaaatcatcaaaaaaatcgtactatacaattttcttaggtaatgctgtgttaaaactaatcagtggagaaaagttaaataggttgtaatgtaagcacaacgtaaaaggaggagttatattgaattcaaataggaaaaatgagaatgaaattataaatgctttatcgattccagctgtatcgaatcattccgcacaaatggatctatcaccagatgctcgcattgaggatagcttgtgtgtagccgaggggaacaatattgatccatttgttagcgcatcaacagtccaaacaggtattagtatagctggtagaatattaggcgtattaggggtgccgtttgccggacaactagctagtttttatagttttcttgttggggaattatggcctagcggcagagatccatgggaaatttttatggaacatgtcgaacaaattgtaagacaacaacaaataacggacagtgttagggataccgctattgctcgtttagaaggtctaggaagagggtatagatcttaccagcaggctcttgaaacttggttagataaccgaaatgatgcaagatcaagaagcattattcgtgagagatatattgctttagaacttgacattactactgctataccgcttttcagcatacgaaacgaagaggttccattattaatggtatatgctcaagctgcaaatttacacctattattattgagagacgcatccctttttggtagtgaatgggggatgtcatctgccgatgttaaccaatattaccaagaacaaatcagatatacagaggaatattctaaccattgcgtacaatggtataatacagggctaaatagattaagagggacaactgccgaaacttgggtacggtataatcaattccgtagagacctaacattaggtgtattagatttagtggcactattcccaagctatgacactcggacttatcccattccaactaccgcccaacttacaagagaagtgtatacagatccaaacggtgttgtagcaggacccaataatagttggtttagaaatggagcttcgttttccgctatagaaaacgcaattattcgacaacctcacctatatgattttctaacgaaccttacaatttacacgagaagaagtcaagtaggcactacaattatgaatttgtgggcagggcatagaatcacgtttaatagaatacaaggtggttctactagtgaaatggtgtatggggctattactaacccagttagtgttagtgacataccatttgtcaatcgggatgtttaccgaactgtatcattagctggtgggcttggctctctgagtggaatacgttatggtttaactagagttgattttgatatgatatttcgtaaccatcctgatatagtaactggattattttatcatccgggacacgcgggcattgcaacccaagtaaaagattcagacacagaattaccacctgaaacgacagaacagccaaattatagagcatttagtcatctactaagtcatatttcaatgggtccaacgactcaagacgtacctccagtatattcttggacacaccagagtgcagatcgtacgaatacaatcaattcggataggataacacaaataccattggtaaaggcgcataccctccaatcgggtaccactgtagtaaaagggccagggtttacaggaggggatatcctccgtcgaacaagtggaggaccatttgcttttagtaatgttaatctagattttaacttgtcacaaaggtatcgtgctagaattcgttatgcctctactactaacctaagaatttacgtaacggttgcaggtgaacgaatttttgctggtcaatttgacaaaacgatggatgctggtgccccattaacattccaatcttttagttacgcaactattaatacagcttttacattcccagaaagatcgagcagcttgactataggtgccgatacgtttagttcaggtaatgaagtttatgtagatagatttgaattaatccaagttactgcaaccttcgaggcagaatctgatttagaaagagcgcggaaggcggtgaatgccttgtttacttctacaaatccaagaggattaaaaacagatgtaacagattatcatatcgaccaagtatccaatctagtagagtgtttatcagatgaattctgcttggataaaaagagagaattactcgaagaagttaaatatgcaaagcgacttagtgatgagcggaatttactccaagatccgacttttacatccattagtggccaaacagaccgtggatggataggaagcactggtattagcattcaaggaggcgatgacatattcaaagaaaattatgtgagactaccaggtaccgttgacgagtgctatccaacgtatttgtatcaaaaaatagatgagtcacaattaaaatcttatactcgctatcaattaagaggctatatcgaagatagtcaagatttagagatttatttgattcgttacaatgcgaaacatgaaacattaagtgtgccaggtactgagtccccatggccatcttcaggagtatatccaagtggaaggtgcggagaaccgaatcgatgtgcaccacgaatcgaatggaatcccgatctagactgttcttgcagatatggagagaaatgcgttcatcattcccatcatttctccttggatattgatgttggatgtacagatttgaatgaggatctaggcgtatgggtgatatttaagattaagacacaagatggccatgcgaaactaggaaatctagaattcatcgaagagaaaccattattaggaaaagcgctgtcccgtgtgaagagagccgagaaaaaatggagagacaaatatgaaaaactacagttggagacaaaacgagtatatacagaggcaaaagaatctgtggatgctttatttgtagactctcaatatgataaattgcaagctaatacgaacatcgggataatccatggggcagataaacaggttcatcgaatccgagaaccgtatctttcagaattacctgtcattccgagtatcaatgcggccatttttgaagaattagagggccatattttcaaagcgtattctctatatgatgcaagaaatgtcataaaaaatggcgatttcaataatggtttatcgtgttggaacgtaaaagggcatgtagatgtacaacagaaccatcatcgttcggtccttgttctctcagaatgggaagcagaagtgtcacaaaaggtacgcgtatgtccagatcgaggctatatccttcgtgtcacagcgtataaagagggatatggagagggatgcgtaacgattcatgaattcgaagataatacggatgtactgaagtttagaaactttgtagaagaggaagtatatccaaacaacacggtaacgtgtaatgattatactacgaatcaaagtgcagaaggatctacggatgcatgtaattcctataatcgtggatatgaggatggatatgagaatagatatgaacccaatccttcagcaccagttaattacacaccgacgtacgaagaaggaatgtatacagatacacagggatataatcattgtgtatctgatcgaggatataggaatcatacaccattaccagctggttatgtaacactagaattagagtatttcccagaaacagagcaagtatggatagaaattggagaaacggaaggaacatttatcgtaggtagcgtggaattactccttatggaggaataggatacgttttaaagtgaaacgtatgcaaataaagaatgatcgctggcctatattgacagataaataaggaaattaatatatgaacaaaaacggacatcactcttaagggtatgatgtccgttttttatatgatttggtttaaagattgatatgtaaatatatttttttacgaaggctttacataaaaaagaatctttatagcaaaatttaaaattaaatcttacatatagctggattgaaaataaagcaaacttattaattgaattatataaaaagattaaatgctattcaagatcttaacattttgttaaatctacttcattaacgttacttaaatgtattttataataatatttagtaacttgtattggtattttaaattttttgattattaaaagacgttaaatataaaaacagaaagaaggaatgaatttggataataactccttattgaaaagtatgcattgagattataaaaactaaaatcgtggtattttttataataacaaccatgttttttttcat

SEQ ID NO: 276 - DNA, 1902 bp, Bacillus thuringiensis
  source 1..1902: mol_type = genomic DNA
atgaatagtgtattgaatagcggaagaactaccattcgtgatgcgtataatgtagtggctcatgatccatttagttttcaacacaaatcattagataccatacaaaacgaatggacggagtggaaaaaaaataatcatagtttatatgtagatcctattgttggaactgtggctagttttctgttaaagaaagtggggagtcttattggaaaaaggatactaagtgagttacggaatttaatatttcctagtggcagtacaaatctaatgcaagatattttaagagagacagaaaaattcctgaatcaaagacttaatacagacactcttgcccgtgtaaatgcggaattgacagggatgcaagcaagtgtagaagagtttaatcgacaagtagataattttttgaaccctaaccgaaacgctgttcctttatcaataacttcttcagttaatacaatgcagcaattatttctaaatagattaccccagttccagatgcaaggataccaactgttattattacctttatttgcacaggcagccaatttacatctttcttttattagagatgttattcttaatgcagatgaatggggaatttcagcagcaacattacgtacgtatcgagattacctgaaaaattatacaagagattactctaactattgtataaatacgtatcaaagtgcgtttagaggcttaaacactcgtttacacgatatgctagaatttagaacatatatgtttttgaatgtatttgaatatgtatctatctggtcgttgtttaaatatcaaagtcttctagtatcttccagttcgaatttatattcaagtggtagtggaccacagcagacccaatcatttacttcacaagactggccatttttatactctcttttccaagttaattcaaattatgtgttaaatggttttagtggtgctaggctttctaataccttccctaatatagttggtttacctggttctactacaactcacgcattgcttgctgcaagggtcaattacagtggaggaatttcgtctggtgatataggtgcatcgccgtttaatcaaaattttacttgtagcacatttctctcccctttgttaacgccatttgttaggagttggctagattcaggttcagatcgggagggtgttgccaccgttacaaattggcaaacagaatcctttgagacaactttagggttaaggagtggtgcttttacagctcgcggtaattcaaactatttcccagattattttattcgtaatatttctggagttcctttagttgttagaaatgaagatttaagaagaccgttgcactataatgaaataagaaatatagcaagtccttcaggaacacctggtggagcacgagcttatatggtatctgtgcataacagaaaaaataatatctatgccgttcatgaaaatggttctatgattcatttagcgccaaatgactatacaggatttactatttcgccaatacatgcaactcaagtgaataatcaaacacgaacatttatttctgaaaaatttggaaatcaaggtgattccttaagggttgaacaaagcaacacgacagctcgttatacgcttagagggaatggaaatagttacaatctttatttaagagtatcttccataggaaattccactattcgagttactataaacggtagagtttatactgctttaaatgttaatactactacaaataacgatggagttaatgataatggagctcgtttttcagatattaatatcggtaatgtagtagcaagtagtaatactgatgtaccattagatgtaaatataacattaaactccggcactcaatttgatcttatgaatattatgcttgtgccaactaatatttcaccactttattaa

SEQ ID NO: 277 - DNA, 1952 bp, Bacillus thuringiensis
  source 1..1952: mol_type = genomic DNA
tccatggatgaatccgaacaatcgaagtgaacatgatacaataaaaactactgaaaataatgaggtgccaactaaccatgttcaatatcctttagcggaaactccaaatccaacactagaagatttaaattataaagagtttttaagaatgactgcagataataatacggaagcactagatagctctacaacaaaagatgtcattcaaaaaggcatttccgtagtaggtgatctcctaggcgtagtaggtttcccgtttggtggagcgcttgtttcgttttatacaaactttttaaatactatttggccaagtgaagacccgtggaaggcttttatggaacaagtagaagcattgatggatcagaaaatagctgattatgcaaaaaataaagctcttgcagagttacagggccttcaaaataatgtcgaagattatgtgagtgcattgagttcatggcaaaaaaatcctgtgagttcacgaaatccacatagccaggggcggataagagagctgttttctcaagcagaaagtcattttcgtaattcaatgccttcgtttgcaatttctggatacgaggttctatttctaacaacatatgcacaagctgccaacacacatttatttttactaaaagacgctcaaatttatggagaagaatggggatacgaaaaagaagatattgctgaattttataaaagacaactaaaacttacgcaagaatatactgaccattgtgtcaaatggtataatgttggattagataaattaagaggttcatcttatgaatcttgggtaaactttaaccgttatcgcagagagatgacattaacagtattagatttaattgcactatttccattgtatgatgttcggctatacccaaaagaagttaaaaccgaattaacaagagacgttttaacagatccaattgtcggagtcaacaaccttaggggctatggaacaaccttctctaatatagaaaattatattcgaaaaccacatctatttgactatctgcatagaattcaatttcacacgcggttccaaccaggatattatggaaatgactctttcaattattggtccggtaattatgtttcaactagaccaagcataggatcaaatgatataatcacatctccattctatggaaataaatccagtgaacctgtacaaaatttagaatttaatggagaaaaagtctatagagccgtagcaaatacaaatcttgcggtctggccgtccgctgtatattcaggtgttacaaaagtggaatttagccaatataatgatcaaacagatgaagcaagtacacaaacgtacgactcaaaaagaaatgttggcgcggtcagctgggattctatcgatcaattgcctccagaaacaacagatgaacctctagaaaagggatatagccatcaactcaattatgtaatgtgctttttaatgcagggtagtagaggaacaatcccagtgttaacttggacacataaaagtgtagacttttttaacatgattgattcgaaaaaaattacacaacttccgttagtaaaggcatataagttacaatctggtgcttccgttgtcgcaggtcctaggtttacaggaggagatatcattcaatgcacagaaaatggaagtgcggcaactatttacgttacaccggatgtgtcgtactctcaaaaatatcgagctagaattcattatgcttctacatctcagataacatttacactcagtttagacggggcaccatttaatcaatactatttcgataaaacgataaataaaggagacacattaacgtataattcatttaatttagcaagtttcagcacaccattcgaattatcagggaataacttacaaataggcgtcacaggattaagtgctggagataaagtttatatagacaaaattgaatttattccagtgaattaatgaggatcca

SEQ ID NO: 278 - DNA, 3543 bp, Bacillus thuringiensis
  source 1..3543: mol_type = genomic DNA
atgaatccttatcaaaataaaaatgaatatgaaacattaaatgcttcacaaaaaaaattaaatatatctaataattatacaagatatccaatagaaaatagtccaaaacaattattacaaagtacaaattataaagattggctcaatatgtgtcaacagaatcagcagtatggtggagattttgaaacttttattgatagtggtgaactcagtgcctatactattgtagttgggaccgtactgactggtttcgggttcacaacacccttaggacttgctttaataggttttggtacattaataccagttctttttccagcccaagaccaatctaacacatggagtgactttataacacaaactaaaaatattataaaaaaagaaatagcatcaacgtatataagtaatgctaataaaattttaaacaggtcgtttaatgttatcagcacttatcataatcaccttaaaacatgggagaataatccaaacccacaaaatactcaggatgtaaggacacaaatccagctagttcattaccattttcaaaatgtcattccagagcttgtaaactcttgtcctcctaatcctagtgattgcgattactataacatactagtattatctagttatgcacacgcagcaaacttacatctgactgtattaaatcaagccgtcaaatttgaagcgtatttaaaaaacaatcgacaattcgattatttagagcctttgccaacagcaattgattattatccagtattgactaaagctatagaagattacactaattattgtgtaacaacttataaaaaaggattaaatttaattaaaacgacgcctgatagtaatcttgatggaaatataaactggaacacatacaatacgtatcgaacaaaaatgactactgctgtattagatgttgttgcactctttcctatttatgatgtaggtaaatatccaataggtgtccaatctgaacttactcgagaaatttatcaggtacttaacttcgaagaaagcccctataaatattatgactttcaatatcaagaggattcacttacacgtagaccgcatttatttacttggcttgattctttgaatttttatgaaaaagcgcaaactactcctaataattttttcaccagccattataatatgtttcattacacacttgataatatatcccaaaaatctagtgtttttggaaatcacaatgtaactgataaattaaaagctcttggtttggcaacaaatatttatatttttttattaaatgtcataagcttagataataaatatctaaatgattataataatattagtaaaatggatttttttataactaatggtactagacttttggagaaagaacttacagcaggatctgggcaaataacttatgatgtaaataaaaatattttcgggttaccaattcttaaacgaagagagaatcaaggaaaccctaccctttttccaacatatgataactatagtcatattttatcatttattaaaagtcttagtatccctgcaacatataaaactcaagtgtatacgtttgcttggacacactctagtgttgatcctaaaaatacaatttatacacatttaactacccaaattccagctgtaaaagcgaattcacttgggactgcttctaaggttgttcaaggacctggtcatacaggaggggatttaattgatttcaaagatcatttcaaaattacatgtcaacactcaaattttcaacaatcgtattttataagaattcgttttgcttcaaatggaagcgcaaatactcgagctgttataaatcttagtatcccaggggtagcagaactgggtatggcactcaaccccactttttctggtacagattatacgaatttaaaatataaagattttcagtacttagaattttctaacgaggtgaaatttgctccaaatcaaaacatatctcttgtgtttaatcgttcggatgtatatacaaacacaacagtacttattgataaaattgaatttctgccaattactcgttctataagagaggatagagagaaacaaaaattagaaacagtacaacaaataattaatacattttatgcaaatcctataaaaaacactttacaatcagaacttacagattatgacatagatcaagccgcaaatcttgtggaatgtatttctgaagaattatatccaaaagaaaaaatgctgttattagatgaagttaaaaatgcgaaacaacttagtaaatctcgaaatgtacttcaaaacggggattttgaatcggctacgcttggttggacaacaagtgataatatcacaattcaagaagatgatcctatttttaaagggcattaccttcatatgtctggggcgagagacattgatggtacgatatttccgacctatatattccaaaaaattgatgaatcaaaattaaaaccgtatacacgttacctagtaaggggatttgtaggaagtagtaaagatgtagaactagtggtttcacgctatggggaagaaattgatgccatcatgcatgttccagctgatttaaactatctgtatccttctacctgtgattgtgaagcgtctaatcgttgtgagacgtccgctgtgccggctaacattgggaacacttctgatatgttgtattcatgccaatatgatacagggaaaaagcatgtcgtatgtcaggattcccatcaatttagtttcactattgatacaggggcattagatacaaatgaaaatataggggtttgggtcatgtttaaaatatcttctccagatggatacgcatcattagataatttagaagtaattgaagaagggccaatagatggggaagcactgtcacgcgtgaaacacatggagaagaaatggaacgatcaaatggaagcaaaacgttcggaaacacaacaagcatatgatgtagcgaaacaagccattgatgctttattcacaaatgtacaagatgaggctttacagtttgatacgacactcgctcaaattcagtacgctgagtatttggtacaatcgattccatatgtgtacaatgattggttgtcagatgttccaggtatgaattatgatatctatgtagagttggatgcacgagtggcacaagcgcgttatttgtatgatataagaaatattattaaaaatggtgattttacacaaggggtaatggggtggcatgtaactggaaatgcagacgtacaacaaatagatggtgtttctgtattggttctatttaattggagtgctggcgtatctcaaaatgtccatctccaccataatcatgggtatgtcttaggtgttattgccaaaaaagaaggacctggaaatgggtatgtcacgcttatggattgggaggagaatcaagaaaaattgacgtttacgtcttgtgaagaaggatatattacgaagacagtagatgtattcccagatacagatcgtgtacgaattgagataggcgagaccgaaggttcgttttatatcgaaagcattgatttaatttgcatgaacgagtga

SEQ ID NO: 279 - DNA, 1470 bp, Bacillus thuringiensis
  source 1..1470: mol_type = genomic DNA
atgtttacaagtggtgcgaaaaataggttaaagctagaaacgacagattatgaaatagatcaagtggctaatgctatagaatgtatgtcagatgaacaatattcaaaagaaaaactgatgttatgggatcaagtaaaacatgcaaaataccttagtcagtctcgaaatttgcttcaaaatggtgattttgaagatgtatttcatggatggactacaagtgatcatatgtacattcagtcggataattctacttttaaaggaaattatctgaatatatctggggcgcgagacatatacttaacgatatttccaacatacatttaccaaaaaattgatgaatcaaaattaaaaccgtatacacgttacctagtaaggggatttgtaggaagtagtaaagatgtagaactagtggtttcacgctatggaaaagaaatagatacagtcatgaatgtaccatttgatatcccgtatgtatcttctaggcctgtttgtaatgaattatatgatggtgaacaacaaccgtatccaaatgggaatgtaggatattataatccaatgtcagcttttacgccttcttacacatctgatgctcgtcagtgtatgccagggaaaaaacagatagtctgtcaagattctcatcagtttaagttccatattgatacaggtgaagtagattataatacaaatatagggatttgggtcatgtttaaaatatcttccccagatggatacgcattattagataatttagaagtaattgaagaagggccaatagatggggaagcactgtcacgcgtgaaacacatggagaagaaatggaacgatcaaatggaagcaaaacgttcggaaacacaacaagcatatgatgtagcgaaacaagccattgatgctttattcacaaatgtacaagatgaggctttacagtttgatacgacactcgctcaaattcagtacgctgagtatttggtacaatcgattccatatgtgtacaatgattggttgtcagatgttccaggtatgaattatgacatctatgtagagttggatgcacgagtggcacaagcgcgttatttgtatgatacaagaaatattattaaaaatggtgattttacacaaggggtaatggggtggcatgtaactggaaatgcagacgtacaacaaatagatggtgtttctgtattggttctatctaattggagtgctggcgtatctcaaaatgtccatctccaacataatcatgggtatgtcttacgtgttattgccaaaaaagaagggcctggaaatgggtatgtcacgcttatggattgtgaggagaatcaagaaaaattgacgtttacgtcttgtgaagaaggatatattacgaaaacagtagatgtattcccagatacagattgtgtacgaattgagataggcgaaaccgaaggttcgttttatatcgaaagcattgaattaatttgcatgaacgagtaa

SEQ ID NO: 280 - DNA, 4377 bp, Bacillus thuringiensis
  source 1..4377: mol_type = genomic DNA
atggcaattttaaatgaattatatccatctgtaccttataatgtattggcgtatacgccaccctcttttttacctgatgcgggtacacaagctacacctgctgacttaacagcttatgaacaattgttgaaaaatttagaaaaagggataaatgctggaacttattcgaaagcaatagctgatgtacttaaaggtatttttatagatgatacaataaattatcaaacatatgtaaatattggtttaagtttaattacattagctgtaccggaaattggtatttttacacctttcatcggtttgttttttgctgcattgaataaacatgatgctccacctcctcctaatgcaaaagatatatttgaggctatgaaaccagcgattcaagagatgattgatagaactttaactgcggatgagcaaacatttttaaatggggaaataagtggtttacaaaatttagcagcaagataccagtctacaatggatgatattcaaagccatggaggatttaataaggtagattctggattaattaaaaagtttacagatgaggtactatctttaaatagtttttatacagatcgtttacctgtatttattacagataatacagcggatcgaactttgttaggtcttccttattatgctatacttgcgagcatgcatcttatgttattaagagatataattactaagggtccgacatgggattctaaaattaatttcacaccagatgcaattgattcctttaaaaccgatattaaaaataatataaagctttactctaaaactatttatgacgtatttcagaagggacttgcttcatacggaacgccttctgatttagagtcctttgcaaaaaaacaaaaatatattgaaattatgacaacacattgtttagattttgcaagattgtttcctacttttgatccagatctttatccaacaggatcaggtgatataagtttacaaaaaacacgtagaattctttctccttttatccctatacgtactgcagatgggttaacattaaataatacttcaattgatacttcaaattggcctaattatgaaaatgggaatggcgcgtttccaaacccaaaagaaagaatatcaaaacaattcaaactgtatcctagttggagagcgggacagtacggtgggcttttacaaccttatttatgggcaatagaagtccaagattctgtagagactcgtttgtatgggcagcttccagctgtagatccacaggcagggcctaattatgtttccatagattcttctaatccaatcatacaaataaatatggatacttggaaaacaccaccacaaggtgcgagtgggtggaatacaaatttaatgagaggaagtgtaagcgggttaagttttttacaacgagatggtacgagacttagtgctggtatgggtggtggttttgctgatacaatatatagtctccctgcaactcattatctttcttatctctatggaactccttatcaaacttctgataactattctggtcacgttggtgcattggtaggtgtgagtacgcctcaagaggctactcttcctaatattataggtcaaccagatgaacagggaaatgtatctacaatgggatttccatttgaaaaagcttcttatggaggtacagttgttaaagaatggttaaatggtgcgaatgcgatgaagctttctcctggacaatcgataggtattcctattacaaatgtaacaaaacaaaactatcaagtgcgttgtcgttatgcaagtaatagtgataatcctgttttctttaatgtagatactggtggagcgaatccaattttccaacagataaactttgaatctactgtagatagtaatatgggagtaaaaggagaaaatggcgtctatgtagtcaaatctattgctacaactgataattcttttacagtaaaaattcctgcgaagacgattaatgttcatttaaccaaccaaggttcttctgatatctttttagatcgtattgagtttattccttttaaactaacattatctcctactccaattactttagatccgatgaagaccattacagcttctgtcttaagtgcaactagggcctctgatggcataacaaccatcaatgatccagtagatggaactctactttctttacctatgggtacttccatcgattttagtattcttaatcctactcaaactggaacatatcaagtcagtattctctacaaatcttcatccggcggttttactattactaaagtaacaaatgatcaaaacggacagatggtagattatgcttcaacctcagaactacaatatagcaaccctatttacgtcttgtctagcaatacaggaaacactgtattgaccattggacctgggggatattccggcccagatttactcataaaagaaattagattcaccccagcaactccaaattcatcaaataaaattgatacagattttcagttagttgatgggcaaggcacagtaactatttggaaaagtgataaaattgcatatacactagcagatatagatatacagatttcctttaatcaaaccgcttggcaaagtcctaatattacaccttatttaaatgatgatccagtaggtggaatagcaactttttataatactactggtgaatcccaacattttactaaagatagtctactcttccaaagaggttttaacaatattcgggttaacaatggatttggtggtgccactatttctggtcatatgaaagcaaatgtaattgataatccttcttaaaaattaaggttcattttaaaaacttcaggttacaacgtttactattttaaatttacaaactaagggggccgcgtaatggtactatcacgtatagtcaatcccattttcaccgagcaagaagatttaaataatattataacgcaaatcaatgctctattcgtttctagtacacaagataaattaaaaccaggtgtgagtgattattggatcgaggaaattgtactgaaagtggatgccttatcagatgaggtatttggaacagaaaagaaggctttacgtaaattggtgaatcaggcaaaacgtttaagtaaagcaagaaatcttctgataggcggtagttttgaaaattgggatgcatggtataaagggcaaaaagtagtaagattatcggatcacgaactgttgaagagtgatcatgtattattaccaccaccaggattgtctccatcttatattttccaaaaagtggaggaatctaaattaaaagcaaatacacgttatacggtttctggatttattgcgcatgcaacagatttagaaattgtggtttctcgttatgggcaagaaataaagaaagtggtgcaagttccttatggagaagcattcccattaacatcaagtggaccagtttgttgtatcccacattctacaagtaatggaactttaggcaatccacatttctttagttacagtattgatgtaggtgcattagatgtagacacaaaccctggtattgaattcggtcttcgtattgtaaatccaactggaatggcacgcgtaagcaatttggaaattcgtgaagatcgtccattagcagcaaatgaaatacgacaagtacaacgtgtcgcaagaaattggagaaccgagtatgagaaagaacgtgcggaagtaacaagtttaattcaacctgttatcaatcgaatcaatggattgtatgacaatggaaattggaacggttctattcgttcagatatttcgtatcataatatagacgcgattgtattaccaacgttaccaaagttacgccattggtttatgtcagatagatttagtgaacaaggagatatcatggctaaattccaaggagcattaaatcgtgcgtatgcacaactggaacaaaatacgcttctgcataatggtcattttacaaaagatgcagccaattggacggtagaaggcgatgcacatcaggtagtattagaagatggtagacgtgtattacgattgccagattggtcttcgagtgtgtctcaaacgattgaaatcgagaattttgatccagataaagaatatcaattagtatttcatgggcaaggagaaggaacggttacgttggagcatggagaagaaacaaaatatatagaaacgcatacacatcattttgcgaattttacaacttctcaacgtcaaggactcacgtttgaatcaaataaagtgacagtgaccatttcttcagaagatggagaattcttagtggataatattgcgcttgtagaagtccctatgtttaacaagaatcaaatggtcaatgaaaataaaggtgtaaatataaatagcgatacaagtatgaacaacaatcaa

SEQ ID NO: 281 - DNA, 2097 bp, synthetic construct
  source 1..2097: mol_type = other DNA
atggcaaccatcaacgagctgtacccagtgccctacaatgtactcgctcacccaatcaaggaagtagacgatccttatagttggtctaacttgctgaagggaatccaagagggctgggaggaatggggaaagacgggccagaagaagctctttgaggaccatttgacaattgcgtggaacctgtacaagaccggaaagttagattacttcgcactcactaaggcttcaatcagtctgattggcttcatcccaggagccgaggctgcagtccccttcatcaatatgtttgttgacttcgtttggccaaagttgttcggcgccaacacagaaggaaaggatcaacagctcttcaacgcaatcatggacgctgtgaataagatggtcgataacaagtttctgtcctacaacttgtccacgctcaacaaaaccatagagggcctccaaggaaacttgggcttattccagaatgccatccaggttgctatctgtcaaggatctactcccgagcgcgtcaatttcgaccagaactgcacaccatgcaatcctaaccagccatgcaaggatgacctcgatagagtggccagtcgattcgacaccgctaactcacagtttacccagcatcttcctgaattcaagaatccatggagcgatgagaactccacgcaagaattcaagagaactagcgtcgaactcacacttcctatgtacaccactgtggccacactccaccttctcttgtacgaggggtacatagagttcatgaccaaatggaacttccacaacgaacagtacctcaacaaccttaaggttgagttgcagcaactcatccactcatacagcgagactgtgaggacatcttttcttcagttcttgccaaccctcaataaccggtcaaaatctagcgtcaacgcctacaatcgttacgtgaggaacatgactgttaactgtcttgacatcgctgcaacatggccgaccttcgatactcacaattaccaccaaggtgggaagttggacctcacacggatcatcctttcagataccgccggtccaatcgaggagtacactactggagacaagacctctggtcccgagcactccaacatcactcctaacaatatcttggatacaccgtcccccacctatcagcattctttcgtcagcgtggactccattgtctattctaggaaggagctccagcaacttgatatcgctacttacagcacaaacaactccaataactgccatccttacgggttgagactctcttacaccgacggtagcagatacgattacggagacaaccagcctgatttcactacatccaataacaactattgtcacaattcttacaccgcaccgattactcttgttaacgccagacacttgtacaacgctaaaggaagcctacagaatgtggaatccctcgtggtctctacagttaacgggggtagcgggtcctgcatttgcgacgcatggattaactatttgcgtcccccacaaacctctaagaacgagtccaggcctgaccagaaaatcaacgtgctatacccaattactgagacagtgaacaagggtaccgggggcaatctgggagtaatctcggcttacgttcctatggagttggtgccagagaacgtcattggtgacgtgaacgcagacaccaagttgcctctgacacaattgaaggggttcccattcgagaagtatggtagtgaatacaataaccgtggaatctcgctcgttagagaatggatcaatggaaacaacgcagtcaagctgtccaattcgcagtccgtcgggatacagattaccaatcagactaaacagaagtacgagatccgttgccgatatgcttcaaagggggataacaatgtttacttcaacgtggacttgtctgagaacccctttcgcaatagtatttcattcgggtccacagaatcatctgtggttggcgtccaaggggagaacggcaagtacatcctcaagagtattaccactgtggagatcccagccggatcattctatgtccacattacaaaccagggctcctcagacctgttcttggataggatcgaattcgttcctaagattcagtaa

SEQ ID NO: 282 - DNA, 3393 bp, Bacillus thuringiensis
  source 1..3393: mol_type = genomic DNA
atgattcaaaaaaactatgaaattataggtgcttcaacaaacggcataaccgaattacctgaagattacaacactatagtcagcccctatgatgctccagcatccgttactacaactattgaaattactggaaccatactaagcgatttaggtgtttcaggggcatcatcagttagtttacttttgaataaacttttaaatatattatggccaaataatgccaatactgtgtgggggacattcgcaaaagagaccgctgatcttctaaatgaagtgttatctgtggatgatccagtagtaatagaagcaaatattaatttagaagggctaaaaagcacccttgatttatatttagaggcacttaaagaatggaaaaatgatccccaaaatccagcatcccaagagcgtgtcagaactagatttcgtaatgtggatgatgattttacacatgatatgccttcctttgctagagctggatatgaaacgaagctattaacagtttatgcacaagctgcaaatcttcatttacttttattaagagatgcttctatgtttggagaaggttggggaatgtctcaagtaaacataaatgataactataatcgccaattacgattgacggctcaatatacggatcatagtgtaaagtggtataacgcaggactagaaaaattaaaagggaattcaactagggaaaattggtatacttgtaatagatttcagagagaaatgacgttaatggtgttagacgtagttgcattatttccaaactacgatacacgaatgtacccgatcgcaacgtcatcagaacttacaagaatgatttatacagatccaattgcttatacacaaagcgatccatggtacaagataacatctctttctttttcaaatattgaaaacagtgcgattccaagtccatctttcttcaggtggctaaaatccatttcaattaatagccagtggtggggcagtggtcctagtcaaacctactattgggttggacatgaattggtatattctaattcaaattataatcaagcacttaaggttaaatatggagaccccaattcttatattgagccccctgattctttcagcttttcttctaaggatgtttacagaaccatctctgtcgttagaaattcaataagtaattatatagtaagtgaagttcaattcaattagtaatacacataaaattagtgagaaatttataaacatcaatcaaattgggatagaagagaaacaaaagattcaattactgaactatccttagctgctaatcccccaacaacatttggaaatgtagcagaatacagtcatagattagcatatatttcagaggcataccaaagtcacaacccatcaaaatacccaacctacatacctgtattcggttggacgcacacaagcgtacgttacgataataaaatttttccggaaaaaatcactcaaattccagctgttaaaagcccttcagctgaaggttgatcatggcaaaatatagtaaaaggtcccgggtttactgaaggagatgtgacaactgctgtttcgccagcaactgtaaccgacataataaaaatacacgttactctagatccaaattcactttcacaaaaatatcgtgcatgacttcgctatgcttccaatgcatttgtagcagctacattgtatacaaatacaagtagtaattataattttgaacttacagaaagtacaactgaacagtttacaacatataattcatacaagtatgtagatattccaggttcaatacaatttaataatacttctgatacagtgtctgtttatttgcatatggattcaacaactaatgcaaccgttcatgtagatagaattgaattcattccagtagatgaaaattacgataacagagtaagactagaaaaagcacagaaatctgtgactgccttgtttacagcgggaagaaatgcactccaaacggatgtgacagattttaatgtagatcaggtttcaattttagttgattgtataccacgggcattatatcctaatgagaaacgcgaactactaagtttagtcaaatatgcaaaacgtttgagctattcccgtaatttcctcctagatccaacattcaattctatcaattcatcagatgagaatggctggtacggaagtaatggtattgcaattggcagtgggaatattttattcaaagggaactatttaattttctcaggtgccaatgatgaacagtatccaacctatctctatcaaaaaatagacgaatctaagttaaaagaatatacacattataaactgacaggttttatcgagagtagtcaggatttagaagcatacgtgattcgttatgatgcaaaacatcaaacaatggatgtatccaataatctattctcagatattactcctgtaaatgcatgcggagaaccaaatcgttgtgcggcactaccatacctggatgaaaatccaagattagaatgtagttcgatacaagatggtattttatctgattcgcattcgttttctctccatatagatacaggttcaattgatttcaatgagaacgtaggaatttgggtgttgtttaaaatttctacacctgaaggatatgcgagatttggaaacctagaagtgattgaagatggcccagtcattggagaagcattagcccgtgtgaaacgccaagaaacgaagtggagaaacaagttaacacaactgcgaacggaaacacaagcgatttatacacgagcaaaacaagccattgataatttattcacaaatgcacaggactctcacttaaaaataggtgctacatttgcgtcaattgtggctgcaagaaagattgtccaatccatacgtgaagcgtaaatgtcatggttatctatcgtcccaggtgtaaattatcccatttttacagaattgaatgagagagtacagcaagcatttcaattacatgatgtacgaaatgtcgtgtgtaatggccgattccttaatggaacatctgattggattataacctctgacgtaaaggtacaagaagaaaatgggaataacgtattagttctttccaattgggatgcgcaagtattatacaatgcatgaagctctatcaataccacggatatatcttgcgtgtaacggcacgtaaagaaggattgggagaaggatatattacaattacggatgaagaagggcatacagatcaattgacatttggtgcatgtgaggagatagatgcatcctaacacgttcgtatccacaggttatatgacaaaagaactagaatttttcccagatacagagaaggtgcgtatagaaattggagaaacagaagaaatattccaggtggaaagtgtagaattatttttgatgaaagatctatgttaa

SEQ ID NO: 283 - DNA, 3525 bp, Bacillus thuringiensis
  source 1..3525: mol_type = genomic DNA
atgagtccaaataatcaaaatgaatatgaaattctagatgcttcatcatctacttctgtatccgatagttctgttagataccctttagcaaacgatcaaacgaccacattacaaaacatgaactataaagattgtctgagaatgtctgagggagagaatcctgaattatttggaaatccggagacgtttattagttcatctacggttcaaactggaattggcattgttggtcaagtactgggggctttaggggttccatttgctggacagatagctagtttttatagtttcattgtcggtcaattatggccatcaagtaccgtgagtgtatgggaaatgattatgaaacaagtggaagatctaattgatcaaaaaataacagattctgtaaggaaaacagcgcttgcaggactacaaggattaggagatggcttagacgtatatcagaaatcacttaagaattggctggaaaatcgtaatgatacaagagctagaagtgttgtggtgacccaatatatagctttagagcttgattttgttgctaaaatcccatcttttgcaatatctggacaggaagtaccattattatcagtgtatgcacaagcagcgaatttacatttgctattattacgagatgcttccatttttggagcagagtggggattcacaccaggagaaatttccacattttatgatcgtcaggtgacacgtaccgcccaatactcggattattgtgtaaagtggtataacactggcttagataaattaaaaggtacgaatgctgcaagttggctgaagtatcaccaattccgaagagaaatgacattactggtattagatttagtagcgttatttccaaactatgacacacgtacgtatccaatcgaaacaacggcccaacttacacgggaagtgtatacagatccaatagtatttaacagagaaacaagtggtggattttgtaggcgttggtcacttaacagtgatatttctttttcagaagtcgaaagcgctgtaattcgttcaccacacctatttgatatactcagtgaaatagaattttatacaacaagagcggggcttcccttgaataatacggaataccttgaatattgggtaggacattctataaaatataaaaatacgaatgcctcatcagcattagaacgtaattacggtacgattacttctaacaaaatcaagtattatgatttagcaaataaggatatctttcaggttcgatcattaggggcggatttagctaattactacgcacaggtatatggagttccgtacgctagttttacactgcttgacaagaatacaggatcaggatcagttggaggttttacgtactcaaaaccacatacaactatgcaagtatgtacacaaaattacaatacgattgatgaaatccctccagagaatgagccacttagtagagggtatagccatagattatctcatatcacctcttattctttttctaagattgctagtagtcctgctagatatggcaatctccctgtatttgcttggacacatcggagtgcggatgttacaaatacagtttattcagataaaattactcaaattccagttgtaaaagggatcgacctcgggagcacaagtacgattgtaaattttgaatacaatggaggaagtatagtcaaagatactaaatcatcaactcataataactctctttcacgaatagtgagtttaatgataaaaaccgaggatccaaatccaaattcccgctctttatatcgtattagggttaagtatgctgctgatgtgcctggaactttccgactgcatattcaaaatacttccccggttacagtaccctttactgcgacgatgagcggtactaatttacaatacagttcctttaaatatatagaatatataggttactttaataatagagaagttggtttttctattgagtcaagtacatcacagggtagaacacgtaatgtatatatcgacaaaatcgaattcatcccggtagatgcgacatatatagcagaagaagacctagaggtggcaaagaaagctgtgaatggcttgtttacgaatacaaaagatgccttacagacaagtgtaacggattatcaagtgaatcaagcggcaaacttagtagaatgcctatccgatgagttatacccaaatgaaaaacgaatgttatgggatgcagtgaaagaggcgaaacgacttgttcaggcacgtaacttactccaagatacaggctttaataggattaatagagaaaacggatggacgggaagtacgggaattgagattgtggaaggagatgttctgtttaaagatcgttcgcttcgtttgacaagtgcgagagagattgatacagaaacatatccaacgtatctctatcaacaaatagatgaatcacttttaaaaccatatacaagatataaactaaaaggttttataggaagtagtcaagatttagagattaaattaatacgtcatcgggcaaatcaaatcgtcaaaaatgtaccagataatctcttgccagatgtactccctgtcaattcttgtggtgggatcgatcgctgcagtgagcaacagtatgtagacgcgaatttagcactcgaaaacaatggagaaaatggaaatatgtcttctgattcccatgcattttctttccatattgatacaggtgaaatagatttgaatgaaaatacaggaatttgggtcgtatttaaaattccgacaacaaatggatacgcaacactaggaaattttgaattggtagaagaggggccattgtcaggggaaacattagaacgagcacaacaacaagaacaacaatggcaagacaaaatggcaagaaaacgtggggcatcagaaaaagcatattatgcagcaaagcaagccattgatcgtttattcgcagattatcaagaccaaaaacttaattctggtgtagaaatgtcagatatgttggcagcccaaaaccttgtacagtccattccttacgtatataatgatgcgttaccagaaatccctggaatgaactatacgagttttacagagttaacaaatagactccaacaagcatggaatttgtatgatcttcgaaatgctataccaaatggagattttcgaaatggattaagtgattggaatgcaacatcagatgtgaatgtgcaacaactaagcgatacatctgtccttgtcattccaaactggaattctcaagtgtcacaacaatttacagttcaaccgaattatagatatgtgttacgtgtcacagcgagaaaagagggagtaggagacggatatgtgatcatccgtgatggtgcgaatcagacagaaacactcacatttaatatatgtgatgatgatacaggtgttttatctgctgatcaaactagctatatcacaaaaacagtggaattcactccatctacagagcaagtttggattgacatgagtgagaccgaaggtgtattcaacatagaaagtgtagaactcgtgttagaagaagagtaa

SEQ ID NO: 284 - DNA, 3525 bp, Bacillus thuringiensis
  source 1..3525: mol_type = genomic DNA
atgagtccaaataatcaaaatgaatatgaaattatagatatggcaccttctacatctgtaaccaatgattctaacagatacccttttgcgaatgagcccacaaatgcattacaaaatatgaattataaggattatttaagaatgtctgagggatattctcctgaatatttaacaagcctaagtccttacagccagtttggcacagttgataagatcatcagtattattagtctattgaatagtgctgcaggtattcctggtcttgatttttttactggattgctgcaatttattcttgacttctttgcaccagaggatccgtgggcagagttaatggaactagtggaacaactcatagatcaaaaaataacagttgctacaagagaaaaggcgctcgcagaattaagaggactgataaatggataccttgtatatcagcaatcattagaaagttggctggaaaatccaaatgctacaagagctagtatagttcgagaacaatatgtcgctttagaacttgattttgttacttcgatttcatcttttgcgatagctggacaggaagtaccgttattagccgtgtacgcacaagctgctaatttacatttgttattattgagagatgtgtcaatatttggagaagaatggggattaacagtaaatgaggttaataccttctatattcgtcaaatgacttatacaactgagtatagtgattattgtgtaagaatttataatactggcttaaataaattaaaaggatctagtgcatctagttgggttgattataatcgctttcgtagagaaatgaacttactagtactagatattattgcgttatttccaaactatgatgttcgtaggtatccaatggaaacaacaacggaattaacaagagtagtttacactgatccaattgtgtttgacgaaaggaagggggtggcgtcgactcatagttggacggcgattgcaccatctttctcaagtatagaatctctaactcgacgaccaggattatttacatggttagatcaactaactattttttcgaaacgcatatcgcaacctagtgtatttataaatagttgggcggggcataagattagcacctttagaacacaaaaaacagatatactcataaataccacccatggagatactaataatcctataaaagaatttgtagtagataccaaaaaagtagaagatatttatcaaacgatagcatacccacatgcagtagcaaatgaagtattctatttattcggtgtcccaaaagttgattttaatatggtacctgcaggtggctctgcaaactctgcacacaccctcattttttctgatagtacgggagggagactggaaagtattacgaagaactcagaagcagaattacctccaacagagtcattatcagatacacctcaaccaaaccaagtaacttattctcacagattagattatgctacaataattaaagcaaataaaagttatggaagtgggtatattccattattaggttggacccatcggagtgtagatcgtaataatacaatttatccgaataaaatcactcaaataccagcagtaaaagctttctcatatactgaatcatttaatgtaaatgttattgcaggtccaggattcacaggaggagatttaataagtttaggtcatttagagaatatttatatgaaattaaacgttccaaatcctcaaaaattccgtgttcgtattcgttatgctgctagtacaacttcgtatttgcaaataactgggctatctaatttagctcagtctgatcgtttcgaacagacgtattctaatgaaaatgaaaacaatttgatgtttgaaaattttcaatatgtagaacttagaaatattttttcggtagatgctccattagaaaatcatcaagtaagtatacaaaattatcaaggtaatggttttgttattatagaccgaatcgaattcatcccagtaaatgcaacatatgaggcagaacaagatttagattcggcaaagaaagcagtgaataccttgtttacgaatacaaaagatggtttacgaccaggggtaacggattatgaagtgaatcaagcggcaaacttagtggaatgcctatcggatgatttgtatccaaatgaaaaacgcttgttatttgatgcagtgaaagaggcaaaacgactcagcgaggcacgtaacttactacaagatccagatttccaagagataaatggagaaaatggatggaccgcaagtacaggaattgaggttgtagaaggagatgctctatttaaagggcgttatctacgcctaccaggtgcgagagaaatggatacagaaacgtatccaacgtatctgtatcaaaaagtagaggaaggtgtattaaaaccatacacaagatatagattgagagggtttgtcggaagcagtcaaggcttggaaatttccacaattcgtcatcagacgaaccgaattgtaaaaaatgttccagatgatttattaccagatgtacctcctgtaaactctgatggtagaatcaatcgatgcagcgaacaaaagtatgtgaatagccgtttagaaggagaaagaggattaccaaatgggaatcgttctgctgaagcgcatgaattctctctccctattgatataggagagctggattacaatgaaaatgcaggaatatgggttggatttaagattacggacccagagggatatgcaacactcggtaaccttgaattggtagaagagggaccattgtcaggagacgcactagaacgcctgcaaagagaagaacaacagtggaagcttcaaatgacaaaaagacgtgaagagacggatagaaaatatacggcagcaaaacaagcggtagatcgtttatatgcagattaccaagatcaacaattgaatccaaacgtagaaattacggatattactgcggcccaaaacctgatacagtccattccttatgtatataatgaaatgttcccagaaatacaagggatgaactatacgaagtacacagagaaaacaaatcgactccaacaagcgtggggtttgtatgatcaacgaaacgccataccaaatggtgatttccgaaatgaattaagtaattggaatacaacatctggtgtaaatgtacaacaaatcaacaatacgtctgtcttagtcatgccaaactgggatgggcaagtttcgcaacagtttacagttcaaccgaatcaaagatatgtattacgagttactgcaagaaaagaaggggtagggaatgggtatgtgactatccgtgatggtggaaatcaaacagaaacgcttacgtttagtgcaagcgattataacacagatagtgtgtataatacgcaagtgtcgaatacaaatgggttgtacaatgagcaaacaggatataccacaaaaacagtgacattcatcccatatacagatcaagtgtggattgagatgagcgagaccgaaggtatgttctatatagaaagtgtcgaattgattgttgacgtagagtaa

SEQ ID NO: 285 - DNA, 3474 bp, Bacillus thuringiensis
  source 1..3474: mol_type = genomic DNA
atgagtccaaataatcaaaatgagtatgaaattatagatgcgtcatcacctacttctgtatctaataactcagtgaaataccctttagcaagtgatcaaacgaccacattacaaaatatgaactataaagattatctgagaatgtctgagggagagaatcctgaattatttggaaatccagagacgtttattagtgcgcaggatgcggttggaactgggattgatattgtgagtaaactactaggtagtttaggggttccacttgttgggcaagccgcaacggcacttaaatggattataggtaaattgtggccttcttcaggaaacccgtgggatgatttgatgacggcagtagaagaactcataaatcaaaaaatagaagcatatgcaagaagtaaggcacttgctgaattgggtgtttcgggaagagctgtaaaatcctatcaaaccgcacttgaagagtggcaaaaaaacccgaataacgcgcgaagcgcagcacttgtaagggaaagattttcagatgcagaacatacattgcgtactcaaatgagtttatttaccgttcgtggttatgaaattccgcttttagcaacatatgcacaagctgccaatttgcatttgtttgtaatgaaggatattcaaatttacgggagagaatggggatatactcagggagatattaaccttttctatcgagaacaagtagaatttacaggggaatactctgattattgtgttaagtggtacaatgctggcttagataaattaagaggctcgactgctctacaatggattaactataatcgtttccgcagagaaatgacagtgatggcactggatatagttgcattattcccaaattatgacatacgcatgtatccaatgaaaacaaccgcagaattaacgcgaagaatttatacagatccgcttggttatacgggaagtgggtctaacacgccaccatggtataattatggatattctttctcatggatagaaaataatgccatgccagcacctggattgttccagtggttacaaggaattgggatttatactaaatttgctcgtataactccattttatgcgaactattggtcaggacatactgtattttataaatttactaacgattctactgagagacgtgttcagtatggagatacagatactccagaattagatagttcttcctttgaaaatgttgacatttataaggtttcagcatcagttggttcgtacaaaagtaataccgtactattaccaacttttaaagctacttttgagggggtaaatcaaaataatcagttaaagacctttaggtatcaaaaagaatctaatgtcccaagtcaaacgaaaaactcaaccacagagctgcctgttcagttatcaactccgcctacttacggagattctgaacagtacagtcatagactagcctatgtttttgatgccccaatcgattcatatacaggcatatatcgcatgtatggatttgcccctattcttggttggacacatattagtgtaagtcgtgacaataggattgatccagataaaattactcaaattccagctgtaaaggcatatgctgagggtcttgctaattatatcaaagatccggggtttacaggaggagatttattagctttaggtagaaactcaaatacttcattgattgttaatttttcgaagcctcaaacataccgtattcgtattcgttatgctgctagtaaaacttcgtattttcaactacgtgggctgcataatatagctcagtctcagcgtttcgaagcgacgtattctaataaaaatgaaaacgatttgacatttaacgattttaaatatgtagaaattcaaaaaactgtttcaatagacaatccatcagaaagtcgtagtataagtatatacactcaatcagatacagaattacttattatagacaaaatcgaattcatcccagtagatgcaacatttgaagcggaacaagacctagatgtggcaaagaaagcggtgaatggcttgtttacgaatacaaaagatgccttacagacaagtgtaacggattatcaagtcaatcaagcggcaaacttagtagaatgcctatccgatgagttatacccaaatgaaaaacgcatgttatgggatgcagtgaaagaggcgaaacgacttgttcaggcacgtaacttactccaagatacaggctttaatgtaataaatggagaaaacggatggacgggaagtacgggaattgaggttgtggaaggagatgttctgtttaaagatcgttcgcttcgtttgccaagtgcgagagagattgatacagaaacatatccaacgtatctctatcaacaaatagatgaatcgcttttaaaaccatatacaagatatagactaagaggttttataggaagtagtcaagatttagagattaaattaatacgtcatcgggcaaatcaaattgtcaaaaatgtaccggataacctcttgccagatgtacgccctgtcaattcttgtggtggagtcgatcgctgcagtgaacaacagtatgtagacgcgaatttagcactcgaaaacaatggagaaaatagaaatatgtcttctgattcccatgcattttctttccatatggatacaggtgaaatagatttaaatgaaaatacaggtatttgggtcgtatttaaaattccgacaacaaatggatacgcaacattaggaaaccttgaattggtagaagaggggccattatcaggagacgcactagaacgcttgcaaagagaagaacagcagtggaagcttcaaagaaccaaaagacgtgaagagacggatagaaaatatatggcagcaaaacaagccattgatcgtttattcgcagattatcaagaccaacaactcaattctggtgtagaaatgtcagatttgcttgcagctcaaaaccttgtacagtccattccttatgtgtataacgaaatgttcccagaaatccctggaatgaactatacaaatttcacagagttaacaaacagactccaacaagcatggaatttgtatgatcttcgaaatgctataccaaatggagattttcgaaatggattaagtgattggaatgcaacatcagatataaatgtgcaacaactaaacgatacatctgtccttgtcattccaaactggaattctcaagtgtcacaacaatttacagttcaaccgaattatagatatgtattacgtgtcacagcgagaaaagagggagcaggagacggatatgtgatcatccgtgatggtacaaatcagacagaaacactcgcatttaatacatgtgataatgatgcaggtgttttatctactaatcaagctagctatatcacaaaaacagtggaattcacaccatctacagagcaagtttggattgacatgagtgagaccgaaggtgtattcaacatagaaagtgtagaactcgtgttagaagaagagtaa

SEQ ID NO: 286 - DNA, 2094 bp, Bacillus thuringiensis
  source 1..2094: mol_type = genomic DNA
atgaatccatatcagaataagaatgaatatgaaatattggatagttcacaaaataactttaatatgtctattaatcatttacaatatccattaaaaaatagtccatatcctcaattttctatagacaattgtaggcgtagtaatactgctacttgggttaataatattggggatgcagttagtgaatcaatatctttggtgtcaacaatattggggatttttacagaacctaatttgtggggagtattttctgcattaattggtcttctagataggatgagaggtgctctgggaacaccttctatagctgcattatctatatgtgatttgctagaaattattgatgaacgagtaaatcggagtgttttgaatgacggaatcgctgattttaatggttcattagctctatttggaaatttcttgtccgcattaaattcctggagaaataatccaaacaatagtactgctgatgagcttcgttttcgttttagagcatctgattcagaatttgataggagtttaacaaatggatctttaacacatggtggttcattagctagacaggatgcacaaatattattattaccttcttttgcaaaagctgcatattttcacttatttttattaaatgaggctattacaagtggatctaattggggtctggagattaggcctactataaattatcaagaaaaattagaaaatagtattagaaattacaccaattattgtgtacattggtacaatcagggtttagaggaaatacgccgccggaataatagtggtgaaaattggttagtatttcacagattccgtagagatatgacattgcaagtattagatctagtagcaacatttccgaattttgatactaatcgatattctacttcaatgccaataactactcaattaagtagggtgatttatacagatccaatcggttgtgtaagtcaatcccatctaaatagtaattggtttggcccagtaaatggtactaattttacaagtttagaaaatgaaattcctagtcctaccctttctcaatttttaaattctatagatttagttgatcagccgcttagatggggtgttggaactaatggaggaaatacatggcaaggaaatacaaatagttttaatttttcctcttcatctactgttttccatgaaagttatggaagacgaactggtcagaatattatccgtgggctgaatggtagggatgtttttagaatagattcgagacctatttctctagatggtcatacattcggagttaatagagtagaatttcatcatactactagttctcaaaactctatatatacaggatatttgagaacatccggacttaatagaccagtggttcagaatgtccggacgtttttaccaggagaaaattctgatataccaaatcgagaagattatactcatagattaagtagggtagcaaatataacaggtgggcttcgacatgtagcagttcgtgaggatcaaagttcttctttattgttatatggctggacacataaaagcttaactcgtgaaaatatgtataatcttaatgaaatttttcaaatacctgctgtaaaaacaatgaacacacctggtattcaagtaattgcaggacctggatctacaggtggggatttattaagactaaatcttggtgctagagtaacttataattgtagacctgctcgtccattagaaacaccaatggtagtacatgtacgtgttcgttatgctagtgtaggaagttctacaataagaatagagtttactgatccatctggttcatttaatccacaaacacttgctttacctgatacaaattcatcattaaataatcttcaatatcaaaatttcaacatggttaccactaatttcgcacgtggtacgagtataatgcaaggtaatttttcaataagtattataaatatgaatggagctaatttagctttagataaaattgaaattataccggttcgtattggtcgaaacacctcagaacaagtaaaagaatttattgataaactgggttgtgttgcaaagtttgaaaaatatagttatagtttaagcggttctgaataa

SEQ ID NO: 287 - DNA, 2028 bp, Bacillus thuringiensis
  source 1..2028: mol_type = genomic DNA
atgaatccatatcaaaataagaatgaatatgaaatattcaatgctccatccaatggttttagcaagtctaataactattctagatatccattagcaaataagccaaatcaaccactgaaaaacacgaattacaaagattggctcaatgtgtgtcaagataatcaacaatatggcaataatgcggggaattttgctagttctgaaactattgttggagttagtgcaggtattattgtagtaggaactatgttaggagcttttgctgcccctgtcttagctgcaggtataatatcttttgggactttgttgccgatcttttggcaaggatctgaccctgcaaatgtttggcaggatttgttaaacatcggaggaaggcctatacaagaaatagataaaaacataattaatgtactaacttctatcgtaacacctataaaaaatcaacttgataaatatcaagaatttttcgataaatgggagccagcacgtacacacgctaatgctaaagcagtacatgatctctttactaccttagaacctataatagataaagatttagatatgttaaaaaataatgctagctatcgaataccaacactccctgcatatgcacaaatagctacttggcacttgaatttattaaaacatgctgctacctattacaatatatggctgcaaaatcaaggtataaatccaagtactttcaattcatctaattactatcagggctatttaaaacgtaaaatacaagaatatactgactattgtatacaaacgtacaatgcaggactaactatgattagaactaatactaacgcaacatggaatatgtataatacttaccgtttagaaatgactctaactgtgttagatcttattgctatttttccaaattatgacccagaaaaatatccaataggagttaaatctgaacttatcagagaagtttatacgaatgttaattcagatacatttagaaccataacagaactagaaaatggattaactagaaatcctacattatttacttggataaaccaagggcgtttttacacaagaaattctcgagacattcttgatccttatgatattttttcttttacaggtaaccagatggcctttacacatactaatgatgatcgcaacataatctggggagcggttcatggaaatattatttctcaagacacatccaaagtatttcctttttatagaaacaaacctattgataaggtcgaaattgtcagacatagagagtactcagatataatatatgaaatgatatttttttcgaatagcagtgaagtatttcgatattcatccaattcaacaatagaaaataattataaaagaactgattcttatatgattccaaaacaaacatggaaaaataaagaatatggtcatactctatcgtatataaaaactgataattatatattttcagtagttagagaaagaagaagagttgcatttagttggacacatactagtgttgatttccaaaatacaatagatttagataacatcacccaaatccacgctctaaaagctttgaaggtaagttctgattcgaaaattgtgaaaggtcctggtcacacaggtggagacttggtaattcttaaagatagtatggattttagagttagatttttaaaaaatgtttctcgacaatatcaagtacgtattcgttatgctactaatgctccaaagacaacagtattcttaaccggaatagatactataagtgtggagctccctagtaccacttcccgccaaaacccaaatgctacagatttaacatatgcagattttggatatgtaacatttccaagaacagttccaaataaaacatttgaaggagaagacactttattaatgaccttatatggtacaccaaatcattcatataatatatatattgacaaaatcgaatttattccaatcactcaatctgtattagattatacagagaagcaaaatatagaaaaaacacagaaaatagtgaatgatttatttgttaattaa

SEQ ID NO: 288 - DNA, 1941 bp, Bacillus thuringiensis
  source 1..1941: mol_type = genomic DNA
atgaattatatggaagatagttctttagatactttaagtatagttaatgaaacagactttccattatataataattataccgaacctactattgcgccagcattaatagcagtagctcccatcgcacaatatcttgcaacagctatagggaaatgggcggcaaaggcagcattttcaaaagtactatcacttatattcccaggttctcaacctgctactatggaaaaagttcgtacagaagtggaaacacttataaatcaaaaattaagccaagatcgagtcaatatattaaacgcagaatatagggggattattgaggttagtgatgtatttgatgcgtatattaaacaaccaggttttacccctgcaacagccaagggttattttctaaatctaagtggtgctataatacaacgattacctcaatttgaggttcaaacatatgaaggagtatctatagcactttttactcaaatgtgtacacttcatttaactttattaaaagacggaatcctagcagggagtgcatggggatttactcaagctgatgtagattcatttataaaattatttaatcaaaaagtattagattacaggaccagattaatgagaatgtacacagaagagttcggaagattgtgtaaagtcagtcttaaagatggattgacgttccggaatatgtgtaatttatatgtgtttccatttgctgaagcctggtctttaatgagatatgaaggattaaaattacaaagctctctatcattatgggattatgttggtgtctcaattcctgtaaattataatgaatggggaggactagtttataagttattaatgggggaagttaatcaaagattaacaactgttaaatttaattattctttcactaatgaaccagctgatataccagcaagagaaaatattcgtggcgtccatcctatatacgatcctagttctgggcttacaggatggataggaaacggaagaacaaacaattttaattttgctgataacaatggcaatgaaattatggaagttagaacacaaactttttatcaaaatccaaataatgagcctatagcgcctagagatattataaatcaaattttaactgcgccagcaccagcagacctattttttaaaaatgcagatataaatgtaaagttcacacagtggtttcagtctactctatatgggtggaacattaaactcggtacacaaacggttttaagtagtagaaccggaacaataccaccaaattatttagcatatgatggatattatattcgtgctatttcagcttgcccaagaggagtctcacttgcatataatcacgatcttacaacactaacatataatagaatagagtatgattcacctactacagaaaatattattgtagggtttgcaccagataatactaaggacttttattctaaaaaatctcactatttaagtgaaacgaatgatagttatgtaattcctgctctgcaatttgctgaagtttcagatagatcatttttagaagatacgccagatcaagcaacagacggcagtattaaatttgcacgtactttcattagtaatgaagctaagtactctattagactaaacaccgggtttaatacggcaactagatataaattaattatcagggtaagagtaccttatcgcttacctgctggaatacgggtacaatctcagaattcgggaaataatagaatgctaggcagttttactgcaaatgctaatccagaatgggtggattttgtcacagatgcatttacatttaacgatttagggattacaacttcaagtacaaatgctttatttagtatttcttcagatagtttaaattctggagaagagtggtatttatcgcagttgtttttagtaaaagaatcggcctttacgacgcaaattaatccgttactaaagtag

SEQ ID NO: 289 - DNA, 1941 bp, Bacillus thuringiensis
  source 1..1941: mol_type = genomic DNA
atgcaaaataacaactttaataccacagaaattaataatatgattaatttccctatgtataatggtagattagaaccttctctagctccagcattaatagcagtagctccaattgctaaatatttagcaacagctcttgctaaatgggctgtaaaacaagggtttgcaaaattaaaatccgagatattccccggtaatacgcctgctactatggataaggttcgtattggggtacaaacacttttagaccaaagattacaagatgacagagttaagattttagaaggtgaatacaaaggaattattgaggtgagtaaagtttttactgattatgttaatcaatctaaatttgagactggaacagctaataggcttttttttgatacaagtaaccaattaataagcagattgcctcaatttgagattgcaggatatgaaggagtatccttttcactttttactcagatgtgtacatttcatttgggtttattaaaagatggaattttagcaggaagcgattggggatttgctcctgcagataaagacgctcttatttgccaattcaatagatttgtcaatgaatataatactcgactgatggtattgtactcaaaagaatttggacggttattagcaaaaaatcttaatgaagccttgaactttagaaatatgtgtagtttatatgtctttcctttttctgaagcatggtctttattaaggtatgaaggaacaaaattagaaaacacgctttcattatggaattttgtgggtgaaagtatcaataatatatctcctaatgattggaaaggtgcgctttataaattgttaatgggagcacctaatcaaagattaaacaatgttaagtttaattatagttatttttctgatactcaagcgacaatacatcgtgaaaacattcatggtggcctgccaacatataatggaggaccaacaattacaggatggatagggaatgggcgtttcagcggacttagttttccttgtagttatgaattagaaattacaaaaataaaacaggaaataacttacaatgataaagggggaaatttcaattcaatagttcctgctgctacgcgcaatgaaattctaactgctaccgttccaacatcagctgatccattttttaaaaccgctgatattaactggaaatatttctctccgggtcttttctctggatggaatattaaatttgatgatacagtcactttaaaaagtagagtaccaagtattataccttcaaatatattaaagtatgatgattattattttcgtgccgtttcagcctgtccaaaaggcgtatcacttgcatataaccatgattttttaacgttaacatataataaattagaatatgatgcacctactacacaaaatatcattgtaggattttcaccagataatactaagagtttttataggagcaactctcattatctaagtacaacagatgatgcctatgtaattcctgctttacaattttctacagtctcagatagatcattcttagaagatacaccagatcaagcaacagatggcagtattaaatttacggatactgttcttgggaatgaggcaaaatattctattagactaaatactggatttaatacagctactaggtatagattaattatacgttttaaagcgcgtgctcgtttggctgctggtatacgtgtacgttctcaaaattcagggaataataagttattaggtggtattcctgtagagggtaattctggatgggtagattatattacagattcatttacttttgatgaccttgggattacaacttcaagtacaaatgctttctttagtattgattcagatggtgtaaatgcttctcaacaatggtatttgtctaaattaattttagtaaaagaatccagttttacgactcagattccattaaaaccatag

SEQ ID NO: 290 - DNA, 4391 bp, Bacillus thuringiensis
  source 1..4391: mol_type = genomic DNA
gaaaattcgagaattaatcagacatgcaggcgccaaaaacgtagtattggatggcagagatggagtaatgaatatctctatggtgtactagggctctattgggactggaaagttcgtccccttgaaagctcaggaagatattgataaaagtgtctgccatttgataggtctcataacccttttgatgaagtttatggggtgagctgcttgagggaaaacctcacgagcagttcttatggggaggggctggaaacgggttataactgataccgcgccagtcctttacccgacaacgaacttttgcttggttagaaaattaccgcaggctttggaaaaactgtgaacgaacacttgaaaatagcagacaaagttgcttattggcagctgtggctattttattaaaaagattccaaacaggttctcagaaaatagttgtaattcatcttgaatcgaaagattcataaaaaacgtcatcctttctagctttttagaaagaataacgttttttgacacttgggggtagtcttatttcttaagttgatgggcatgcaacagaaccctaaaaaatcaataattcaacaaaaataatggggatatttgttgaattattgcaacaggaatacatacgtagattgcgaatatttagaagtacaccctacatattattggttaggtggaatgaattataaaaaatgatgggaataagggaggaacgaagatgcattattatgggaataggaatgaatatgacatattaaatgcttcatcaaacgattcaaacatgtctaatacttatccgaggtatccgttagcaaatccacaacaagatttaatgcaaaatacaaattataaagattggcttaatgtatgtgaagggtatcatatagaaaatcctagagaagcaagcgttagagctggacttggtaagggattaggtatagttagtacaatcgtagggttctttggtggttctattatcttagatacaattggattgttttaccaaatttcagagctactttggccagaggatgatacccagcaatacacttggcaagatattatgaatcatgtagaagatcttatagacaaacgaataactgaggttatacgaggaaatgcaattagaacattagcagatttacagggtaaagttgatgattataacaattggttgaagaaatggaaagacgatccaaaatctacaggtaatttaagcaccttagtaaccaagtttacggctcttgattcagattttaatggtgctataaggacagttaataatcaggggagtccaggttatgagttacttttattgcctgtctatgcacaaattgcgaatctgcatttacttttattacgggatgctcagatttatggagataaatggtggagcgcacgagctaatgctcgtgataattattaccaaatacaattagagaaaacaaaggaatatacagaatattgtataaattggtataataagggtttaaatgattttagaacagcaggtcaatgggtaaactttaatcgttatcgtagagaaatgactcttactgtattagatattatttcaatgttccctatttatgacgcgagattatatcctacagaagtaaaaaccgaactaactagggaaatttattcagatgttattaatggggagatatatggacttatgactccttatttttcttttgagaaagctgaatcactttatacaagggcaccccatctcttcacttggctaaaaggatttcgatttgtaaccaattctatttcttattggacatttttatcaggtggtcaaaataagtattcttatactaataattctagtattaacgagggctcttttaggggacaggacacagattatggtgggacttcttctaccattaatattccatcaaattcgtatgtatataatttatggacggaaaattatgaatatatttatccttggggtgatcctgtaaatattacaaaaatgaatttttctgtaacagataataattcttcaaaagaattaatttatggtgcacacagaacgaataaacctgttgttcggacagattttgattttctcactaataaagagggaactgagttagcaaaatataatgattataatcatattttatcctatatgttaattaatggggaaacgtttggtcagaaacgtcatggttattcgtttgcttttacacatagtagtgttgatcctaataataccattgcagcgaataaaattacgcaaattcctgtagtgaaagcttcgagtataaatggatcgatttcaattgaaaaaggtcccggatttacgggaggagatttggtaaagatgagagcagattcaggtttaactatgcgttttaaagctgaattattagataaaaaatatcgtgttcgaatacgttataaatgtaactacagttctaaattaatactacgaaaatggaaaggggaaggttatatacaacaacaaattcacaatatttctcccacatatggagccttttcttatttagagtcttttactataactacgacagaaaatatatttgatttgacaatggaggtaacatatccgtatggtagacagtttgttgaagatataccatctcttatattagataaaatcgaattcctcccaactaactgataccattcacaggaaatatgaggaaaaatatgaattagaaagatcacaggaaacatttaatagtatatttgttgattaaaacaaagtactaacgtagatggtatagctgtttgaaaaaataagaaaaaaggttgtgaattttatgcttacaagtggtgcgaaaaatatgttaaaactcgaaacgacagattatgaaatagatcaaatggcgaatgctatagaaaatatgtcaggtgaacaatattcacaggaaaaaatgatgcaatggcatgacataaaatatgccaaacaattgagtcaagcacgtaatttacttcaaaatggtgattttgaggatttatttagtggatggactacaagtaatcagatgtccattcaggcagataatgcaacttttaaagggaactatctgcatatgtctggggcgagagacatatatggaacgatattcccaacgtatatataccaaaaaattgatgaatccaaattaaaaccgtatacgcgttatctagtcaggggatttgtgggaagtagtaaagatctagaattaatggtaatgcgttatggaaaagaaattgatacagtaatgaatgtaccaaatgacataccgtacgtaccttctatgccggtctgtaacgaattatatgatggtcaacaaccgtatccaaataggcatgtaggatattataatccaatgccagtttctcagccttcttacacatccgatacttgtcagtgtacgcccggcaaaaaacatgtggtatgtcatgattctcatcaattcaagtttcatattgatacgggggaagtagattacaatacaaatctaggaatttgggtgttgtttaaaatctcttcacccgatggctacgcgacattagataatttagaagtaattgaagagggaccagtaagaggcgaagcagtgacacatgtaaaacaaaaggaaaagaaatggaatcagcaaatggagaaaaagcgcatggaaacaaagcgagtctatgaccgagcaaaacaggcggtagatgcattatttacaggagaagagttaaactatgatgttacattgtcacacattaagaacgccgatgatttggtacagtcgattccatatgtacacaatgagtggttaccggattttccaggcatgaactatgatatataccaagagttaaacgcgcgtatcatgcaagcacgctatttatacgatgcacgaaatgtcataacaaatggggattttgcacaaggattacaagggtggcatgcggaaggaaaagtagaagtacagcaaatgaacggaacgtctgtattagtcttatccaattggagctctggagtatctcaaaaccttcatgtccaacatccacatggatatctgttacgtgtgagtgcgaaaaaagaagggtctgggaaaggctatgtaacgaggatgagttgtaatggtaagcaggaaacacttacgtttacgtcctgtgacggaggatatatgacaaaaacggtagaggtattcccagaaagtgatcgtgtacgaattgaaattggggagaccgaaggttcgttttatattgaaagcatcgaattgatttgtatgaacggatatactagcaataataaccagaatatgagtaatatgtatgatcaaagttatagtgggaattatagtcagaatactagcgatatgtatgatcaaggaggttctgttgcaaagtttgaaaaagaatagaat

SEQ ID NO: 291 - DNA, 3668 bp, Bacillus thuringiensis
  source 1..3668: mol_type = genomic DNA
gactttttttgactatatgcatggcctctattccaacaatcatttttgtagctgtgcgccatgatttgaatccaagcatattccagattcattttttgataaatctatggtcttgttcaattatgttgtttacatatttttttacccgtagcggcatatcatttggtatatttttttcattttttaattctcgtatcgcaacaggataggctttatcaccatcaattgtgattacacgaggttttgtgacatgacaagaagccaatgctttctttagaaaacgcttggtagccttcgcatctcgtttcttacccaaataaaaatcaagggtgtttccttcggaatcgacagcaccatataggtacattttttcgcctttgatttttaggtatgtttcatcctgatcacgcacctttttttagtagtagtaccagtatggccaagttagaaaaatcattttcaagtttttttatgcttttgtaccagaaccgaatatttacctagatctataaatacgtataagattgataaatgttatacattctttcaattacttagtagtgacttccttaagcctacacataatatggattatagaaatattagtatagtgggaggaatcaaaatgaattcttatcagaataagaatgaatatgaaatcttagatgctaagcgaaatacttgtcacatgtctaattgttatcccaagtacccattagcaaatgatcctcaaatgtatttgcgcaacacccattataaggattggataaatatgtgcgaggaagcttcttatgcatcttcaggtccttcacaattatttaaagttggaggttctatagttgctaaaattcttggaatgattcctgaagttggtcctcttttaagttggatggtatctttattttggccaactattgaagaaaaaaatactgtttgggaagatatgataaagtatgtagcaaatctgctaaaacaagaattaacaaatgatacacttaaccgtgccactagtaatttatctgggttaaatgaatctttgaatatatataaccgagctctcgctgcgtggaaacaaaataaaaataatttcgcaagtggtgaacttataaggtcatatataaatgatcttcatatactctttacaagagatattcaatcagatttctcattaggaggttatgaaacagtattattaccttcatatgcaagtgctgccaatcttcatttacttttgttacgtgatgttgcaatttacggaaaagaattaggatatccatcaactgacgtagagttttattataatgagcaaaagtactatacagaaaaatatagtaattattgtgtaaatacgtacaaatcgggtttagaatcaaaaaaacaaataggatggtcagattttaatcgatatcgtagagaaatgactttatccgtattagatatagtcgcattattcccactgtatgatacaggactgtatccgagtaaagatggcaagatacatgttaaagctgaactaacaagagaaatctactctgatgttattaatgatcatgtatacggactcatggttccctatatatcttttgaacatgctgaatctctgtacactcgcaggccgcacgcatttacttggttaaaaggatttagatttgtaacgaattctattaatagttggacctttttatcaggtggtgaaaatagatatttccttactcatggagagggtactatttataatggaccttttttggggcaggatactgaatatggaggaactagttcttatatagatatctctaataattcctctatttataatttatggaccaaaaattatgaatggatttatccatggactgatccagttaatattacaaaaataaatttttctataacagataatagtaattctagtgagtctatttatggtgcggaaagaatgaataagcctactgttcgaacggattttaattttcttcttaacagagcaggaaatggtcctacgacatataatgattataatcacattttatcttatatgttaattaatggagaaacgttcggacaaaaaagacatggttattcatttgcatttactcatagtagtgtagataggtataataccattgtcccagataaaattgtgcaaatacctgctgtgaaaactaatttggtcggtgcgaatataataaagggtcctggtcatacaggtggcgatttacttaaactagaatatgagcgttttcttagtttacgtattaagcttatagcatcaatgacttttcggattagaattagatatgcttctaatatttctggacaaatgatgattaatataggttaccagaatcctacttattttaatattatccctacgacaagtagggactatactgagttaaaatttgaagatttccaattagtggacacatcctatatttactcaggtggcccatcgattagttcaaatacattatggctggataatttttctaatggacctgttattatagataaaattgaatttataccgttgggaattacactaaatcaagcacaaggttatgatacatacgaccagaatgctaatggtatgtatcatcaaaactacagcaattctggctataattataatcaagaatacaatacttattaccaatcgtataacaattaggttgtgttgcaaagtttgaaaaaacacaaccttgtgtgcaaaatatagttatagtttaagcggttctgaataactcctgtaattccttgtacgtcgaaaaagagaagtctggaatgtgacttctcttttgtttgtatatcgcatgaatcgtttcgattcctttcaatgtacgtgaagcatggcggagattttgaaatcctgcggatttaacaaaacggcgcttgatatgtctatgatcttgttcaatgagattatttagatgcttaacggtacaatgtttcgtatgtacatacaaaccgttatgtttcagttttttgagcgcacaaagtaaagcaggagccttgtctgtagtaagaaccgttggttctccaaaatctttaaccagtcgcttcataaacatataagcggcttgatgattgcgtgttttacgaagttgaatatccaaagtatgcccatctccaccaatagcacgataaagatagcgccattcgcctttcactttgatgtaagtctcatctaaatgccatatgaaatgtgcggatttgtttttctttttccaaatttgataaatcagattgccgtattcgtgaacccaacgcatgatggttgttggatgaactgatattccacgttctttcaagatttcagatacatcacgatagcttaaagaaaaacgacaatagtagccaacggctaccaaaataatatcttttttgaattgttttcccttaaaatatcccatgtgatatgctcctcatcccattttctctatataagttccgtttaatattttaacaattgttcagtccctaacctttgaagtaccttttcaggaaattgagaaagatgttctagaaaagaaagaacggatgtttttatttctttctgggatgcatgaaaacgattagagataacactttcttttaatgctttccaaatacgttccaataaattcaaattgggagaatacggcggtaaaaagacgagtgttgac

SEQ ID NO: 292 - DNA, 4807 bp, Bacillus thuringiensis
  source 1..4807: mol_type = genomic DNA
gcttcatttaaaaaactttgcaacagaacctcagtacatttgtttctttttatacgcacatatacatgcctgttttgcatataatattttggtgatattcttcataaaaaaggagtgattttattggtacagttatctgatttattacctagttattataatgtattagcttctccccctacaattttagatgctaaccaagactggttccccacaggtaatgatttcaaaagtgtaataaatgagctgaaagatgcttttactaaatttcaaaaagattttcatactagcgaccttattaacactatacaatccatttataactcttatggctctcaaggaatggattgggtcaatgtggctcaagctgtaataacttttgcttttggttttgtacccggtggatcattagtctctgcaggacttaataaaataataggtatatttttccccaaagaccctaatcctactgtatttgatcaaataaaagccgcagtagaacaattaatactcaattcatttatcacatatgatatacagggcgatataactgaattgaataaactgaaagattattctggaatattagcaaattctatacaagtagcgcttggtcaatcccaatttcaagaattccaacaagtaaatcctactgggccaccgacaaattgtactcataccccctcttgtactttagatccaactaaccctattccaccaaattgtagctgtttattgaattttgtatatcaaaattataataatcacacttccgatataaacacggtattacttcaaatagaaggttctattccaaagatttttgctcttattaatcaatccacaacagcaactactgctcaaaaaaaccaactaaaatctgattatttacaagcatatcttcctttatatgtaatgggcgcaactttagaaatgatatactatagaacatatattcaatttgctgaaacatttcagtatggtttaagtgaacaaaatagtactacactaacggctatgcacaacttacgtcttacaatttctagacgaactacatttctattcaataattttctcccatttttaccaagtataacttcaaatacaaaaggagatttaaattcatatattcaatatacaagacgtataacaataaatgctctggatactgctgtattttggactttactagatccatttgattatcctgtgtccgcaaatcaaacattatcccgtattatttttaatgatattgtaggaccagtagaatgtaaagctggtaaccaaaatagcaataacttactattcaatttttataacgtagatgggcaaccacttccaaataactctattactaattatttttataataatatgcaattaagaggtttgcaattccaaatatataaatatagttcaacctctacttatttctcgacaacatctgatattccaattggatttaaagcttcttatcgtacaaatggtagcgataaaaatattgatcatacacgttctctaccatacggactaaaaggatctacaacaacattaactgatgatatatatatcacgaatcctagttttaatattataaatatgaactcctctcaaacatcaggtcaaattgctacagatgtctcacaaattctatatacacctatttcagatataaaacaaaattgtttttctcaaaacagtccttatttagggaataatagaattcaagctatttatcctctacaacccactaatccaaacacttataatgcttatggtagtacagataaactcggatttttaactacactcatttcaaatgacaccactacaaaccttgtatttacttctgatcctatttatacatttcctgccgaacaagctactgtattatctggaacaaaacttgttgaatatgtgaatggtacagcttctgttcaattacaaaatgggcaaaatgctcaatacacgatagataatacaacaagaattgcaggtcctacacaatttcaattacgagtacatgtagcgacagatccagcagttacagatccaaatgttttaggacaactcgctattacaattgataatcaacgaacacaatatttaactatacccaatacaaatgttgattatagtaatccaataactcttttaaacggtcaacaacttaaccaattacgggtaaaaggaacacaaggtgcttatatgttagtacccgctagtaatctaaataatatcaatgatcgtaataccaatgtttttacattaaatccaaatgcatctatgaatgtaaatattcaaaatacaggaaatctaacagttatattagatcgtattgaattcgttcctatcgattcaacagtaataatcccagcacaaacactatattcaaatcaagcttatactctttgggaatcaacaaatggattaattggaaaacaggctttattagtagtagatgattatttacattttactgttcaatattattaccaatctcaattagtccattctaatgaacaaaatatatatgatgttaattatattggtctatttgataaaattacggctagtactatcgctgatactttagtaaaccttacaaatggaattgtttatttaactactaatacaacaccaacaccaacaccagctgtaccaagcccaattcctcctatatccaatcaaaatataggagctggatttgaatatactgtttgggatggtaataacaaaactggaaataccgtaaattttcaaggattcgctgcaccaaatagtggttccgaaggtttattatttcaatataaatataatgatcaagtaattgacacagatcaagtatcaaaccaattttctatccaacgtaaattagcaggtacaattaataaaattacagcaacaggtggaacaccaaatggagtgtatttaacgataaataatggtggttccgtgagtacaacataaaaaggaggaaaataaaatgaatccatgttctccattccaaaatatacctcaaaggaatttaaatcttcctgtttttattacaaaacaagaattagaacaaattactaaaatggtatctaacttatttttaacaacaaatcctgctttattacattgtttaccacctgatattacgttattagctcctcatgttagtgattattggattgatcaattactaatgaaagttgataaactgtcaactgaattatatggtgtcgaaaaacaagaattacgaaaattattaaatatagccaaacaaatgagtgttgcacgaaataaattaataggtggaaactttgaaacagtagaggcttggacattcggtacacaagcaactgttctttccaattcacctttatttgtagggaattttctatctttagaacctacaaatggtatatggacttcctacgcatttcaaaaaattaatgaatctcaattaaaaccatttacacgttatagtatttctggttttatcgctaatagtcaagggttagaacttacaatttcacgatacggaacagaattacaaactgttataaacattccaattgaaacagcacttcctatttatccaaatccaattccaaattgttgccagccaagtccatgtggatgcgattcttgtcaatatagagattcacatctttttaactattcaattaatgtaggtactttatttccagaattaaatcctggtattgaaattagtttacgcataatcgaaccaaacggaagagccagaattagtaatttagaagtaatagaagagcgtcctcttacagaagaagaaagaagacaaattcaacgaacagaacaattatggctaacaagagtagaaagagaactaaaaatcatttgtgatttatttgaaccaattattaaacaaattaactcctactttccagaaggggattggaacaatcacattttttctcatgtcacatatcaagatttatatagtattgtcataccggcactcccgatcattgaaaattggtctatgacgcatttgacaggtatgtataatcatctagtacgaccgattaaagaagtgatccaacaaattgaacaacaattagaagctcgaaatttacttcataatggaaatttttcaaatggactgacagattggactgtttgtggtgaagcaaccataatacctttaacaaatcaaaatcaagctttattcctttcttattgggattctatggtttcacaaactgttacagttgtaaattttaatccagataaattgtatttattacgtatctatgcaaaaggaaatggaactgttcttgttcaacataatggacacacagaacgtgttaacttcacacaagatttcttccaatcaaaagaacatactttttatctagatatggcaacctttaccgtagatattcaatccaattcaaatgattttacagtagattatgtagaaattatagaaatataaaataaacaaaactacatgtttttacttcatgtagttttttctctctttcttactctattcaagaaacgaggtgattgtatgcaaaaaaaaacaattttaataaattcttcttccacttctagcccctctccttccacctcttctttttcttcttctcaattactacaacaaggatataccaaaaaacaaggttgtaattgtaataaatagacaaacaaaaatagtgtatttaaaaaagttgcaaagtttgagaaatcataagtctgtttacaaaatactcttgtcatttaagcggttctgaataatggctataattctttctacgtcgcaaaagag

SEQ ID NO: 293 - DNA, 2169 bp, Bacillus thuringiensis
  source 1..2169: mol_type = genomic DNA
atgaaagaacaaaatctaaataaatatgatgaaataactgtacaagcagcaagcgattatatcgacattcgtccgatttttcaaacaaatggatctgctacatttaattctaataccaatattacaactttaacacaagctataaatagtcaagcaggagcaattgcaggaaagactgctctagatatgagacatgactttacttttagagcagatatttttcttggaactaaaagtaacggagcagacggtattgcaatcgcatttcatagaggatcaattgggtttgttggaacaaaaggcggaggacttggaatattaggtgcacctaaagggatagggtttgaattagacacatatgcgaatgcacctgaggacgaagtaggcgattcgtttgggcatggggcaatgaaaggatcattccctagtttcccaaatggatatccccatgctggctttgtaagtactgataaaaatagtagatggttatcagccctagctcagatgcagcgaatcgctgctccaaacgggcgttggagacgtctggagattcgttgggatgctcgtaataaagagttaactgcaaatcttcaggatttaacttttaatgacataactgttggagagaagccacgtactccaagaactgcaacttggaggttagtaaatcctgcatttgaacttgatcagaagtatacttttgttattggttcggcgacgggtgcatctaataacctacatcagattgggattatagaatttgatgcatactttactaaaccgacaatagaagcgaataatgtaaatgtcccagtgggagcaacatttaatccaaaaacatatccaggaataaatttaagagcaacagatgagatagatggggatttgacatcgaagattattgtgaaagcaaacaatgttaatacgtcgaaaacgggtgtgtattatgtgacgtattatgtagagaatagttatggggaaagtgatgaaaaaacaatcgaagtaactgtgttttcaaaccctacaattattgcaagtgatgttgaaattgaaaaaggggaatcttttaacccactaactgattcaagagtaggtctttctgcacaggattcattaggcaatgatattacccaaaatgtaaaggtaaaatcgagtaatgtggatacttcaaagccaggggaatatgaagttgtatttgaagtgacagatagctttggtggaaaagcagaaaaagatatcaaggttacagttttaggacagccaagtatagaagcgaataatgttgaattagaaatagatgatttatttgatccattaacagatgcaaaagtaggtctccgtgcaaaggattcattaggtaatgatattacgaaagacgtaaaagtaaagttcaataacgtagatacttcaaattcaggaaagtatgaagttatatttgaagtgacggaccgttttggaaaaaaagcagaaaaaagtattgaagtccttgttctaggagaaccaagcattgaagcaaatgatgttgaggttaataaaggtgaaacgtttgaaccattaacagattcaagagttggcctccgtgcaaaagactcattaggtaatgatattacgaaagatgtgaaaataaaatcaagtaatgtggatacttcaaaaccaggtgaatatgaagttgtatttgaagtgacagatcgttttggtaaatatgcagaaaaaacaattggagttatagtgccagtaattgatgatgaatgggaagatggaaatgtgaatggttggaaattctatgctgggcaagatattaaactgttgaaggatcctgataaagcctataaaggcgattatgtattctatgattctagacacgttgctatttctaaaacaattccactaacggatttgcaaataaatacaaactatgaaattacagtgtatgctaaagcagaaagcggcgatcatcacttaaaagtgacgtataagaaagacccggcaggtccagaagagccgccagttttcaatagactgattagcacaggcacattggtagaaaaagattatagagaattaaaagggacgttccgcgtaacagaattaaacaaagcaccattgataatcgtagagaattttggagctggatatataggtggaattagaattgtgaaaatatcgtaa

SEQ ID NO: 294 - DNA, 3711 bp, Bacillus thuringiensis
  source 1..3711: mol_type = genomic DNA
atggacccaaatgatcataatgaatatgaagtcatggatactggcagcatgggctatcagccaaggtatccccttgcgaatgcacctggtgctgaattgcaacagatgcattacaaagattggatggatatgtgtacgtatggggaatcagtagcattatccgaggggcttagggctgcgctatttgttgctaatagtattatagggataatgctttcaaagattccaattgtgggtcctatagtatcaacaccctttcaaataatgggcgcagtacttccattcttgtggccgccaaacgcacccgaggcccaattttcatgggaaagcctgatgacagctgcggaagagattgctgataaaaagatcgacgcacaggtacgagctaatgcgaatgcagaattagaaggagttcataacgctatacgactctatcaagatgccgtttgcgattggaaacaagatcctaccaatgcccaactgaaggaacaactccgaatacaatatattgctacgaataccgttatctttagtagaatgccgtcttttcgagtacgaggatttgaagtcccattactcagcacttatgtgcaagcggctaatttacatttaatccatttaaaagatggagttcaatttggagaagaatggggaatggactcagcaacagttgatcgattttatagctacctaaaatcagatatagaaatctatacgaattattgtatagattggtataataaagggttatcggatagtatagaatctgaacccacttggaatggttggaatacgttcaataatttccgcagggatatgactcttatggtccttgatttagtttcgatatggccaacatatgacccgagacgctatccccttcctaccaaatcacaattgacacgagaattatatacacaagctatagggagttataaaagtgttgagcctcttctgccccctccatctccatttagatggttacgtgaaatagagttttttttaagagacagtcaggatgaggtggaacagtttgctggttttcaacaggggtatcaatacacgcttgacaccaccatctatcgtccaccagtagttggtacacggacttccctagttgatagtattgctatgggactgggttctgatgatgtagtgtatagaataaagaatatttcctacaatggatggtttccaaaaaaacttgatttttattatactccttccgaacgcgttgaaagtgtaggagagattcgtactgatgctaataatatgattgattatatcggacttggttgtagggcgaaggtgactgaaccttgtgatccttgtacgactaattgtacgattgatactgtgaatacaaccgcatcttgtgacaatcctaatctttatagccatcgattgtcatcgataaacccaagtgctccatacccgggtcaaaattggatgtttagcttttgctacggctggactcatttcagtgtagatgacaacaatttgatagcggctgacagcattactcaaatccccgcagtgaaagcctatagaatagggggatatggcaaagtaatgaaagggcctggttatacaggcggggatttaatggtgttttatggggcaggggaaatcaactggagacttaccattccggacacgacaaaggcttatcgagtgcgagctcgtgtggcaacaatccctacttctcagcctgtagatacagtgaggtataatcagtttgaatacagggatatagaagtaatatctccaacaactactgtacatgagtattccataggattcgatatcactggtgatgactgggggctgttggacaaaatcgaattcatcccaattgaaggatccgtggaagaatatgaagcagaccaagctttagaaaaagccagaaaggcagtgaacgccttgtttacaggtgatgcgaaaaatgccttacaattgaacatcacagattacgcagtggaccaagctgccaaccttgtcgaatgtgtatcagaggagttccatgcccaagaaaaaatgatcctcttagaccaagtcaaatttgccaaacgactcagtcaagcacgcaatctattaaactacggagactttgaatcgtcagattggtctggagagaatggatggagaacaagtcctcatgtccatgtcgcatctaatcatccaatctttaaagggcgctatctccatatgccaggtgcgacaagttctcagttttctaaccatatctatccaacttatgtatatcaaaaggtggatgaatcaaaattaaaatcctatactcggtacatggtacgcgggtttgtcggcaatagtaaggacctagaattactggtagaacgatatggaaaagatgtccacgtggaaatggatgtaccaaatgatattcagtatacgttaccaaggaacgaatgtggtggctttgatcgatgcaaaccagcatcctatccaacaagcacttctcacacatgcacatgtaaagatacggctccaatgcatacggattgtcagtgtcaggacaagatgaatcgtactttggcagatacgtatcacaatgaatcatcgagtcgtgtgatgtatgcggacggattccatgctcatacgtcctgtggatgtaagaacagtgacaggtatcaaaacggaacacgtccatctaaatcttgtggatgcaagaacccacatgtcttcacataccatattgacacaggatgtgtggatcaagaagaaaaccttggtttgtggttcgctttgaaaattgcgagcgaaaatggtgtcgcaaacattgataacctagaaatcattgaagcacagcagttaacaggagaggcgttagcgcgtgtgaaaaaacgggaacagagatggaaacaagaaatgacaaaaaaacgtttagaaacagagaaagctgtacaagcagcgcaaggtgcgattcagaatctgttcacaaacgcgcagcacaatcgtctgaaatttgaaacgctattccctcaaattgtccatgcagagaagctcgttcaacagattccctatgtgcatcacccattcttgagcggggcgctgccaactgtaccaggcatgaattttgaaatcatccaacaactattggcagtgatcggaaatgcccgtgcattatacgagcaacgaaatctcgtgcgtaatggtacattcagctcaggtacaggaagttggaaagtgacagaaggggtaaaagtgcagccattgcaaaacacatctgttcttgttctgtccgaatggattcatgaagcgtcccagcagttacacattgatccaaatcgcgggtatgtgttacgtgtaacagcgcgaaaagaaggcggaggaaaagggactgtaacaatgagtgactgtgcagactatacagagacactgacctttacatcatgtgactttaacacgtctggttcccaaacgatgacaagtggtacattatctggatttgtgacgaagacgctagaaatcttcccagacacagatcgtatccgtattgacatcagtgaaacagaaggtacgtttaaaatagaaagtgtggaactcatttgtatggaacacatggaagaccacatgtatgatatcgccggaaatgtggtggaagagatgcgttacctagattcatctcgttcgatgggtggtacattagatgcgatgtgttatacaaaaattggagagtttggttgttag

SEQ ID NO: 295 - DNA, 1158 bp, Bacillus thuringiensis
  source 1..1158: mol_type = genomic DNA
atgttagatactaataaagtttatgaaataagcaatcttgctaatggattatatacatcaacttatttaagtcttgatgattcaggtgttagtttaatgagtaaaaaggatgaagatattgatgattacaatttaaaatggtttttatttcctattgataataatcaatatattattacaagctatggagctaataattgtaaagtttggaatgttaaaaatgataaaataaatgtttcaacttattcttcaacaaactctgtacaaaaatggcaaataaaagctaaagattcttcatatataatacaaagtgataatggaaaggtcttaacagcaggagtaggtgaatctcttggaatagtacgcctaactgatgaatttccagagaattctaaccaacaatggaatttaactcctgtacaaacaattcaactcccacaaaaacctaaaatagatgaaaaattaaaagatcatcctgaatattcagaaaccggaaatataaatcctaaaacaactcctcaattaatgggatggacattagtaccttgtattatggtaaatgattcaggaatagataaaaacactcaaattaaaactactccatattatatttttaaaaaatataaatactggaatctagcaaaaggaagtaatgtatctttacttccacatcaaaaaagatcatatgattatgaatggggtacagaaaaaaatcaaaaaacatctattattaatacagtaggattgcaaattaatatagattcaggaatgaaatttgaagtaccagaagtaggaggaggtacagaagacataaaaacacaattaactgaagaattaaaagttgaatatagcactgaaaccaaaataatgacgaaatatcaagaacactcagagatagataatccaactaatcaaccaatgaattctataggacttcttatttatacttctttagaattatatcgatataacggtacagaaattaagataatggacatagaaacttcagatcatgatacttacactcttacttcttatccaaatcataaagaagcattattacttctcacaaaccattcgtatgaagaagtagaagaaataacaaaaatacctaagcatacacttataaaattgaaaaaacattattttaaaaaataa

SEQ ID NO: 296 - DNA, 1164 bp, Bacillus thuringiensis
  source 1..1164: mol_type = genomic DNA
atgatagaaactaataagatatatgaaataagcaataaagctaatggattatatgcaactacttatttaagttttgataattcaggtgttagtttattaaataaaaatgaatctgatattaatgattataatttgaaatggtttttatttcctattgataataatcagtatattattacaagttatggagtaaataaaaataaggtttggactgctaatggtaataaaataaatgttacaacatattccgcagaaaattcagcacaacaatggcaaataagaaacagttcttctggatatataatagaaaataataatgggaaaattttaacggcaggaacaggccaatcattaggtttattatatttaactgatgaaatacctgaagattctaatcaacaatggaatttaacttcaatacaaacaatttcacttccttcacaaccaataattgatacaacattagtagattaccctaaatattcaacgaccggtagtataaattataatggtacagcacttcaattaatgggatggacactcataccatgtattatggtatacgataaaacgatagcttctacacacactcaaattacaacaaccccttattatattttgaaaaaatatcaacgttgggtacttgcaacaggaagtggtctatctgtacctgcacatgtcaaatcaactttcgaatacgaatggggaacagacacagatcaaaaaaccagtgtaataaatacattaggttttcaaattaatacagatacaaaattaaaagctactgtaccagaagtaggtggaggtacaacagatataagaacacaaatcactgaagaacttaaagtagaatatagtagtgaaaataaagaaatgcgaaaatataaacaaagctttgacgtagacaacttaaattatgatgaagcactaaatgctgtaggatttattgttgaaacttcattcgaattatatcgaatgaatggaaatgtccttataacaagtataaaaactacaaataaagacacctataatacagttacttatccaaatcataaagaagttttattacttcttacaaatcattcttatgaagaagtaacagcactaactggcatttccaaagaaagacttcaaaatcttaaaaacaattggaaaaaaagataa

SEQ ID NO: 297 - DNA, 3727 bp, Bacillus thuringiensis
  source 1..3727: mol_type = genomic DNA
atgaattcatatgaaaataaaaatgaatatgaaatattgaatgattcaaaaaaatctaacatgtcgaacccttatttacggtacccactagcaaatgattcactagcttctatgcaaaatacgaattataaagattggttaaccatgtgtgatagaactgatactgatgttttaagcagcagaggtgcagttagtacgggggtgggtatgctttctacgattttgagcctttttggcattccacttatcggagaaggaattgatttattactaggagcggcagatttcctttggccagaatccgatggcggccatcaatacacctgggaagacttgatgaaccatatagaagagcttatggatgaacgattagaaactgaaaaaagaactactgcacttgacgatttacgtggtctaaaagctcttttaggtctattccgtgacgccttcgattcttgggaaaaaaatcaaaacgacccgatagctaaaaatagggtcggcggctattttgaagatgtgcatacccattttgtgaaagatatggcgtctatattttcagctacaaattatgaagtattactattacctgtctatgcacaagctgcaaatttacatttacttttattaagagagggagttatttacggaagccgatgggggatagctccagcagctgatttctatcatgaccaactattgaagtatacggccatatacgcaaaccactgtgttacttggtataataatggtttagctcaacaaaaagaactgttcgcaaaatcaccaaactggaaccgcttcaatgcatatcgtagagatatgacaattactgtattagatatcattgcattattcccaacttacgacgctcgtttgtatacaaaaccaataaaaacagaacttacaagagaaatctattcagatgtattgaatttagatgtatatggggtacagcagacagatttgaataaaaatgaggccgccttcacacggtccccacatttagttacaagattacgaggttttgatttttacacaagaactaagtatgcatattggagatatttggctggccatacaaattatttttcttttacgggtaatggtactatttattcaagttcatttaataactggtatgatacagatatgaccaagagtacaataaacattccagactatgctaatatttataagttatggacaaaaagttatacgaatatatctccctatacggacccagttggtatctcacaaatgcaattctctctaacaaataatcagcagttaacttatacgggtacgagtgccccaaagtatcctgtacgcgaaacgttctttgaaataccacctacggatgagaagccgctaacttatgaaaattatagtcacattttatcttacatgactagtgctcaacattttggagataaaaaaataggatatacatttgcttggatgcatgaaagtgtagattttgacaatcgtgttgatccagataaaatcacacaaataccggcggtgaaaggggattatcttcaatatggatatgttaagcaaggccccggtcatacaggcggagatcttgtgtctatgattcgtactgatcgtttagggataaatgtttattttcctcaaccactagactatcgtatacgtattcgctattcaacaagtagtaatggttatctatatatttattcacctaatactaaaatagtatatctcccacccacaaccttagtagatggtcaacctacttttgacccgatggacttcagtgcattcagagttgtagaagttccagctagttttcgtgcaagtgttgcgggctatacaaactttactattgaagcagggtttggcccagtatatatagacaaaatcgaatttatcccagataatacaacaactttagaatatgagggaggaagggacctagaaaaaacaaagaacgcggtgaacgatctgtttaccaattaaaacaaatgattaactagagtaggtggtatcgctgttaaaaaaataagcggaaaaggttgtgaatcctatgtttatcagtaatataaaaaatacgctaaaaatagaaacgacagattatgaaatcgatcaagcggccatttctatagaatgtatgtctaatgaacattcttccaaagaagaaatgatgttatgggatgaagtaaaacaggcaaaacaacttagctggtctcgtaatttactctacaatggtgactttgaagatgtatcaaacggatggaaaacaagtaatacgattgagatccgagagaatagtcccgtttttaaaggacattaccttcatatgtttggggcaagagatattgatggaaccctatttccaacttatatctaccaaaaaatagaagaatctaaattaaaaccatatacacgttatcgagtaagaggatttgtgggtagtagtaaagatctaaaattaatggtaacacgttacgggaaagaaattgatgccatgatgaatgttccaaatgatttggcctatatgcagcctaccccttcatgtggagattctcgctgtgaatcatcgtcccggtatgtgagccaagggtatcctacaccagtaacagatggatatgcttctggtaggtatgcatgccagtccaatcgaggtacaaagcatgtgaagtgtcacgatcgtcatccatttgattttcatattgacaccggagaattagatacaaatacaaacgtaggtattgatgtcttatttaaaatttctaatccagatggatatgctacattagggaatctagaagtcattgaagaagggccactaacaggagaagcattaacgcatgtgaaacaaaaggaaaagaaatggaaacaacacatggagaaaaaacgttgggaaacacaacaagcctacgatccagcaaaacaggctgtagatgcattatttacaaacgaacaagagttacactatcatattactttagatcatattcaaaacgctgatcgactgatacaggcgattccctatgtgtaccatgcttggttaccggatgctccaggtatgaactatgatggatatcaagggttaaacgcacgtatcatgcaggcgtacaatttatatgatgcacgaaatgtcataacaaatggtgactttacacagggactaacgggatggcacgcagcagggaaggcaatggtacaacaaatggatggcgcttctgtattagttctatcaaactggagtgcgggggtatctcaaaacttgcatgtccaagagcatcatggatatatgttacgtgtgattgctaaaaaagaaggacctggaaaagggtatgtaacgatgatggattgtaatggcaatcgggaaacactgaagttcacttcttgtgaagaaggatatatgacaaagacagtagaggtattcccagaaagtgatcgtgtacggattgaaataggagaaaccgaaggtacgttttatgtagatagcatcgagttgctttgtatgcaaggatatgctagcaataataacccgcacacgggtaatatgtatgggcaaagttataatggaaattataatcaaaatacgagcgatgtgtatcaccaagggtatacaaacaactataaccaaaactctagtaatatgtataatcaaaattatactcacaatgatgacctgcattccggttgcacatgtaaccaagggcataactctggctgtacatgtagtcaaggatag

SEQ ID NO: 298 - DNA, 930 bp, Bacillus thuringiensis
  source 1..930: mol_type = genomic DNA
atgatttttttggcaattttagatttaaaatctttagtactcaatgcaataaattattggggtcctaaaaataataatggcatacagggtggtgattttggttaccctatatcagaagcacaaatagatacgtctattataacttctactcatcctcgtttaattccacatgatttaacaattcctcaaaatttagaaactatttttactacaactcaagtattaacaaataatacagatttacaacaaagtcaaactgtttcttttgctaaaaaaacaacgacaacaacttcaacttcaactacaaatggttggacagaaggtggggcgatttcagatacattagaagaaaaagtaagtgtatctattccttttattggagagggaggaggaaaaaacagtacaactatagaagctaattttgcacataactctagtactactacttttcaacaggcttcaactgatatagagtggaatatttcacaaccagtattggttcccccagccaaacaagttgtagcaacattagttattatgggaggtaattttactattcctatggatttgatgactactatagattctacagaacattatagtggttatccaatattaacatggatatcgagccccgataatagttataatggtccatttatgagttggtattttgcaaattggcccaatttaccatcggggtttggtcctttaaattcagataatacggtcacttatacaggttctgttgtaagtcaagtatcagctggtgtatatgccactgtacgatttgatcaatatgatatacacaatttagcgacaattgaaaaaacttggtatgcacgacatgcaactcttcataatggaaagaaaatatctataaataatgttactgaaatggcaccaacaagtccaataaaaacaaattaa

SEQ ID NO: 299 - DNA, 750 bp, Bacillus thuringiensis
  source 1..750: mol_type = genomic DNA
atggaaaatttaaatcattgtccattagaagatataaaggtaaatccatggaaaacccctcaatcaacagcaagggttattacattacgtgttgaggatccaaatgaaatcaataatcttctttctattaacgaaattgataatccgaattatatattgcaagcaattatgttagcaaatgcatttcaaaatgcattagttcccacttctacagattttggtgatgccctacgctttagtatggcaaaaggtttagaaatcgcaaacacaattacaccgatgggtgctgtagtgagttatgttgatcaaaatgtaactcaaacgaataaccaagtaagtgtaacgattaataaagtcttagaagtgttaaaaactgtattaggagttgcattaagtggatctgtaatagatcaattaactgcagcagttacaaatacgtttacaaatttaaatactcaaaaaaatgaagcatggattttctggggcaaggaaactgctaatcaaacaaattacacatacaatgtcctgtttgcaatccaaaatgcccaaactggtggcgttatgtattgtgtaccagttggttttgaaattaaagtatcagcagtaaaggaacaagttttatttttcacaattcaagattctgcgagctacaatgttaacatccaatctttgaaatttgcacaaccattagttagctcaagtcagtatccaattgcagatcttactagcgctattaatggaaccctctaa

SEQ ID NO: 300 - DNA, 792 bp, Bacillus thuringiensis
  source 1..792: mol_type = genomic DNA
atgcaccttaataatttgaataattttaataatttagaaaacaatggtgaatatcactgttcaggacctattattaaaaaaccgtttaggcatattgcattaacagttccatccagtgatataactaattttaatgaaattttttatgtagagccacaatacattgctcaagcaattcgtttaacaaatacatttcaaggagctatagatccacttaccttaaatttcaattttgaaaaagctttacaaattgcaaatggtcttcctaatgcaggagttacaggaactattaatcaaagtgtaattcatcaaacaattgaagtttcagttatgattagtcaaattaaagaaattattagaagtgtgctagggctcgttatcaatagtgctaatttttggaacagcgtagtatctgctattacaaatacatttacaaatttagaacctcaagtagatgaaaattggattgtttggcgtaatttatcagctactcaaacaagttatttttataaaattttattttctattcaaaatgaagatacaggtagatttatggcaatattgcctatagcatttgaaattactgtggatgttcaaaaacaacaattattattcattacaataaaagatagtgcacgatatgaagttaaaatgaaagctcttactgtagttcaagctttagattcttataatgcacccattatagatgtatttaatgttcgtaactatagcttacatcgtccaaatcataatattcttcaaaatctgaatgttaatccaataaaatcgtaa

SEQ ID NO: 301 - DNA, 7305 bp, Diabrotica virgifera
  source 1..7305: mol_type = genomic DNA
acaactgacacataacgtcagtagttgtctattttcactggtgactaatttttgagaattagtaattggtttcgtatttttttcttaacaaaagggcaaaatgagcttttttggaaaattgttcggggggaaaaaggaagagatagcccctagtcctggggaggctattcaaaaactcagagagactgaagaaatgttaataaaaaaacaggattttttagaaaagaagatagaagaatttaccatggtagcaaagaaaaatgcgtcgaaaaataaaagagttgcactccaagccctcaaaaagaagaaacgattggaaaagacccaactacaaatagatggaacccttacaactattgaaatgcagagggaagccctcgaaggagctagcacaaatactgctgtattagattctatgaaaaatgctgcagatgcccttaagaaagctcataagaatttgaatgtagatgatgttcacgatatcatggatgacatagccgaacaacacgacatagccaacgaaatcacaaacgctattagcaatcctgtcggattcaccgacgatctggatgacgatgaattagaaaaagaattagaagagctcgaacaagaaggattggaagaagacctgctccaagtgccaggtccaactcaactgccggctgtgcctgctgatgcagttgctactaaaccaatcaaaccagcagctaaaaaagttgaagatgatgacgatatgaaagaattggaagcctgggcctcgtaaaattcctgaaatctggatatttgtaaacgaaatcacccatctaagatgaaaacattataaatatataggtaataacagctaaaaacgtttcaatgtagaacaagcttttgctgaaaaggcgtcttgcaaaaaatgttgataatttagaattctctatatattatatatttgccctttaaggaaagatttcttttatagtcatagttcaaccaaacgtttcataaattagaatacaggggtgtcagaattctacgtgaatttattgaaaaaaaagaactttccttaaagttggcataatgatatttttgaaattatgtaaataggtatatgtatgctcttactaacggttttaatattgggtttagaagcaccttaattttatttttatacaaggtagtaacattttttcattgtaatttgttaaaaaatattgtataacgcaaaaaatggtgtgataaagcaaaatattattgagtgcttattttcttattttattaaaagatcttatttacgttaaatctaaatatattgggtatctcagaatatgttaacaaaggtttcttgtatcaacagaaaaatacaaacttattcattattgtggttcatttgattatgcttgtgtatatttaatctgccataaacaagttttgataaatgtcactgctctgtactttttgtttttctgactgtagtttctgtcgtttgtaattccttggtctcggccatcgcccatacacacatagggaatgttgtataaaagaaatgatagtagactagcaatggcccgaacagcaagaattaaataattaaaatatggaaagactgaatactaagctgagattggtcaaagcccttatttttcctattgctatatacgcagctgaaacatggactctcaaaaaaatcaatcgaagtaagatcgaagccttcgaaatgtaggtctacagaattattgtacccgtgtcctggagagaacacagaaccaacctgtcaattctgaaagagcttcatataaaagacaaggtattaaaaaaagtataccgaccatacttaaattactttggtaaagtaacgattactatacgaagaggcaaatcgttactttgattactctgattacttcgtaccaatcgtatcagagcgagtaacgactattgtatctactttgattacttcgtatcagagcgaataacgactattgtatctactttgattactctgattacttcgtaccaatcgtatcagagcgagtaacaactattgtatctactttgattattctgattacttcgtaccaatcgtatcagagcgagtaacaactattgtcagggccgcgtttaggtcaaatgacgccctaggcaattctctagtagccgcccttcaaacatgtaccatttttgcgaaaaaaaatgcaagcagaattttttatttaaataagaatgttattgcacaaatctcggtgttcttcaaataatgtttagaaatgtgttaaaaatattctttattttacatcaggcgtaatgttacatattactattataagtatgtttgagcgtttggaactgtgtccaatgcatgcgttttaatgcatgatacgtagaaattgcctgtttgtagccgcacctacttgttcgattttaaatgagagatgcattgaaaacattactcaagcactatgtgtttatagctttgtttaacaataaaaaaattaatttttagcaatgcaaataatcaaaaccggtataatttgacatgcactttcaaatgcggtaagcagaattgctattttattttttaatcaaaagttattcggattcaaaaattgcaatttttcgatattttgaaagttcaaccgcgtctatctcgaaaactatgcatcctacgaaaaaactttaacaacattttttgcttagaatgacccaaaaaaaatagaaaaaaggtttgttttgctaagaatcactgttatgtaattcctcaagttctttgtttataataaccttatccggaaaaaattagactgttttaataaatatctagacaaattgcatatttgtaatgtacacaaaagtacatacaaattaaaagttctaaaaaaataaattttgtaattttatgtcaactatcttaattgagtgcaaaaaatgcaagaaatcgcgttgattgcactaaattgttaataattaaaaacagacgcgaactctaggcaggaaacaagtaggttttcatcctataggtcaacagtcaacaataactaaaaacgtagtcatctacctcaatatttcagtggcccgaacatggtctattttttgcttatttccctggagtaggtatatcagtgtgacgacactaaccttatctacttgtaataatacagtttgaaaatcccaaccctaactcgatgtcctactgtcgacaagtcaaatctttagtttttgcaaaatgtgcaatattgaagtgttcaatggcccaccgcatttgcccagctgccggcggcctaataatcactaaatttatgacttccatcctttttaaatgaatagtgttaagataacagaatgctatgtttgatttatttttgttatgaatgcagtttgttttattctatttagaaatgaatgccaacttctatttcattgatggatgaacatacagacttgttattcgattttaatttttatatacaaatatttttttgtacagtatttttgccgccctctcacaatttgccgccctaggcaactgcctatattgcctaatggatacagcagccctgactattgtatctacaacctgtacacttaaatactttctaccaatcgtatcccagcgagtaacggacgagacacgtattttacgagtgttatcgaatatcgttatcggtttgaaacgttttaagggtgtgagggtgaggagaagatagaagatgaaacagagggagatataatgtataggtaaaatatttaatgtatgtcgctaacaaagatcgaatgcgagaaccctatatttttatctcgatctatatctatacctatacaaaatacctacctactgagaaatacgattctcgatatgattaccggtactcaaatacaaaagtcatcatagtaatcaaagtaacgaatactgtaaatgattactttatacaaaagtaacgatttgtaacgaatactcgacagtaactataatcaacatcactaatagtcggaagaacgtggactatataattattaatattagaaggaaatgccgaagaccaagaagaagatctcgaacacgatggacagaccaaattaagactctggtgggaaaatcacaatatgaaagcgtccatctggcacaggatcgcagccattggatacagcaagctaacaatatttagagtatcaccacgccccgacaaaggctcaaggaatgaggaggagagggttttcatattgaaactaattgtaaaggtgcgtcaagatatgctccgaatgccgtatcgaacctcctcgcgaacttaaatgtggacggcaccctgcaacaacgtactgaacctcgtcgcgatcagggtgcaacatcgaactgttccactagtttccggtaaatccatccacatcaaagtaaagggtcgtcgaaaggttcagaacgaggtttgccgtaaattcacatgtggactagtttgcgaagcattcggcgtttcggtcattgttattttgaaattgagtgcatcaacatggaatgaatggatgagaattgtactactaatagaaaattatcgagaaaacgaaatattatgggaaccaaagagtcccagatattataacaaaataaaaaaataatgcataagtatataagctgatgcagcaacgtccatcttgcagtaaaggtgttaaggcaattactgatggaacatcaaaatgttcggttcgttgcttatttcaagaccccttgcgacaacgtcgcgaacctctgttgatcgcttcgatgttcgcgacgaggttcgatacggcatggcattcggagcatgtgtggacgcacccttagtacaacgagttttatttctgtagaagttttttgacagtttacaaacggtgcgctctatgcttgtatgaaaattaacttttttcttatggttgtatggttatcaaatactattgactgtaaaacatccaactcccacaaaaatctggaagcacgttgccactagcgccactgtcggcttgagttgaactacgttttgacaacgtaaaatttgacgtaaacattcaaatttaattttataaatttttgaataacgagctaattttgctaaattaaattaaaataaaaatagttcaaacacttatacaaaaacaattataaagccattttataaatgtaaggttagattgctctggttatcctactcataccgctagatggcgctatttttttgcttcctcaaagttaatgggaaatgtcaagagttgtgtgtattacagtctatagtatttggtgatagtacggactatgtcataattataatttatgaggccaatcctcgccaatgaagaagtacttcgctgaatgaccggcaaaaggcgttaaaattctgtaaaatgtacaactgacaattatagttcagcgcaaatttaagtacatgcagcatagctgcatgctgcatgattcgcgaggttagtgtgtagagatccagacagcagctgtagattaaaagaaattattatcatgatgcgataggatgcgatggaaaagcttatgggtaaactatgagttaacaaaaatcctcaaatcgatacaagggtttgcaaaagatagttgtaatacgatctaagcaaatcgtacaatagggatgtagtatagtattaatacagtacgaaagtatttattttatattcggtttaaaatttactaaaaataaaataaaatgtcgcgttttagggttttctattatagaaactaccgtttctcaaatatcaataaattttattcaacggtcttccaatgactccatcccgttttctttggtgttcgtctgaaagtgttgcaaatgtctctgttatagccgcaatggcttcttgtttggacgacaagcactgataagaaaaactgacttaaattttaaaaaacagatgaaattctaagagaatcaaacctggaatttagatgggtcttccattacttcatagtgtagatcctcctaatccaagatattttgtggacagtttcattgtcctggcagaaaaggattagtgatcatctcatgatcttgaccttgtagaaaactctatattgttgaattccgatgaaagatgtgcgatatctgagcgattccaagagcttatcagactaccttagtaaatcatgtacagtaagcgccaccctactagatacatgggtaggtacctaattgctatgtttatgtgctagtccggtccgttctcaaatgtgactttcatccctgtcatgttactgtcaagaaactattcaaaataattgtttttccgtacaaaaaatacattaattaatagtattagtactctgctttaaaataactttattcaaacaccaagaatattacaatactttaaaacttttacaaaacaaaatgacaactataaacgtcaaaattagatcagctgatctattatttgtcaacttcatatgttaatattgtccttttcatgatcatttttcagtgcgtaacaaatgataggagaaagggtaagtccgtgataatacacatttatgacatttattctaacatgacattttagttaaatctgacagttgtcacattttattttcaatttggaataaaaacaaagcaaatgtgtttcttgcatttataaaatggtattttctttgatttgtatagtgtatagtcttataaattatacagattatatttgtaatattattatctaattaaaaaaaattatttttttattatggcgccatctatcgacaactaaaataactagaagaaatgttataaaaatgtcaccgacgaaatgtaatcaccgacgtgcttttttttctgtctcatacaagttaatgtgttagaaagaaatcgaaaaactgtgacgcactgaaagatgatcatgagaaataatttattcagtttctatacattttctgacgttctaaacgtcactagacataaataaacaagtgaagggtccaggactgtaatagctctatgttcctatgtatctagtagggtggcgcgcactgtataattggattattattcaatttgtctactgtaacgtctcggttcttaatacaactcctggctttttttatttattttttgtatttttttttcagggaaccttttttatctagttatttttttataataatagtaaaccatgatttttatttttttcccaattgagtgcatagataaaagcgcgtttgcatatatgggacacccagtattaaaaaatatgcattacatttttctttacttggaccttgtgtacctgtaacctacattcaccaaattgtgttttgtattctaattttaaatacagtaatatattttgattcactta

SEQ ID NO: 302 - DNA, 1093 bp, Leptinotarsa decemlineata
  source 1..1093: mol_type = genomic DNA
cattattgggttggcgacactgtgaatgactaatagtagttggtctatcagccataatttgttgcttgtttagtgcaaatatgagttttttcggtaaattattcggtggcaagaaagaagatgaaggggcctcgcctgcagaggcaatacaaaaacttagagatactgaggaaatgctcattaaaaagcaagactttctggaaaagaagattgaagaatatactctaatagcaaagaaaaatgcatcaaaaaacaaaagagtggccctgcaagccctcaagaaaaagaagcgattagaaaaaaatcagttgcaaatagatggcactttaactactattgaacttcaacgagaagctctggagggagctagtacgaacaccacagtattggaatctatgaaaaatgcagctgaagctcttaagaaagcccataaaaacttggacgtggacaatgtgcatgacatcatggatgacattgctgagcaacatgatattgcgaacgaaatctctaatgccatcagcaacccagttggattctcagatgacttggacgatgctgagttggagaaagaactagaagaacttgaacaagaaggtctggaggaagatttactcaaggttcctggaccgacggaattgccagctgtcccaactggcgccattgccaagccagtcaaaccagctaaaaaagtggaggaagatgacgatatgaaagaactcgaagcttgggcctcataaaatgttcatggttgctaggtttgttgaaattttataaaaatatgtaggcacccatctaacccaagagattcaaagttattaatatatcactgaagtggagttgaatatcttgtttattggtggtgtaaataagaacccaactcttgatttctcctccgaaggcttgggatgcttctccataatgtatatatatcttttattttgtttacaaaggacaactagcagggtcctcaaaagattaaaactccatttgttaggaattatatatttttagcataattgcagtaatttcagagttgcctagatgcaagcttttggtaattcaaatttttctttaataataaagtatatttaca

SEQ ID NO: 303 - DNA, 488 bp, Leptinotarsa decemlineata
  source 1..488: mol_type = genomic DNA
atggtcggtatgggacaaaaggactcatacgtaggagatgaagcccaaagcaaaagaggtatcctcaccctgaaataccccatcgaacacggtatcatcaccaactgggatgacatggaaaagatctggcaccacaccttctacaacgaactccgtgtcgctccagaagaacacccagtccttctcactgaagctccactcaaccccaaagccaacagggagaagatgacccaaatcatgtttgagaccttcaacacacccgccatgtatgtagccatccaagctgtactctccttgtacgcttctggtcgtaccaccggtatcgtcttggactctggagatggtgtcacccacaccgtaccaatctacgaaggttacgctcttccccacgccatcctccgtttggacttggctggacgtgacttgaccgactacctcatgaaaatcctcaccgagaggggttactcattcaccaccacagctgaaag

SEQ ID NO: 304 - DNA, 2472 bp, Leptinotarsa decemlineata
  source 1..2472: mol_type = genomic DNA
gtcagctgactgtcttgtgacaaatttacttgcttggttaaaagttgatagtccgtcgtcttgcgagttgtgaattgactgggtgaggttgaaagtgatacaagtctacattcataatgtcgagattaattgctgatgaggaacaggaatcacagtatggatatgtccatgctgtatctggaccagtcgttacggccgagaaaatgtcaggatcagctatgtacgaattggttcgagtaggatactatgagttagtaggcgaaattatccgtctggaaggtgatatggccaccattcaggtatatgaagaaacttctggagtaacggtgggagatcctgtgttgcgtaccggtaaacctctatctgtggaacttgggccaggtattatgggttccatctttgatggtatccaacgtccgctgaaagacatctgcgacatgacggaaagtatctacattcccaagggtgtgaatgtgccttcactctccagaactatcaaatgggaattcaacccaatcaacatcaagttgggatcccacttgacaggtggagatatttatggtatggtccacgaaaacacccttgttaagcacaaaatgatcctcccaccaaaatctaagggaacagttacatacgtggcagaaccaggaaactatactgttgatgaagttgtattggaaactgagtttgatggagaaaggtctaaatacactatgttacaagtctggccagttcgacaggcaagacctgttagtgaaaaactcccagctaatcacccgcttctcacaggacagcgtgtattggactctcttttcccatgtgtgcaaggaggaaccactgctattcccggtgctttcggttgtggtaaaactgtaatttcccagtcactttccaagtattccaactctgatgtcattgtgtatgtaggttgtggagagagaggtaatgagatgtctgaagtattgagagatttccctgaactgactgtggaaattggtggtgagaccgaatctatcatgaaacgtaccgccttggttgcaaacacctccaacatgcctgtcgctgcccgtgaggcttctatttatactggtattaccctgtctgaatatttccgtgatatgggttacaacgtttccatgatggctgactctacatcacgttgggctgaagctttgagagaaatttcaggacgtttggctgaaatgcctgctgattctggttacccagcctacttgggtgctcgtcttgcctctttctatgaacgtgctggtcgcgtcaaatgtttgggtaaccctgacagagaaggatcggtttctatcgtaggagcagtatctccacccggtggtgacttctcagatcccgttacttcagcaactttaggtatcgtacaagtgttctggggtttggataaaaaacttgcccagcgtaaacatttcccatctattaactggctcatttcttattcgaaatacatgagggctctggacgatttttatgacaagaacttcccagaattcgtatcactcagaaccaaagtcaaggaaattctccaggaagaagaggacctctcagaaattgtgcaactggttggtaaagcctctttagccgaagcagacaaaatcacccttgaaatcgccaaactgttgaaagaagacttcctccaacaaaactcctactcctcctacgacagattctgcccgttctacaaaacggtaggcatgctcaagaacatgatcggactgtacgacatgtcgagacacgctgtagaaacgaccgcccaatctgaaaacaaaataacctggaacgtaatcagagactccatgagcaacatcctctatcagctcagcagtatgaagttcaaggaccccgtcaaagacggagaagccaaaattaaagcagacttcgaccagctctatgaagacatccaacaggccttcagaaacttggaggattaagtgggggtcgcgtaggactgtgcagcttggggttttaggtttcgaagatgtttctctggaactgcacttggtcactatcagaaggcctctgtccctcactctgggtattgtcaaccagcggaagtagtaataatggggttttcccttttgatattatcatgtataataataaatcatgtaaatttttcgagtatgtgtatagtttttgagatttcttggtgagggtaagtgttgaaaactataatttttcccatcattccagttacttttaagtttgattttttttttcattgaaataggtgcttatcagttgtccagtattatcgatttcattgaactgtggccattttcgaaatcatttacacattttaaagctgttgtacattatatttacctttttaaagatatatcttactattgtacagtttaccatgtatccaatgtctagaggtttagaacttttgattgtagtgctattgttctgttttgaacgataataaacatacatactgttgtt

SEQ ID NO: 305 - DNA, 1686 bp, Plutella xylostella
  source 1..1686: mol_type = genomic DNA
atggcagcagtagcagcagcccagaagaaccgcgagatgttcgccatcaagaagtcctacagcatcgagaacgggtacccgtctcgtcgccgttcgctggtggacgacgctcgcttcgagaccctggtagtcaagcagaccaagcaaagcgttttggaggaggcccgtgcccgcgccaatgactctggcttggattccgaacttatccaagacgatgtcctgattggcaccggcgctgtcactccaactgttgaggtgggcactcagcaggacgacactaaagatggtcaactcgccgatgcggaggtcggtggaatagacggaaatgcagatgacgattacaccttgaccgaggaggaggtgatcttgcagaactccgccagcgagtccccggaggccgagcaggcgctgcaacaagcggctttgcttctgcgcctgcgcgacggcatgggctcgctcgcgcgcatcctcaagaccatcgacaactacaagggctgcgttcaacacctcgagacccgcccctccaacgccaacgacatccagttcgatgctctcatcaaagtgagcatgtctcgcggcaacctgctccaactcatccgatctctccgccagtccaccgccttcgccggcgtcgacctcatctccgacaacgtctccagcaagaccccgtggttccctcgccacgcttccgacctcgacaactgcaaccacctgatgaccaagtacgagcccgagctcgacatgaaccaccccggcttcgcggacaaggagtaccgcgcgcgcaggaagaccatcgccgagatcgccttcggctacaagtacggcgacccgatcccgcatatcgtgtacacggagaccgagaacaacacgtggtcgcgcgtgttcaacacggtgctggacctgatgcccaagcacgcgtgccgcgagtacaaggcggcgttcagcaagctgcagggggacgacatcttcgtgcctcaccgcatcccgcagctggaggaagtgagcaacttcctgcgcaagcacacgggcttcacgctgcgcccggccgccggcctgctcacggcgcgcgacttcctcgcctcgctcgccttccgcgtgttccagtccacgcagtacgtgcgccacaacaactcgcccttccacacccccgagcctgactgcatccacgaactcctcggccacatccctctgttggccgacgccagcttcgcccagttctctcaggagatcggtctcgcttctttgggagcctctgacgctgaaatcgaaaaactgtctaccgtgtactggtttacggtggagtttggtctctgcaaggagaaccagcaactgaaggcttacggcgccgctctcctgtcttccatcggggagctccttcacgcgctgagtgacaagcccgagctgaggtccttcgagcccgcgtccacctccgtgcagccctaccaggaccaggagtaccagcccatttactacgtcgctgagagcttcgaagatgccaaagacaaattcagacgctgggtgtcaaccatgtctcggccgttcgaggtgcgcttcaacccgcacacagagcgtgtggaagtgctggactccgtggagcagctcgagaccctcatctcccagctcaacaccgagatgctccacctcaccaacgccgtcaagaagctcaagggctcccacttcgagtga

SEQ ID NO: 306 - DNA, 1044 bp, Diuraphis noxia
  source 1..1044: mol_type = genomic DNA
cagaagattgttcaaacacatatatcgtcgtttcgttctggataccgattattcacaacatgggaagttacaaattatacctggccgtcatagcaatagcttgcatagctgcagtacaggaagctagttgctctgatgagcaggtacagtacgatgatgrggaagaagtgatcggattagagaaagagcaggaagaagtgtccgaaccagatatggaggaaaaagaagagccagaatcagagatggagtaccatcagtgcgaggaatacaaatcgaagatttgggacaatgcatttagtaataaggatgctatggacatgatgaaactgacgtttataacagctgagaaaatgggctccgacgccgtgtgcactgacacagcccgggccttcataaacttcatcgaagtgatggccaccaacagtaactcccaatacacgagaagtatgttcaaaaagttggtggcgtttattgttagagagttgaacacgacgtcggacaatttcagagagacgtcggaggtgttcgaacgtatctggacaactccagagattcgtgactttatcagggactcagtcactcggaccaataacgtgctcaaggagccccgtatgagaagccgactgttcaaagtgattgaagcagctatggatctgatgtcgaaatccaaagacggagaatcaatgaaacagaagtttaaggggatgtacagagctcccaccaagatggcaaggagtgccatggataaggttggaaatttctttcgaaaactttaataagaatgtccatacagactagtgatatatatatatatatatatatatatagcatatacatatagataaacataaagtgcagattttctaaaaaaaaatgttaacctaaaatctcacttccccgcctctctgagagtcgtcttcagtgttttgtacagtatcattacacattcggtatatctaacataccacacaccgcgttgttcttgcaataaatattgttattgttattattttattttgttctaaataaactcaattgattaac

SEQ ID NO: 307 - DNA, 3085 bp, Acyrthosiphon pisum
  source 1..3085: mol_type = genomic DNA
tgaacctgcaataatcgccgccaccgacgcgacgtacagaccggtccgtgcagtgtcccttagttgtacttgtgcgctttttgtgtgtcggtcacgtgcggatttcgcacaaacgttttgattttttcacatcgtatatctgttattgtctccacgcaataattattgcactcgccgcagtgttgcatccattcagtagaaacaatattggcacctattttatagaggctcgcgccgttcgtatttatagttattataaatatagtgcccgaacgacttcgggctcgtccgactttcgtggattttatatcattaatttttttatcgtcgtcgaaatgctgttaatcttgaatagtgatccgttgtcgtatccgtcaccgatccatgtgtcgacgatttaaatctagaagaaattcgtccaccacggtgtccaagacctcacactcactatttaccagccggctcgacctacaaatgacttattgttgatcgatcatcagagaaaactcgcacgcttaaacaaaaaatgtttttggaaaacgaacaccagccaattattagccattcaccgtacgacctagcacgtccacttgaacaccatcaccatcatcacctcaaccatcacgccgcgtccaatcatcttcagtcgagcaccgaccacttgcaagaagattcggaaggccggagtacggctagctcgccgacgtccagttaccgcgacctgtccgggtgcgaagactttgatctgaaaatcccgaaaccgtctggtcacgggtctggcactggtggaaataacaacaacaataaccacaataacaacaacaacaaggaacaaaaaccgaaaaagcacaagtgcaaacactgtgggctggagtgcacagaaaaggtgcagtactggaagcacattcgcactcacataaaacctgaacagttgctggagtgcccaaactgtgagttcgccaccgacctgaaacaccactacgaataccacctgctgaaccacacgggtgccaagccgttcacgtgcccggactgcgactacaagtgcgtgagcaagtcgatgctccaatcacacctcaagtcgcattcgaacgtgttccagttccagtgttacgactgtggttacgcatctaagtacatgcacagcctcaagcagcacctgaagaagcgcgaccaccggccggccacgccgctcaacccagacggcacgccgaacccggacatcgtcatcgacgtggtgggcaaccgacgcgggccgcggcagaacaagaaacaaaaccggcacaacccgtatcagcaacagcaccagcagcaacagctccagcagtctatgacggtgtgttcgtcgcaggacgacggcggcagcagtagcggcggccacccatcaccgtactcgatgcaacagctgttgcagatgcctgcttccggatgcgcccaagttacgtatccgacctcggccgagtcgtttatgtattcgatgatcactaaacgctccatggagatggttgattaccaggccgccgaatacatggccatcaagaacaacaacaataataacaactcctcgtcggtcgatgataagatggaagtgcaacagcaccaccaacaatcactacaacaccaccacaacaatcatcaccataaacgcggccatcagtaccattcagatgacgtgctgaaagtggaattggctgggcgtagcggtagtggcggtgaactgacgcccgaaccacatgtacctgtgttggcggtcgccgatccttcgcccccgaccgtcgttttggccatcgagacgggaccgttgaacttaagcagagactcagtggctcctcgcgccgcgggcagcagccggcgtaaggggatcgcgtgcaaactcgagcgaccggcaaccgaatcgcagcctaagtcggtgtcggtgccggtggtggttgttccggtgtcgcctgcagtaccgatggattgcagtagcgagtcaagaggaatggtggaggagactttgattccggtaaaggaagaatatcaacagtaccaccactaccatcagcagcagcagcagcagcagcagacgtcgtcattgtcttcgacgcctgaaaaagaagacaaggaagacgagacgcatgtgtgccaccactgtgacataatattcaaggagaacatcatgtactcgatgcacatgggtttccacagcttcagggacccgttcgcgtgcaacctgtgtggcgagataacggcagataagttttcgtttttcgctcacatagcgcgcgtgccgcacagttaggctgcaattagaagacgcacctacgaaagatacgaaataataatagagtacaaattttaaaacaattaaccctttaggtatgtaatataggatttatcgtaagaaaaaattaaaacagattaagaatataaagtaatgttacataggtactatattatacatctctttctttttaataactgtcccccccaaacctaagagtgtagttacgccgcacccatgcttcgtacaaatgaaaatcgtttttggcgcttagctaaaaacgattttaatttgtatacctacgcggccggtgttgttgaacggttccggttcttaaacgttgatttcaacttatcaacgtgtaagagtcggcaccgtgtcttcaaatcgtgattgcgcacattaatcgtcgagatgcttagttgtttatcgttttaaatatttttttctcgttatatttttctcggaaataaaattttaattatgttttaattttattttcgaggaataaaagccatcgccaattttagcgatttaaaaatgtttaactcgtgtcctcatagttaagcacaaattattagtttatttgttacatgtaaattttattatccttaaaaataacttttttaactttccaattacccaagattgaatcaataatgacaaatattgattttttttacgtttaaataccgtaatacctcatcttcttcattattttttattgtttgatctagtcgttaaactatttctcctcgtatactatagtttagtatcgtgtatacctatgcacttatgatagatactattaaaaataaaaaa

SEQ ID NO: 308 - DNA, 2383 bp, Botrytis cinerea
  source 1..2383: mol_type = genomic DNA
atgtcctataatcgattagatccggcgggccaaggccaagacgattattacaatatgaataatagacatcaatcgccgcaccctcaagggtaccaactagaagatgcgccatatggcagaccaaatactacttcacccggtcctggaatgcacaatctagagatacctatgggtcctggggcacatagaattggaacgccgagtgatcaattgcaagctcaaccatcttattcggtcgaacatttagatcaaaatcaataccatcagcgcatgtccctcaatcccagtcaaagctacgactcggaatattctttagatcctaacgcgcatcacgatgcttactaccaacctccataccaaccctctcctcatgaagaacaccctctacagaactatgccccagggcaagacccctacgcttacaatgatgatgatgaccatcaaccaattctacaatcgcatgaaccttatgggccagatccgcactcagctagtggcactgattacaaaggtggttatgacgggacggtacaatctccatcagcgacacctgtacctgcgttgagaagatacaagacggtcaaggaagtccaactgttcaatggaaatctcgtactcgattgtccgattcctcccaagcttttaaatcaagtcaatcatgcaccaccgccggagagagatgagttcacacatatgagatattcagccgcaacatgcgaccccagtgagttttttgaggagcgctttacattgcgacaaaaactctttgcaaagcctcgacacacagaactcttcatcgttgtcacaatgtataatgaagatgatgtattgtttgctagaacaatgcacggagtattcaagaacattgaatttatgtgcactcgtaaagacagtaaaacatggggcaaggatgcttggaagaagatcgtagtgtgtgtggtcagtgatggacgtgctaaaatcaatccaagaacaagggctgttttggctggtttgggggtttatcaggacggaattgcgaagcaacaagtcaatggcaaggacgtgacagcacatatctatgaatatacgactcaagtcggaatttctttgaaaaaggatattgttacactcacaccaaaacagcaacccgttcaattgcttttctgtttgaaggaaaagaatcagaaaaagatcaactctcacagatggttcttccaagcctttggtagagtacttgatcccaacatttgtgtactcctcgatgctggtacaaaaccaggaaaggactcaatttatcatctatggaaagctttcgatttggaaccacattgtgcaggagcttgtggtgagatcaaagctatgttgggcccaggaggaaagaatttggtcaatccattggttgctacccagaatttcgagtacaagatgagtaatattctggacaaacctcttgaatcggcatttgggttcatttcggtgttgccaggtgctttttctgcatatcgatatgtcgctttacaaaacgataaaactggaaatggaccactggagaagtactttgcaggagagaaaatgcatggagcaaacgcgggtatttttactgccaacatgtaccttgccgaagatcgtattttgtgtttcgaactggtatcaaagagaaattgtcactggatcttacaatacgtcaagtctgctactggagaaaccgatgtaccagatacaatggcggaacttattttgcaacgtcgaagatggcttaacggaagtttcttcgctgctatctatgctcttgctcatttctatcaaattttccgaagtgatcacagctttttacgaaaaatcatgtttttgattgaattcacatatcaaactattaacatgatcttcgcttggttcgctcttggtaatttcttcttggtttttcacatcttgactacatctctcggaagttctgacttactgggtaacgttggtgtaattcttggtgttgttttcgaatggctttacttgtttacgcttttgacctgttttattctggcgctgggaaatcgacctcaaggaacgaacaaagtttatatgtctatggtttatttctggatcattatcatgatatacctaatgtttgcttcgattttcatcacagttaaatcaatccaaactcaacttgctaaagacgaattcaactggacggatattatcaagaatcagatcttctatactctgatcatttctctcgcctcaacttatctactctggttcatttcttcctttttattcttcgacccatggcacatgtttacatctttccttcaataccttcttctcactccacatatatcaatattctcaacgtttacgcttttctgtaacactcacgatattacatggggcacgaagggaa

SEQ ID NO: 309 - DNA, 2736 bp, Botrytis cinerea
  source 1..2736: mol_type = genomic DNA
atggcgtactctggaaacggaggctatgatgagcataagctccaagaccttccacctggagggggcaactaccatcaccctcaagatgaagaggaaggagctttacctttactcgattctggaggacatggcggcccattcaacagcccttacgactctcactcccaaggaggccttcgagcgaatactcctccagtcagacctgtttctgcctacagtcttacagaaacgtatgcgaacgatccacaaccatacagcagcgattacaactcatcccacacatacaatgagcagttagaagataacccatacccacaaaccgacactcctttgtcaagagccgggactacctccacagaggcatggagacaacgacaagcccctcaggctggaggtctcaaacgttatgctacaagaaaggttaagcttgtccagggaagcgtcttgagtgtcgatcatccagtacccagtgctatcaaaaatgcaattcagcaaaaatacagaaatgatttggagggtggcagcgaggaattcacacatatgcgttacaccgctgcaacttgcgatcccgatgaatttactctgaaaaatggttacaatctacgacctgccatgtacaatcgtcatactgagttgctcattgccgttacctattacaacgaagacaagcagttgactgcacgtactcttcacggtgtcatgcaaaacatccgtgatattgtcaacctcaagaaatctgatttctggaatgtcggcggaccagcatggcaaaaaattgttgtctgccttgtttttgatggtatcgatccttgcgacaaagacacactcgatgttcttgctacaattggtatctaccaagatggtgtcatgaagaaagatgttgatggaaaggagactgttgctcacgttttcgagtacacaacacaactttcggttactgccagtcaacaacttatccgcccaaccgagggtgatgccaactgtcttcctccggtgcaaatgatgttttgcttgaaggcaaagaacacaaagaagattaattcccatagatggctgttcaatgcatttggtcgtctccttaaccccgaagtttgcatccttttggatgccggtacgaagccaggacctaaatcgttgttgtctttgtgggaaggtttctacaacgacaaagatctaggaggtgcttgtggagagattcacgctatgttaggaaagggaggcaaaaagcttctgaacccgcttgttgcaggtcaaaacttcgagtataagatcagtaacattcttgacaagcctctagagagttctttcggatatgtcagtgtgttgccgggagctttctctgcataccgattccgagctattatgggacggcctcttgaacaatacttccacggagatcacactttgtccaagattcttggaaagaagggtatcgagggaatgaacattttcaagaagaacatgttcttggccgaggacagaattctctgtttcgagcttgtagccaaggctggtagcaagtggcatttgacttatatcaaggcagctaaaggagaaactgatgtacctgaaggagctgctgaattcattggtcaacgtagaagatggcttaacggttcctttgcagcaggaatgtattccatcatgcatttcggcagaatgtacaagagtggtcacaatattgtccgcatgttcttcttgcacattcaattcttatacaacgtcttctccaactttctcagttggttcatgttatcttctttctggctcactactactgttattatggatcttgtcggtacccctactgctgcttcggacactactgcccttcaccatggctggcctttcggtgatactgctacccccatcatcaacacgattctgaaatatctctacttgggattcctactcgttcaattcattctggctcttggtaatcggcctaagggatccaaggctacttatattgtctcctttgtcgtttttggtgttatcaatctctacgtccttgttctatccatgtatctggtcgttcgtgctttctcgtcaggagatagtctcgatactagtagtgcgaaagatttctttgagagtttcttcggagatagttcgagttccggagctggtatcattattcttgctttagctgctacatttggattgtacttcgttgcatccttcatgtatatggatccatggcacatgttccattctttcggaccgtacttgttgctcatgtcatcttacatcaacattctcatggtgtacgctttcagtaattggcacgatgtttcttggggtaccaagggatctgataaagcagaagctcttccgtcagctaaaactacgaaggttgatggtaaagcagcagtcattgaagaaatcgacagaccgcaagaggatattgatagtcagtttgaggcaactgtcaagcgtgctcttagtccatttgttcctgaagttgaagatgagagtaagaccttggaagattcttacaaatctttcagaaccaagcttttgatctcttgggtattctcaaacgcgttgttggctgttgctatcactagtgacagtgttgatggatttggtttcggaaatactgcatcaataagaactgctaagtttttcgaaattttgctttactcaacggctttcttggcacttattcgattcctcggatgttcttacttcttgttcaagtctggtatcatgtgctgcttcatgagacgttaa

SEQ ID NO: 310 - DNA, 2715 bp, Botrytis cinerea
  source 1..2715: mol_type = genomic DNA
atggaaacatcaaggagctggaatagttcggctgaaaactatcctatgaatgaacttattcaacattcaaacaattctgttactgatcctgctacacagttagataacactgatcatattagtgatgtacatcactcaaatgatgctcatgatgttggtgaaagtttgctatcagatactagtggctaccatccaacaacaccctatgtgactggtactgggcaggtacaacgtcaacgttcaccaaccagctcagtgaacggtgaggaatttttcggggatcaacaccatcttccagatatcgaccaggacttctacagaagccccgaagactcctttaatgcgcaagacatgccgtccgcgaacggtgctcgtggagctcttcggcgccgcgctactcgaaagattaaactgattcaaggcggtcagggatctgtcttgagcgcaaactaccctgtaccaagtgcaatcaagaatgcattacagccccagtacagagatatagagaatggtaccagcgagttctcagagatgcgatacaccgcggtaacttgcgacccgaatgattttaccttgatgaacggttatacactacgccagcacatatacaaccggcacaccgagcttttgattgcaatcacctactataatgaggacaaggtgctattcgctagaaccttgcatggtgtgatgaagaacattcgcgatattgtgaatctgaagaagtccaggttttggacgcagggttccgcagcatgggagaaaattgtcgtctgcctagtgttcgacggtttcgaaaaggcggatccaggtgtgctcgatctcctcacaaccgttggagtatatcaagacggcgtgcgaaaacaggatgtggatggaaaggagacgacagcccatgtcttcgagttcacgacacagttatccatcactcccgacctacagctttctcgtcccaattcggatgtggatgattccagtaacttgcctccagtacagctcctcttctgtctcaaacaaaagaataccaaaaaaatcaactcgcatcgttggttgttcaatgcctttggacggattctcaacccggaagtcaccattttgatcgacgcgggaacaaaacctggacctcgctctttattggccttatgggaggcattctataacgacaagaaccttggtggcgcatgtggtgagatccacgctatgcttgggagccggaactccaagttactaaatccgcttgtggcaatacagaatttcgaatacaagatttcgaatgttcttgacaaaccccttgagagctccttcggctacgtcactgttctccccggcgcattttcagcatatcgctttcgagcgatcatgggccgtcccttggagcaatattctcacggcgaccatacgttgttgtctggcaagaaaagtatcaacaacatgaatatttttaaggagaatatgttccttgcagaagatcgtatcctttgtttcgagctagtagtgaaagaaggacagaattggcacttgtcttatgtcaaagctgccaagggcgagacagacgtaccggaaggccctgctgagtttctcagccaacgccgccgttggctgaatggatcatttgcggcctcgctatactcgcttattcacttcggtcgcatgtacaaatccgggcacagtctgctccggatgataatgtttcatttccagctgctatacaacattgccaatgttatttttagttggttctctttatcatcctattggctcactaccactgtcatcatggatcttgtcggtacacctgtaactgcatcgaactatcacggctggccgtttggcgatactgcgtcccccatattcaaccacgttattgaatatatttaccttgcgtttgtgatcacacaattcattctggcccttggaaatcggccaaagggatcgcaagtgacctatctggtgttgttcgtggtgtttggatttattcagctctacatcatcattctgtcattctatctggtttaccgggcactacggactcccattggggaacagatcgacacgtcttcggccgcagcattctttgagagcatgtttggaggaacgggagtcgccggcgtgattttactagccttggtcaccatttacggcttgaactatgttgcctcgttcctctacttggatccttggcatatgtttcactccttcccgcagtatatcattctcgcttcgacatatattaacattttgatggtgtatgccttcaataactggcatgatgtttcttggggcacaaagggctcagatgaaagcgaaaagctcccttcggccaatgtgatcaaagactcgaaatccggtgtcgagatggtcgaagaagaggagatgcaacaaacagatattgaccagaagtttcaggagaccgtgctaagaactctggcccctgtcgaagtggaagttaccgtagaaaccaaggaggtcgatgacacgtataagtcgtttaggacccgcttggttgtctgctggatcctgtcgaatatgctgctggtcgggattgtcacctcggatgatttcgcatttcttggcgttggtcctctacgacccggaccgccatactacttcaaatttcttctatatgccactgctttcttgtcgattatcagattcttagggtttctttggtttctcggacgaacaaacattatgtactgctttgcgaagaggtaa

SEQ ID NO: 311 - DNA, 4648 bp, Botrytis cinerea
  source 1..4648: mol_type = genomic DNA
aaaccttccttccgagccaggatatcgagctttcgacgtcttctactacctcctcacatctgcatcgactcctgccgaacgagaattcttgagcttaaagcaagcttctagttacgcgcttctagaaaagtctggaacatatggccctccaccgtaccttcctactgcggatgatgctgctgctgcagacgacttcagagcatcattaaaagctattggtatcaagggtgccgcacacagagatctcatctcaatattagcaggattactaaagctaggtgataccttgagctttgttcttgatggggatgcgttggaggaaatttgtgaggatgttggaggtctgcttggtttggaacccgatgttctcgtcaagcaatgcacaacccaagagcgagaaactttgatcggtggtctctatgaagcccttgtagattgggtaattctgaaggccaacgaagccattgctagtgagatgctcaggatcaaggacggtgattcttccagtgaagggggaccaggagctcgaaccccaaatacagaagacgacaatggtgatactgtctgcataactgttcttgagattccagacccaaatcctgggaaagcggctgcagtgcgaggtgtctttgacgatactcagggtattaattccgaaatgaaagaagatggtgtggatgtagtttctgctggctcaacggttatccgagagatgcaaaatgctgtatccgaagttgctccagatctcggtatcatgactggaccttctgggagagatcgtgaacacgagcttgagaagcgtgagatcgtattagagaaggttgcccgcgagggagaagatgatggtttcctcaagaagcttctgctcccaatcgagggtcaaggtattaacctaggccgcaacggtcgtattgacctaccttccgttcttggtagcagtcgcgtctggtatcacttatctatgcatccgaccgacgattcacccgcagctctcgcttcgcttccttcaacaacttcggcttggtccgcgggtgctatctcacgccaactccgcgcctggcgtttgccagagtgggcaaatcgacgaaacaaaaacttggattttacagccgatttcgatttcgaagaatttgttcaacgatatgccccccttggttgtaaggatggccgtgatggcattgaaagctgggtcatggagcgtggttggagcaatggtgaagttgtcataggcaaagagcgaatatggatccgcgaaagtgcttggtgggaagctgaaaccatgcttgacctaaagccggccgaaggggagttccaaagtatgggcggtcctggaggcatggcaggcatgctaggagcccacgacatgaacacaggatactcctccaacccaccaaatggaagtggtttctttgccggtcccaataatgatctgacgcctcttgggagtcacgataatatgatgaatcgacaaagtcaagtcaacgtggcccggagtaacctcggggctcccaccatcgcaccatcaagaaatatcagtggtggtgactatggactcggcttcaagggagataatacgaggggccaggtttattacactgatgagaatggagaaatggtggatgatcccgaaggtggcaccccgaaagctgtcgtcagcgaggcagcaacaaaccagcgtcgtatctgggccgccattacctgggctttcacgtggtggattccttcattcctcctctcatttattggtcggatgaaacgaccggatgtacgcatggcttggagagaaaagctagtgttgtgtttctttatcctcttcatcaatgccttggttattttctggattattgaatttggtaaactcctctgtccaaattccgataaagcgtggaatgcaaaagaagtcgctactcatcaaggagataacgatttttgggtcagcattcatggaaaagtatacgatctttccaagttttggaagttgcagcacagtgataccactgtcgagacaacctctgatgttatgcaaccatttgctggtttgaacttggacagttacttcccgccaccattgactgttgcatgccctggccttgtaaccgattacaccgtggttttactggacaatagtactgttgaatatccttccggggtccatacatctggcaacctttcagcatatacaaccagtaaactttacgactggaattggtatgcggacgtgtacacacctgcaatcaaagagtattaccatggtgatctagtggtcaagaatagtgcgatcaagagtgaaggccaaaatgaaaatcattattgggttatatcacgagtgatggatgacaattacaaaacagccaacgcatcttatcaagtggatatcctcaacaacttgaattgcatgaacaatttgttctatgcaggcatccctgattttcgagattctattagatgtcagatcaacaactacatccttctcgctttcacaattattgtgtgtgctgtcattgtcgtcaagttcgtgtctgcacttcaatttggttcgaagcgtcgtccaactcctcaagacaagttcgtcatttgccaagttccagcatacaccgaaggtgaagactcattgcgtaaagctttggactctgttaccgctctacaatacgacaataaaaggaagctcatctgtgtcgtttgtgatggcatggttgtaggaggtggtaatgatcgccctacaccaaagattatcctcgatattctcggtgtagatcccaagatcgaccctccagccttaccgtttaaatccgtcggagatggcaacgagcaactcaactatggtaaggtatactcaggtctatacgaatttgaaggaaatgtggtaccatatattgtagtggtcaaggttggcaaggaatccgagcaatccaaatcgaagcccggtaatcgtggaaaacgtgacactcaaattattctcatgagtttcctcaatcgcgtccatcacagagcacccatgaacccattggagttggaaatgttccatcaaatcaacaacattattggcgtagatccagaactttacgaatatctactgatgattgatgccgataccagtgtaagggaagactcgctgaatcgtctcgttgctgcctgtgtcaatgacggtaaaatcgctggtatttgtggcgaaaccaatcttgaaaacgaagagcaatcttggtggactatgattcaagtttacgaatatttcatctcgcatcatttggccaaggcctttgaatctctattcgggagtgtcacttgtttacctggttgttccactatgtatcgtctacgtaccgctgacaaaggcaaaccattgattatcgctgatgccatcattgacgagtacagtgagtgtgttgttgatactttacacaagaagaatcttctgtctcttggagaggatcgattcttgactacgttgatgaccaagcacttcccatacatgaagtacaagtttattccagatgcatacgctagtactgccgcacccgaaacctggagtgttcttctttctcagagaagacgttggatcaattccaccattcacaatctagctgagttggtccgacttcctgaactgtgtggattctgttgtttcagtatgagattcgtcgtcttcatcgatctgttcggtacaattattcttcctgcaactacagtctatctaggatatctgatctacaaagtcgcaacgcatcaaggtcaattccctctcatttcgatttgtatgattgctggtacatacggtttacaagctttgatatttattctcaaacgtcaatggcaacacattggatggatgattatttatatccttgcattcccaatttactctttcattttgccaatctactcattctggaatcaggataacttctcgtggggtaacacacgtattgtcctgggagaaaagggagctgcaaaggttgtggccgtggacggcgctgaatttgacccaagaagcattcctcttcagcgatgggacgattacgcctcacacaacaaccttccaggacgtcgtggagtaccagtcgaaaaggcatacgatacattcgatgatcaatacgaaatggatgacatgaaatccatgtactcatctgtcaagccagcctccactattttaactggtttccctggtcgcggtccatacatgcctcctcaatctacttactccgcaaaccaatacactgaccaccctgtccgcaatcattctgcaatgtcccttcgccaacaagatcgttccgcctcaccatatcaagactaccctggcaacaatcgtccttcgatgcaaatgatgtcttcggataatcttctcggtggtggtccaggacgacatcaatcacgctcgtcggtaggcttcacaggtggtgctcgttcaccattagcaggagctggtattgatagacctgctagtggatttgatttccaaaggggtaccgccggtccagatgatttgcagattgtagaggctattcaaaactgcttgagggaggtagatctagataatgttacgaagaaacaggttagagctttggtagagcagaggttgcagacagagttggttggtgagaggaggacatttttggacaggagtattgattctgagttggctgctatgtaa

SEQ ID NO: 312 - DNA, 259 bp, Botrytis cinerea
  source 1..259: mol_type = genomic DNA
catttcggaggcggtcgaaactcgccggtttcatgcgtgcctctcacttcttcagtgaagctcgaaggaaccacgcttgaccaagttaatatgttcaccctatgtctatttcaggatgtgttcagcaaagcttacaaatcgaatcctgatagtatgccgtactttttggttcctatcaattgtccaaatcacactggggactggaaagattatgagcccatgtcaataattgattgggaaactgttcaatatgtccaag

SEQ ID NO: 313 - DNA, 200 bp, Botrytis fragariae
  source 1..200: mol_type = genomic DNA
gcatggcaagaggcagaacataatcctggaattgttcgtacatctattatgagcctcgatgatttaaagattgagctctgccttccgatcgagccaccaccaattccgcccttgacacttcactggaattccagcacagagctgtctgtcgagtttacaaacgatgccgaaataggaaccaccgaggacatgatattacg

SEQ ID NO: 314 - DNA, 210 bp, Botrytis cinerea
  source 1..210: mol_type = genomic DNA
agaagcagattgttattttggccatctcaccatcatcgcagatggatatgcctccaaattccgcaagcaatacatcaacaaaactcccattgtcaaaagtaaattctacgctctagaattaatagattgtcccatgccagctcccaatcatggaatcgtagtcctctcggacgtctccccagttctcctctatcaaatcggtacccacga

SEQ ID NO: 315 - DNA, 254 bp, Botrytis cinerea
  source 1..254: mol_type = genomic DNA
gcgaagttgatggagcaaaagaagttcatgaaaattggcttgtctacagaagctttccgatcctacgtcccaatcatacaaatggaggtggaaaactttatgaagcgttcttcggcgttcaaaggtccaaagggaactgctgacattggtcccgctatggctgaaatcaccatctacactgcttcgcacactctgcaaggaaaggaagtccgcgatcgattcgatacctcctttgcctctctctaccacgacct

SEQ ID NO: 316 - DNA, 209 bp, Botrytis cinerea
  source 1..209: mol_type = genomic DNA
ttcaacgctgtcaactgggtagaatcatctgcatgggatggaagagacgccattgtcgttgctggagatattgctctatatgccaagggtgctgcacgtccaactggaggtgctggagctgttgccatgttgattggaccaaatgctccagttgttgtcgagcctggtcttcgcggatcctacatgcaacatgcctacgatttctacaa

SEQ ID NO: 317 - DNA, 186 bp, Botrytis cinerea
  source 1..186: mol_type = genomic DNA
gtctggctaagcctagtcaattgaatgcgttcattcgttatagttcacagcagactgaaagtcatgatacgttaacagagacaactcgaaatattggcatcatagctcatatcgatgcaggcaaaactacaactactgagcgtatgctctattacagtggctatactcgacgcataggagacgttg

SEQ ID NO: 318 - DNA, 1610 bp, Fusarium oxysporum
  source 1..1610: mol_type = genomic DNA
atgggttttaatccgcaaggccaaggcaacggcccaaactatgatgcgccacgggaaatgcaagatttaccagctggccaagcttaccactttcgcgaatctgacgaaacagccgccgctcgtgtttctcctgtgagcaatccttacgaaccagactatgatcaattgtcccctccccctccgctgggcgcacaacgacccgtgcccgagcagaatgagtcgagccgcgatcttctacacagttcataccaaggcagcgtaggccataacagctttgacggccatagttttggtcacaatagctatggacctggtgcttttgggcattatcctgctgaccagcacggtcgcatgcctgggtctccgggctacgaatacccagagcctgagtacgatgtcgaagcttcgcgtttggcagaatctcgtctctccgtcatgcatcgcgcccctacgatgcaagattggggtcagaatggcgaggctctgtctgttccagactttgcccacggacgccccgactcaacgtaccaggagttcgatgtcgacgagagctggatgatgcgacagcagcagaaccaactcgcaggtggtctcggtcgctcaaagacccgtaaagtcaagctcgttcagggctccgttctcagcatcgattaccccgtgcccagcgccatcaaaaacgccgttgaaccgcgataccgaagcggtcccggaagcatggaggaggagttcacaaagatgcgctacacagctgctacatgcgaccccaacgatttcaccctgcgaaacggctttaacctccgccccaagatgtacaaccgtcatacagaactgctcatcgccatcacctattacaacgaggacaaggtgctacttgcgcgtaccctccacggaacgatgcagaacattcgggacattgtgaacctcaaacgctccaagttctggaacaagggcggtcctgcgtggcagaagatcgtcgtttgtctcgtctttgatggtatcgacaaggtcgacaagaacgttttcgacgtgctcgcgacggttggtatctatcaagatggtgttctcaaaaaggatgtcaatggcaaagaaaccgtcgcccatattttcgagtacaccagccaagtctccgtgacacccgatcaacagctcgtccgtcccgatcccgacaagcctcatcgcaatctcccccccgtccagtttatcttctgtctcaagcagaagaacagcaagaagatcaattcgcatcgctggctcttcaatgcctttggccgcattcttaacccggaggtcgccatcctcattgatgccggaacgaagccggccccccgcgccctgctgtccctctgggagggcttctacaacgatcgtgatctcggcggcgcctgtggagagatccatgtcatgcttggcaagggtggaaagatgcttctcaatccactcgtcgcggtgcagaatttcgagtataagatctccaacgtcctcgataaaccgctcgaaagtgcctttggatatgttagtgttttgcctggtgctttctcggcgtatcgcttccgcgctatcatgggtagacctctggagcagtactttcacggcgaccatacgctctccaa

SEQ ID NO: 319 - DNA, 4677 bp, Fusarium graminearum
  source 1..4677: mol_type = genomic DNA
atggcgagacgaatgtccatgtattcgatggcctccgaggctatgggcggtcctcaagctccccagcagatgtctaccacgactctcctgaatgccatccacaacatctacctgtcttctcaaccttatcagatcgatgccggtactagtctggttgtcaacacatggctcacagctgctcaggctggtgctactgttgatgctaccctcgctgctcgagcctgggagcatgctaggcgtcgtgctgaagatggatgtgttgttttaggttcactccaccaggcaactccctcgcttctcgtgccgttcctgaacactttcccgttcgccattcccgcatccatttacaagtcattggaggctgtacaaccgtttctccgatgtgtcactccatacaacgcttcggcccctcgacagatcgcactcggcgttacactgacattgagtttgggaggaagtgtcacaggagcctctctggccttgtctcaaggtggaatcgatactgagaatggattgctcaacgttcctgccgaggctggataccgtgcttttgacgttttctactatttgctcacatccgcctcgacacccgcggagcgagagtttctaggcctcaaggcgccttcagcgtatgctctccttgctcgctcgggtacttacgagcctccttcttacctcatcaccgccgatgatggtgccgctgccgacgactttcgccaggcactcaaggagattggtatcaagggatctgtccaccgtaacttcatctctaccttggctggacttctcaagcttggcaacactctcgactacgatgccgattccgacgatttcgaggagatctgcgaagatgtcagcggtcttcttggtatggagcccgaggttctcatgcaacagttgagcactgaggatcgacgaacacttgttgctggcttgtatgaggctctcgttgactgggtcatttccaaggccaacgctgccattgccgctcagatgctccgtatccgagatggcgatgagtctgttgatggtcgtggcgtccgcactccaaacgaaaacgaggatggtgacaccgtttccatcactgttgttgaagtccccgaacccgctctcggcagggctttggccatgcgaaccattttcgacgacactttgggcattaacgctgagatgattgaggatggtgtcgagatccaccctgcttcatcttctgttgttcgggagatgcagcaggccgttgccgatgtcgcgcccgatctgggcattatgactggtccccagggccgagaccgccagcatgatattgagaagcgagaagtcattttagagaaggctgcctacgcttctgaggaagacagcttcctgaagaagttgttgttccctgttgagggtcaaggcatcaacttgggccgaactggtcgtttcgatctaccaggtctcctgagctctagccgtgcctggtttcatctcgctctgcatcccacagacgattctcctgctaacttggctacccttcctgctatcacctctgcgtggtcagctggtaccatttcccgacagctccgttcttggcgtcttcctgaatgggccaaccgtcgtaacagaagtctcgactacacagctgattttgatgtagacgagttcgttggtcgttacggcgcactaggctgtaaggatggcaaggacggtatcgagacttggatgctcgagagaggctggagcaacggcgaagtctttattggcaaggagcgaatctgggtccgcgagggtccttggtgggaggcagagagcatgctcgacatcaagcctgctcacagtcttcaaagcataggtcaaaatccgttcacatccggttttgacacaagctactcagccaacccacccaatggcagcggcttcttccctgctcccgctatggacaacagcatgaatggcagcaatgaccagctcatgcatacccgtaatttcagccagggcaacatgagccaagccactttcaaccaacaccctcacttgaaccctcaatcagcaccttcgattgccccatctgctatgcgcaatgctcagcccgctaccggtgactacggtctcggtaacaagggcgacacctacaagggacaggtattctataacgatgatggagacttcactggtaagcttgatggagaccttgccaaggacaagaagatcgaaaccaagcccctgacctttggccgacgagcttgggttgcttttgtttgggccttgactttctggattccttcacctcttctcaagtttgttggacgcatgcgacgacctgatgtccgtatggcttggcgtgaaaagctcgtcttgttcttcattatcctccttcttaacggcttgattatcttttggattatcggtttcggaaagcttttgtgtcccaacgccaacaaggcatggaacgttaaggaggttgctggccatgcagaagatgaggatgctttctgggttgctatttttggcaaggtttacgatatcaccgacttctggcgacaacagcacagtgataccagcattaagaccaccaagacgaacatgttgcccctcgctggtatggttatggataactacttcatgcctcccctgaacagagcttgcagaggcctcggcatcaaggagactgttcaactcaccttcaacgagactataacgaaccctcttgcacagcatgtttctggtttctacactcgcgaccgtaccagtgctcttcacaacgctgactggttctggacgactttccagcccaagatcaaggaatactaccatggtgatctcgtttggaaagaaggcaccgttaagagccagggctcaggtagcgagcagcatccatgggtcatgtacggtaatcagatctacgatcttacggattatctgcacaccctagatgtcaacgacaacttcgatacctacaagttcttgaacgaggacatggtcaacttatggaagaacagccccggtaccaacatcaagaaggatcttgaccttctcatttccaacgcaaagaatgagactgtggccgccaaccttaagaacagttggcagtgcattcaaaacattgcgtacaagggtatcgtcgatttccgtgactcaccccgctgccgtgtcaacaactggctccttttggccttcgccattatcatctgtatcgtcaccgctgtcaagttccttgctgctctacagtttggttccaagcgacgtccttcgccccaggataagtttgtcatctgccaggtgcccgtctacactgagggtgaagattctcttcgaaaggcattggactcgttgacggctcttcagtacgacaacaagcgcaaacttatctgtgtcatctgtgatggtgtcgtcgtcggtgaaggcaacgatcgtcctacacccaagattgttctcgacattctcggtgttgatcccaaggttgatcctcctgcgcttcccttcaagtctgttggcaacagtgccgagcagctcaactacggtaaagtttactctggtctgtacgagtttgagggcaacgttgttccatatatcgttgtcgtcaaggttggcaaggagtctgaacagaccaagtctaagcctggtaaccgtggaaaacgtgactctcagattctccttatgagcttcctgaaccgtgtccatcatcgcgctcccatgtctcctctcgagcttgagatgttccatcaggtcaacaacattattggtgtggaccccgaattgtacgagtaccttcttatgattgatgccgatacctgcgttgaggaagacgccttgaaccgtcttgttgccgcctgtgcccacgacgcaaagattgctggtatttgtggtgaaaccgccctggagaacgatgaaaagacttggtggacaatgatccaagtttacgagtacttcatttctcatcatcttgccaaggcctttgagtctctcttcggcagtctaactcgtcccagtttcaccatgtaccgtcttcgaagtgttgacaagggcaagcccctgattatctctgatggtgtcattaaggattacagtgtttgcgacgtcgacaccctccacaagaagaaccttctgtctcttggtgaggatcgttatctcaccaccctgatgaccaagtacttccccgagatgtcctacaagtttatccctgatgctcagtgtaagactgctgcccctgaatcttggagtgttttgttgtctcaacgtcgacgatggatcaactcgaccatccacaacctggttgaacttatgcaactcaaggagctctgtggtttctgctgtttcagtatgcgcttcgttgtgtttattgatcttaccggtaccatcattctcccttcaaccaccgtctacattggttacctcatctacgtcttggctaccggcactggacccattccgtacatttctcttgctatgattggtgccgtttacggtcatcaggctctcatctttattctcaagagacagtggcaacacatcggatggatgattatctacatccttgctttccctatctactccttcattcttcccctctactccttctggaaccaggacaacttctcgtggggtaacactcgtatcgtcattggagagaagggtgacaagcaggtcgttgctgttgacgatgagggcttcgatcctcagtttgctggcgaaaggtag

SEQ ID NO: 320 - DNA, 6546 bp, Fusarium graminearum
  source 1..6546: mol_type = genomic DNA
gaactcaaaccaccaaaaaccaaccctcgcctctcccctttgctactctttgcattacgcattgccgacactcgttttacggcttcgtcaaatcactccgtctcgcccttttttgcgaccgagactacacaagccggtgaatcactttctcgtgattgattcgtctttttgaacttgaatcgacgccaaattacatctttttcgttggcctttcggaccagagtcacctctccctaagccatttgacgtttttgacgacaacatcttgcagtgccggtcacgcttgttcttccgcctgatcttgaatcacatcacgctcgttgatcatccacatgtgtatctctagataatctaataactcaacatgtcgggatatccgggcggtggtcaacgcgaccactatgacgatggctacggccaccctcagggaggcaaccaacagcaaggtggaaacacggattcctactatcaagacgatcaatactatgatcaaggctatgacaaccgcggccacaataataataacccgaataacaacagcaacaacaacaacgagggctactatgacgaatctggttattacaacgccgaccctaacaacccttatcaacatgacggaggctactacgacggccacgaccagtatcaagatggctattatgacaatggccagggtggatactacgaccaggactatgatcgtgggcaccaaggacagggtgcccgtcaaggctctgaggaagattccgaaacgttcagcgacttcaccatgaggtcggacatggctcgcgctgccgagatggattactacggccgcggggatgaacgttacaacagctacaatgacgggcagcgtggttatcgacctccctcctcccaaatctcttacggtgggaatcgctcgtctggcgcatcaaccccgaactatggtatggactatggcaatgctctacctcctggccagcgttcccgggaaccttatcctgcctggacttccgatgcacagattccgttgtcgaaggaggagatcgaggacatctttcttgacctttgttccaaatttggtttccagcgagacagcatgcggaacgtgtacgaccatctgatgatccttctcgactcccgagcctctcgaatgacgcccaaccaggctcttttatcccttcacgctgactacattggcggcgataacgctaattaccgcaagtggtacttcgccgctcatcttgaccttgacgatgccgtcggatttgccaacggtcttggaaagggtaggaagaagaagggtagcaagaagaagaagaaagacccagaggccagtgaagccgagactttacaggatctcgaaggtgacgaaagcctcgaggctgctgagtatcgttggaagacacgcatgaacaagatgtcccagcatgatcgaatccgacaaattgctctgtaccttctctgctggggcgaagccaaccaggttcgcttcatgccagagtgcttgtgttttatcttcaagtgtgccgatgattatctcaattcccctgcatgccaggctctcgttgagccggttgaggagttcaccttccttaacaatgtcatcacccctctctaccaatacttgagagatcaaggttacgaaatctctgatggtgtatacgttcgacgtgagcgtgaccacaagaacatcattggctatgacgattgtaaccagcttttttggtaccctgagggaatcgatcgcatcgtcctgcacgacaagagcaagcttgtggatgtgccaccagccgagagatatgtgaagctcaaggacgtgaactggaagaagtgcttcttcaagacttaccgcgagtcccgttcctggttccatcttctggttaattttaaccgcatctggatcattcatttgaccatgttctggttctacacctctcacaatgccccaagtatcctggttggtccaaaatacgaacagcagcttaaccaacagccctcaacagccaagtcattctctatcgtagggttcggtggtgctattgcttctcttattcaggttcttgccactctcgccgaatgggcctatgtgcctcgtcgatgggccggtgcccagcatcttaccaagaagctctttttcctgttgtttatcctggtactcaacatcgctcctggtattaaggtcttctttcttgagggtattggtggaaagaagatcgacactgccattggtatcgtccatttcgttatcgcattgattacgttcttattcttttccgttatgccacttggaggcctttttggcagttaccttgctaccaacaacaggaagtatgttgccagccaaaccttcactgctagctggcccacgctccgtggtaacgatatggcaatgtcctatggactctgggctgtcgtctttggcgtcaagatgggtgtttcatacatctacttgattctgtccttccgtgaccccattagatatctaagcatcatgaaggtcaactcttgccagggagacgctcttctttttggaaatcagctatgcagatggcatccaacaattgttctggcactgatggcattcactgacgttatcttcttcttcctggatacatacctttggtacgtccttctcaacaccgtcttctcggttgcccgatcattctacatcggatcttccatcttgacaccttggagaaacgtcttttcccgtcttcccaagcgtgtgtactccaagatcctcgccaccaccgacatggagatcaaatacaaacccaaggttctcatttctcaagtttggaacgccatcgtcatctccatgtatcgggagcatctcctcgctatcgagcatgtccagaagctattgtaccaccaggttccttccgagcaggagggcaagcgaactctgagggccccgaccttcttcatctcgcaggaagatcattctttcaagaccgaatatttccctgcttacagtgaagccgagcgtcgaatctcattctttgcccaatctctgtccacacctatcccggagcctttgcctgtcgacaacatgcccacgttcactgtcatgattcctcactacggcgagaagattcttctgtctcttcgtgaaatcattcgagaagatgaaccatactcacgagttacacttttggaatacctgaagcagcttcatcctcatgagtgggattgctttgtcaaggataccaagattctggcagatgagacctctcaattcaatggagaaaacgacaaggacgagaagaacactgccaagagtaagatcgatgatttgcctttctactgcatcggttttaagtcttctgcgcccgagtacaccctgcgcacccgtatctgggcatctcttcgtttccagactctctatcgtactatctctggcttcatgaactacagccgtgccatcaagcttctgtaccgcgttgaaaaccccgaggttgtccaaatgtttggtggtaatactgataagcttgagcgagagcttgagcgtatggcccgtcgtaaattcaagattgtggtttccatgcagagattctccaagttcaagaaggaagagatggaaaacgccgaattcttgcttcgcgcttatcccgacctacagattgcttatcttgacgaagagcccccagttgcggagggcgaagaacctcgtctgtactccgttctcatcgatggtcactctgaggtcatggagaacggcatgcgacgtcccaagttccgtgttcagctctctggtaaccccattctcggtgacggcaagtctgacaaccagaaccactctatcatcttctaccgtggtgaatacattcagctcatcgatgccaaccaagacaactatctagaggagtgtctcaagatccgaagtgtcctcgctgagttcgaggagatgaagaccgacaatgtctccccttatacccctggtgtcaagaacaatgtctcctcgcctgtcgctattctgggtgcccgtgagtacattttctccgagaacattggtattctaggtgatattgctgctggaaaggaacagacattcggtacactattcgctcgaactatggcacagattggtggcaagcttcattatggtcatcccgatttcctcaacggtatctttatgacgactcgaggtggtgtttcaaaggctcagaagggtcttcacttgaacgaagatatttacgctggtatgaccgctctcctccgtggaggacgtatcaagcaatgtgaatacttccaatgtggaaagggtcgtgatttgggtttcggctccgttctcaactttacaaccaagattggtactggtatgggtgaacaatttctgtctcgcgagtactattaccttggcactcagcttcctctggatcgcttcttgtccttctactacgcccatcctggtttccacttgaacaacatgtttatcatgttctcggtacagatgttcatgattaccatggtcaacctgggagccctccgtcatgagactgtggcctgcgagtacaaccgaaacgttcccatcaccgatcctctctaccccagcgggtgtgccaacactgatgcgcttacggattggatttaccgatgtatcgtgtcgattcttttcgttctgttcctctctttcattccccttattgtccaggaactttctgaacgtggcatttggcgtgctttcattcgattgatgaaacagttttgctcgttgtcgctcatgttcgaagtcttcgtctgtcagatctacgcgaactctgtacagcagaacatttcgttcggtggtgcgcgatatattggtacaggtcgtggtttcgccacggcgcgcattccctttggtgtcttatactctcgattcgctggaccagctatttacttcggcgctcgtttgctcttgatgcttctgttcgcgaccctcactgtctggaagggtgtcttgatttacttctggattacccttcttgcgctgacaatttcgcccttcctgtacaatccccatcaattcgcttggaccgactttttcatcgattaccgagattaccttcgttggttgtcgcgtggtaattcccgcagccacgcttcatcttggatctcgtactgtcgtctttctcgaactcgtcttacaggttacaaacgcaagacacttggagacccgtctgccaaagcatcagctgatgtccctcgagcccctttcgcaaacatctttttcagtgagattttctcgccattgatgcttgctgttgtaacgattctgccgtatctttttgtcaacgctcaaaccggtgttactaagcagagcaatccaaacttcagaggcaagatccaaccgacgcaatcgctaatgcgtctactcatcatcgcttttgcgcctgttgccgtcaatgcaggtgtcttggctgctatgttcggcatggcttgctgtatgggacctctcctcagtatgtgttgcaagaagtttggcagtgttctcgcagctattgcccatgccacagctgtgatcttccttcttatttccttcctgggcatgttcattctggagagctttaacttcacccgcactgtagcgggtatgatcgccgtggtctcgattcagcgcttctttgtgaagcttattgtttcgacctgtctcactcgtgagttcaagggcgacgcgtctaacatcgccttctggagcggaaagtggtactcgatgggatggcacacaatctctcagcctgctcgtgagttcctttgcaagatcaccgaactttccatgttctctgccgatttcgttcttggccactggcttctcttctttatggcgcccgtcatcttggtccccaagattgatactcttcactctatgatgctgttttggcttcgtcccagtcgccaaattcgaccccctatatactcgatgaaacagtccaagcttagaagaagacgtgtcatccgctatgccatcctctacttcaccctcctggtcgtattcatcgctctcgttgctggacctgctgtagttggtaaactcatgggcgaatcactcagcaagaccatcgaaaagatggttcctatgcagggtcttgtgcagcccaactatcttcacaacaacaacactaacagcaccttggcaactggtatcaagaaccctagttacaccggcgctggtctcacaatgactggcagcaagcgcgtccaggcctcggctactggcaagatcaagctgttttgagcgaaaaaagactgggagacagggtctgtctttttggacatttctcggacacagtcgtcgctctctgttcctatgcacagaagaaagttatcaaaatatgaagtttttgctttttcgtttttgcttttgcttttcagttcagtacctagcacaggtggatgcgtatgtacacattttgcattttatttagaagcggaagggtggtgagaggtggaaaggaggtcagcaacacaagccagacctgacctgacctggcattcactggttgaactgaagtggtctttttttgttggcacaaggcgcacctttttaacttattctaatgtgtacaatgaaaggaagcaaca

SEQ ID NO: 321 - DNA, 3504 bp, Fusarium graminearum
  source 1..3504: mol_type = genomic DNA
atgaacgacgatgacgcgattcacaacatccacaagaagatagagcgggaaaaggccctcatcaacgctgccaattctatgagggcacagacaaacaatgaagccgttagatcccgtctcgactcccagatgcgcgatggccgccgcaacctccagtttttcgaggagaagcttagggatattcagctgcgccgtgtgaaccaaggtgttggagacatgtctctcgggggacctgctgacgatgccggtggccctcccgcaccacctcctaaggatgcctccagcaatcccgcgggagatagaggttcctacggctctggttcgggacagtacagccaggctggcggtggttccgacttaatgccccctcgtcatccttatgcaccgggacctggtggatcgggtattcctaaggcacgccccaactttaccaagttagacttaatcaaatatgatacgccacacctgggccctcgtattcaactcatgttgtcccagatccagttcaagctcaatgtcgaggagcagtacctgaagggtattgagaagatggttcagctttatagcatggaaggtgatcggaagagcaaagccgacgcagccgctaggaaggttgaaagcaagcagaagattctactgttgaagcaggcactcaagagatatgaagaactgcatatcgacgcggacgttgcggatgcacaagatggtaagttggcgttgaatgacgtcgaatgtgaagctgacaaagagttagatgattcaatcaacgcccccaacctcaggaagcccctcagtggacaactctcgattcgaatgatagcaatcaaagatgttgaccatgctgcgactggacggttcacgagaggtcccgagacctttattgccgtgaaggttgaggataccgtcatggctcgtacgaaagcgtccaggaacgatcgatgggaggctgagttccatactatcgaagtcgacaaggccaacgaaatcgagttgactgtctacgacaaacctggcgaacaccccatgcccataggcatgctctgggttcgcatttccgacattgttgaggaaattcgtcgcaagaggattgaggccgaaatgaacagctctggctgggtgtctgccgacagaatgggcagcaccagtgctgcccctacacagttcccgatgagtccttcttcaggctcttttggaccaggtgctcaatcgactggtggtgaccaaggggatgatactggcccattcggagctgctggtccccagcctcaggtgcaaactggacctatcgaggaatggttcaatctcgagccaactggacagatccaacttcagttgacatttaacaagtccaacaacaacagccgccctgccgaccttggtcttggtcgaaagggtgccgttcgtcaacgaaaggaagaagtccacgagatgtacggacacaagttcgtgcagcatcagttttacaatatcatgcgctgtgcgctttgcggagatttccttaagtactcagcaggcatgcagtgtgaggattgcaagtatacctgtcatacgaagtgttattctagcgtcgttacaaagtgcatcagtaagagtaacgctgagactgatcccgacgaggaaaagatcaaccaccgcattccgcacagattcaacccttattccaacatgacagcaaactggtgttgtcactgtggttacatcttgccttttggaaagaagaactgcagaaagtgctcagaatgtggtcttactgcccacgcccagtgtgttcatcttgtccccgatttctgcggcatgtcaatggccgtcgccaaccagattctggacggcataaggactcagaagcaaagacaagccaaggtttcttcactttcagaaaagacacttcgacatggcaagactagcccgacaagcaccagctcgccggctccctcatactccagcacgactgctccttcttaccagtcaggaccagtctccccggaggctacagaggccgctaagatgatgtactcgaacccttccacgccgagacctgccggccctgatcgaacttcatccagctcccaagctgcggctgcagcatctgcggctatgtctggaggacctggtgcggcccaacggcagaactcagactttgggcgatatagcggcggttacgatcaaccgcaagaagacccctatgctcaaggaggtcaatacggcgcgggccagcagcgtaagtacaacccggccgattatgcgaacgtgaaccctggctacggaggaccacagcctgctgctcaggctcagcgacctgtacagcagcagccagcccaacaacctcctcctcagtcaccgctacctccagtaccgcaacaccaacaacagcagccacaggctgcctaccaacagcccgcagtgccggcgcatagccctcagcaaccagaacccatgtctcctaagcagcagtcagcggctggtggtaagtctgctcccttggctactgaccctggaactggccagcgtatcggacttgatcatttcaacttcctggctgtgttgggcaagggtaacttcggtaaagttatgttggccgaaaccaagcgctctcgaaagctctatgccatcaaggttctcaagaaggagttcatcatcgagaatgatgaagtcgagagtatccgttctgagaagcgtgtgttcttggttgccaaccggggcagacacccattcttgaccaacttgcatgcatgcttccaaacagagacccgtgtgtacttcgtcatggagtacgttagtggtggtgatctgatgttgcacattcagcgaggtcagttcggtactaagcgtgcgcaattctacgccgccgaggtctgcctggcgctcaagtacttccacgagaacggtgttatttaccgtgatttgaagcttgacaacattcttctctcacttgatggtcatgtcaagattggtgattacggtttgtgtaaggaggatatgtggtatggctccacaacaggtaccttttgtggtactcccgaattcatggccccggagattctcctggacaagaagtacggccgtgctgtcgattggtgggcatttggtgtgctgatttaccaaatgcttctgcagcagtctcctttccgtggagaggatgaggacgagatttatgacgctattctcgccgatgagcccctgtaccccattcacatgcctcgagactcagtctcaatcctccagaaattgctcactcgtgagcctgaccagcgactcggaagcggcccgactgatgcccaggaggtgatgagccagccattcttccgaaacatcaactgggatgagatgtaccacaagagagtgccgccgcctttcatgccgcagatcaagagtgcgacagataccagcaacttcgactccgagttcacaagcgttactcccgttttgactccagttcaatccgttttgtcacaggccatgcaagaggagttccgaggcttctcatacacagctgattttgactaa

SEQ ID NO: 322 - DNA, 5592 bp, Fusarium oxysporum
  source 1..5592: mol_type = genomic DNA
atggctatgagcctcccacagctcggcggcgcaggaggccctcacactcaaccctctttgccatcgttgccagcacatcttcaatccgatacgcatctcactgctcatctcgccagtcgcttccatgtctcgcatcctaccgctcgactgtcttctcacgctctcatctctctcaacacctataccaactcctcaaagggtcccgatggcggcaaggaggggagcgccatggctggcgccgaggaaatcgctgacagagcttttctgcgattaggacacagatccgagaaccaagccgttgtgtttttgggtgaatctggcgctggaaagtctactattcgagcccacctcctgactgctcttctcaacaaatcatcgacgcctctgtccacaaagctctctctcgccgcatatgtctttgatagtctcacaactaccaagactgccacaacacccactgcttccaagtccggtctcttctacgagttgcagtacgatacttcagccacaacaaaccctgttctgattggtggtaagctcttggatcatcgtctggagcgtagccgtatcgccgatgttcccacaggagagcgtaacttccacgttctttactatcttcttgccggaacaagcgaggctgaaaaatctcatctcggcttggacggtggttctgccactggaaccactcaaaagcgatggaagtatcttggccatcctactcagctcaaggttggaatcaacgatgcagagggtttccaagttttcaagaatgctctgcgaaagctcgagtttcctcgcgccgaaattgccgagatatgccaaatcctcgccagtattcttcacattggtcaactagagtttgagacaactagccagaccagcgtcactggcgatgatagtggtggtttctctcacgagggtggtacaaccattactgctgtcaagaacaaggatgttctcagcatcatcgctgctttccttggtgtcagcgccgctgacctccagaccactttgggctacaagaccaagatgatccaccgagaacgtgttactgttatgctcgaccctaacggtgctcgtgctcacgccggagagcttgcccgaacactttactctcttcttgtggcttggattcttgagaccattaaccagcgactttgtgctcccgaggagtccattgccaacactgtctcgatcgtcgatttccccggtttctgccagcaaactcccactggctctgcgctcgatcaacttctcaacaatgctgctaccgagtgcatttacaaccttactctccagaacttcttcgaccgcaaggctgatatgctggagtctgaggaagtcagcgttgctgcgaccagctatttcgataactcggacgctgttcgaggcatcttgaagcccggcaacggtcttcttagcattctcgatgaccaaactcgacgaaaccgaacagatatgcaattccttgaggctcttcgaagacgtttcgatggcaaaaacgctgctatcgaggtcggctctgcccaagctaagcttcctggaagcaacttcatgactgagaacacatctgctgtcttcaccgtcaagcactttgctggtgaggttgattaccccgtcaagggtctcatcgaagagaacggcgagatcatctctggcgatctcctcaacatgattaacggcactaagagcgagtttgttgcccgccttttcggtcaagatgctctccagactgtcactcaccccaatgaacgcactaccgttatgcaggctaccgtcagctcaaagcctatgcgagcgcctagtgtcatgtctcgaaagacgcatcgaactggtcgtcctagcacagcttacaagcgccagcagcaagaggccatggaggagttagatcagcagagccaggctggagagtctaagaagaacgccaagatgactctcgagcaaggtgcttcaggccagttccttgcctccctggacaatgtccagaaggctgtcactgaccctggcaccaactcatacttcgtcttttgcttgaagcccaacgatcgacgaattgcgaaccagttcgacagcaagtgcgttcgtatgcaggtccaaactttcggtattgcagaaatcagccagcgtcttcgatctgctgatttcagtttgttcttgcctttcggcgagtttctgggtatgacagacccggagacaatcttggtcggcagtgaacgagagcgtgctgagatggtcattgaagagaagcagtggccccagaatgaagtcagagtcggtgccactggtgtcttccttagcgaacgctgctggatggagattgcccagcttggcgaggcagtgtcagtttctggtcgctacggcggcttgccttcatcagatgctggtgatggtctcacacctgctgagtctatggctttcggtgcctccaaggaacatttggtttctggtggcaacacccctctcatgtacggtgagaaggccaagggtggttacttcactgatgacactcgatccgaggctggtgtttctgcctttggtggcggtgacatgttcaagaacctcgacacacgcgagcagatggctgagcgaggcaatgagaagtctctcgaggaggttgaggagtatagagataagcctagccgcaagcgttgggtggctctcgtcttcttcctcacttggttcatccccgattttgccatcagactgatcggacgtatgcctcgaaaggatgtccgtatggcctggagagaaaaggtggcgatcaacatgctcatttggttgatgtgtgctgtcgccgccttcttcatggtcggattccctatgctcatttgccccaagcagtatgtctacagctccaacgaactctcttcctacgacggtgacaagggcagcaagggcgcctacgttgctatccgcggtttcgttattgacctcaatgccttcattcccaaccattatcctggcagcaacctcgtcagcgaggatactctcttgaactatgccaggcaaggatatcatgcgctcttttccccatccaagtgtctgcctctgtgccagggcaaagatggtcagatccctcctgaggttactctcgacaaccgaaacaccaacatcactggtcagccccagcttcttgcctccagagatattgatgtcaactctgtctaccacgatttccgttatttcaccaatgacagccgacctgattggtacttcgagcagatgtacaccttcaagcatgtctacctcaagggacgaatgggttacagccctaagtatgtcaagaagctggcccgagatagctcttggaacgttgtcactatccacgggaaggtttacgacatgaccaagtacctccagggtggtctccgtttgaaggccaaggctggcaagcctactcccaacatcccaggtgccacagacttcatggaggacagcgttgtccagctattccgaagtgcaaagggccaagacgtttccaagtactgggataacatcaagcttagccctgtcaaaaaacaacgcatggagacctgcctgaacaacctcttctacattggtgactcagatactcgaaactccacccgctgtcagttcgctacatacttcatcttggctatttcagtcatgctcgcatctatcctggtcttcaagttccttgctgcgctccaattcggtggcaagaacgtgcctgagaacctcgacaagttcgtcatgtgtatgattcccgcttataccgaagatgaagactcgttgcgtcgtgctatcgactcgctttctcgcatgaagtatgatgataagcgtaagcttctcgtcgttgtctgtgacggtatgattatcggtcagggtaacgacaggcctacgcctcgcatcgtgctggatattcttggtgtcccagagactgtcgatcccgagcctctcagctttgagtctctcggtgagggtatgaagcagcacaacatgggtaagatctactcgggtctttacgaagtccaaggccacatcgttcccttcatggtcattgtcaaggttggcaagccttctgaggtctctcgccccggtaaccgtggtaagcgagactcccagatggttctcatgcgtttcctcaaccgcgtccactacaaccttgccatgagtcccatggagcttgagatgtatcaccagatccgcaacattattggtgtcaacccaaccttctacgaatatctcttccaaattgatgccgatactgtcgtcgctgcggactcagctactcgaatgatttcagccttcatcgatgatactcgcctgattgcttgctgtggtgaaaccgctctcaccaacgccaagggctctttcatcactatgattcaggtctacgagtactggatttcacacaacttgtccaaggccttcgagagtttgttcggctcagtcacttgtttgcctggttgtttctctatgtaccgaattcgcgctgcggagactggtaagcctttgttcgtcagcaaggagatcgttgaagactactccacgattcgtgttgatactctgcacatgaagaacctgctccatcttggtgaggatcgatatctcacaaccttgctcctcaagtaccactccaagtacaagacgaagtacctcttcagcgcacaggcctggactattgcccctgactcttggtctgtcttcctgtctcagcgacgtcgctggatcaactctactgtgcacaatttggctgagcttattcccttggcccagctttgcggtttctgctgtttcagtatgcgttttgtcgtcttcatcgatcttctgagcactatcgtccagcctgtcattgtcatgtatattgtctacctgatttaccaggtcgctaccaacccttcagttgtgcccattacagctttcctgctgctcggtgccatctacggtctgcaggctgtcatcttcatcctccgacgcaagtgggagatggttggttggatgatcatgtacatcgctgccattcctgtcttctctttcggtctgcccctgtactccttctggcacatggatgacttcaactggggtaacactcgtgttattgctggtgaagccggtaagaagatcgctgtttcagatgagggcaagtttgatcccaactcgatccctcgcaagaagtgggaggagtaccaagccgagctctgggagacacagacccagacagcccgtgacgatgtgcgatcagagatctctggttacagttatgccaccaaggctcaaggacccttctctgagtacggtggtggttaccagcccagccgccccggctcaacagctggcttcggccaccagaacatgtctcgcatgtctctggcccattctgagatgcctggcaaccgtgcgagccagtttggtggctcacagttcttctctcccgaggacctggttggcatgcctagtgatgacgccctcctcgctgagattcgtgacatcctcaagacagctgacttgatgactgtcaccaagaagggcatcaagcaagagctggagaggcgattcaatgttcccctagacgcgaagagggcctacatcaactctgcaactgaagccctgctttctggccaattgtag

SEQ ID NO: 323 - DNA, 1992 bp, Fusarium oxysporum
  source 1..1992: mol_type = genomic DNA
atggatctatcacagcgggcgcttccgcgtcacactcatcaccaaccaccaccatctctctcaaatccttcgccctcacatctgccgcctcaacattctacgtctacgtatagtcctggtcccgttgcctcgcatccaactctccctcttcccggaactcacccaccatcctcggctttgacaccaggatcggcctcaacatcccctgcatccatctcccaccggttaccttcagcatcagcttcgacgacatcaaggcatcctactggcgattatctccctgacgcagatgatcaagacgcgtcgacacccgtggatggagaggaacctccaaagaagaagcaaaagcgcaacaagccaactctttcatgccatgaatgtgtagagcgcaagaccaagtgcgacagaggtcgaccccattgtcttgcctgcataaaacgacagactgaatgccgatatgcccatgtcgcaaaccttctcgaggagaccaccaggtcagccgccaatggccgccgtatgacgaaacccccaaagaagaagtctggctctagtggaaagtcccccattccaaatatcgcagataggggtatgtcgaatgatcccagggcaacctcgcgtggcgctgttgccctctctatcggccttctgtccaacgttccttattccttgccttctgcaagtaacgtttttggtatcgggtccgagcacccatttgccaactactggacctgcgaagggggcttgcctgaggttatctcggtgcttccagacaagattcaagccgatatactacttagccgatacttcgaatgtgttgaccccgtgtatcccatgatacatcgccagacattctatgcggactacgaacacttctggcagatgaatcagcaagaaaagaccgatacagatccgtccttcattgcattaatctttgtcatgctggccctgggaactcagtttgtaacatcgactacatccccacaggagcgaaggcagacagcagagttctatgcttcggctagcaaccaagctctccgtatcgcatcatatcttagcagtgcatcgttacggtcaatccaggctatggtattgctagtgtacttccttataaacgacaaccatgcctcagatgggtgggcgtttgcaggtattctgattcggcaagcttatgctatgggtcttcatagagatccaaatattgtgactccaaatgccaccctgtttgagaagcagcagcggcgtaaggtctggcaagcggtacttctccaagatactttcttgaccgtcttactctccctgccaccgtctgcgacacatacagatgtttccgtggaagacctactcgacgatggctcctcgattgcaaatagcgacccaacagatacggcatatattcgaggctcttggactttggccaacttggttcaggagacgatctgctcaccaagatcgttagacctaccaatctgcactacggcaaggcataagtctaagttgattgctgacttccgagctgtttaccgttcgttccctgacgtcttccggtcttgggatcctgatagtatcacggcgctcgcgaaaaccaataagagggtggttcgtcagaccctgttcctgacgagcaactacttccataacttgatgcttgttcatgcttccgagagccctgatgttcctgtcaatgttcgtggtacactggaggcagcgcacgacgccattacagctttcttccttcttttcacccttcttgagatagaagcacgtgtttggtgggtgttcaaccaccgagctttcttggaggcgctgtgtatcggaaatgtcctgaaggaggctgctcgagaaccaggtggtgcagatatgatggcaagagatcctctccttgtcagggcaaaagctgatatcacacgcatgatccaaatcatgcaggttatgggcgaagactctgaggtagcgaggactcgagtgcaggttttgagtgactttctggcatga

SEQ ID NO: 324 - DNA, 1581 bp, Fusarium oxysporum
  source 1..1581: mol_type = genomic DNA
atggctcatcatcaagcgcggacgatggctatggatccgccacatatcaccgaatttgcttctgagcgttacttcgaaaagttaagccagctcaatgcacaccaacatcagcgtcaacctcctccgactcgagataatcttgatgcttccacctcgtcgccttcgagatttattcttcctctacgagaaacgaaaactgccgatgttgaacctctaaggccccttgaccagaagcgtgataaatcaaggtttttcggccttcgctcaaaggtctcgatcctccactctaaatcgagtgtcgcgtctggtcatgcgcctcgagtttctgttgagacgccgcaaaaaagtgctagcttcgatcagcttttcctaggacttcccaacgaattacagattcaaatcatttctgccctcccactaaccgacgtcctgaacctccgacttgcctccaaatcgtggcatactctcgtcactttcaacgaaaatactatcgctcgatatcatctcgaacatcatattcccgtttacgcctcccgcctctaccccatcacagacccgagcgagatcaacttccaacatctatgcgggatatggcatcgattacacgtcgctgccaagctcgcctttctaatgtgtgaatggattacaaaagatatctttcttcgccaaactgaagctcaacgacttgcatttgcaccccagaacgagcgcatgcggcgacgcctaatacctcttctatttaccatattccacttcttcgagacgtaccgaaaattgtacctaaagcgtatggctgagaacggaggaaaaggattgagacgggaaccttatactttgaacccgattgaagccgaaatcatgagtatgtacgacgaccaaaccttattaagggttcacgaagtttttccccttgtaatatcatcgttctgtcggagactccgaccaccgacatatgttggtagagtcgagcgatcacttcgtggctatattcgggagaaaccgtccgacgacatgcatgttgccattttgtgcattggtggactgcgacaagtggaaaggctttgggaaatcaagggatacaacagcaggcgtggtgctgttgacacatggtttaatgctctcacgaaagaggcgccacctactgaacagtcaacgtcgaaaccgaaacgaggtcttttcggacgcaaaaagtccactagtgaagctcgatcgtctggtactgcattgaacaaggtccggagttctggctcaatagatgggaacatggattgggaagccaatcttgtcttcaacacgagtttatctgctggggctcccatgtcacctcttacttcgcaacaggctcaggcattactcagcgaccttcccgtactgcaacaaatatggctcacaacagctgaggccctgatccttcagcgtcgggttgtcgagcgtccacaggatatcaaacgcaaccaacaggtcatgctggatttgatcagtgaagatggacttgtagaagaggacgaatggtggtacggccgcagcattcccgattctgtgcggcctcccgtcggtgtcactgatgacgatgcggattaa

SEQ ID NO: 325 - DNA, 723 bp, Fusarium oxysporum
  source 1..723: mol_type = genomic DNA
atggcgtggacgtgcagcggagacactaactcggctcttattgggaacatgtggaagaatggtctcattgccgaccctcgagtgaaagaggcattcctcaaggttgaccgagctcactacgctccagccatgccatatgaagactcaccccagcccatcggctactcagcaactatatctgcaccgcatatgcacgcctcagccatcgagcatgttctcagctaccttcttccctcatcgacatcgccggccccccgggtcctcgatatcggttctggatctgggtatctaacccacgttatggctgaacttgtcggtgagaagggccttgtagtcggtcttgagcatattcgtcagctgaaagaacttggtgaaaagaacatgtcgaaaagtgaggagggaagaagattgcttgagagtggcaaggtgagatttaggtttggtgatgggaggaaggggtgggttgaggaaccgagagagggagagaagaatgaggggacgggctgggatgttattcatgtcggggcttctgcagtggagattcatccagagctattggagcaattgaaggcacctgggtgcatgttcatccccgtcgacgatgacaagatggggtacaaccagcacgtttggagaattgagaaggatggaaatggggagattacgaagaagaagttgtttggagtccgctacgtgccgttgactgaggcaccgaaggcgtag

SEQ ID NO: 326 - DNA, 2790 bp, Magnaporthe oryzae
  source 1..2790: mol_type = genomic DNA
atggcgtatagaggtgctggagggccgggaggcggccgtgactacgatggtcacaacatgcaagacctaaaccctcacagccagtattccaatgtccaattgcctcctgggcacgagcaagaggacgaggcacacaggtcccttttgacccaaggcacaacgctctacgaccacgaccgactcggcgcccacacgcctccagtgcgtccagtctcggcctacagtctcacagagtcctatgccccgaatgctcccaccaccgttcctggctcggccgtcggcgcatctccctcgccatttcagaatgactatggtgtttcgtcgggctaccagggcgcaatgggcggccacgcagacgacggcttccccattggcggcggagacccccagcaaggccacccctacgataccgaggacagctgggtgcagcgccagaaccccaacgccgctccccagggtggtggtctgaaacgttatgccaccaggaaggtcaagctggtgcagggttcagtcctgagcattgactacaacgttcccagtgccatcaggaacgccgtgcagcccaagtaccgcgagcaggagggcaccaacgaggagtttatcaagatgcgatacaccgcggccacctgtgaccccaacgacttcaccctgaagaacggttacgatttgcgtccccgcatgtataacaggcacacggagcttctgatcgccatcacctactacaacgaggacaaggtactgctgtcccgtaccctgcacggtgttatgcagaacattagggacatcgtgaacctgaagaagtcgactttctggaacaaaggcggcccggcttggcagaagattgttgtctgcttggttttcgacggtatcgagaagaccgacaagaacgttctggacgtcctcgccaccattggtatctaccaagatggcgtcgtcaagaaggacgttcacggccaggagactgttgctcatattttcgagtacaccactcagctgtccgtcaccccgagccagcagctcatccgaccccaggacgacggccccaacactctgccgcctgtccagttcatcttctgtctcaaggccaagaatagcaagaagatcaactctcaccgttggcttttcaacgcctttggacggatcctgaaccccgaggtctgtattctgctggatgccggtaccaagcccagctcgaggtcgcttctcggtctctgggagggtttttacaacgacaaggatcttggaggtgcttgcggtgaaattcatgctatgcttggaaagggcggccggaagctgctcaaccccctcgtagctgtgcagaacttcgagtacaagatctccaacattctcgacaagcctctggagagtgcgttcggatacgttagtgtgttgcccggtgctttctccgcataccgcttccgtgccatcatgggacgacccttggagcaatacttccacggtgaccacaccctgtccaagattctgggcaagaagggtatcgagggcatgaacattttcaagaagaacatgttcttggccgaagatcgtattctttgtttcgagcttgttgccaaggccggccagaaatggcacctgagctacatcaaagctgccaagggagagaccgatgttcctgagggtgctgccgagttcatcagccagcgtcgtcgttggttgaacggttcgtttgccgccaccttgtactcactgatgcacttcggaaggatgtacaagagtggtcataacatcatccgcatgttcttcttccacgtccagctcatctacaacatcctcaacgtcatcttcacctggttctctctggcatcttactggcttaccaccaccgtcatcatggatctcgtcggaaacccccaagttggacagaacgctcgcgaaggctggccttttggtaacaccgtcacgccactcttcaacgccgttctcaagtacatttacctggcctttgtcatcctacagtttattctggccttgggtaatagaccgaagggatccaagtacacctacgtcacgtcattctttgtcttctcggtcatccaggcgtatatcctggttttgtctggatacctcgtcgtccaggccttccagacacctatcggcgagcagatcaagaccgacacggccaaggatttcatggatagtatatttggaaagagcggagccgctggtgttattctactcgccttgatcgccatctacggtatttacttcatcgcctcgttcatgtacctggacccctggcacatgttccactccttcccttactacatgctgctcatgtccacctacatcaacattctcatggtgtacgccttcaacaactggcacgatgtttcttggggtaccaaaggatccgacagtaatgaagctctaccctcggccaatattaccaaaggcgagaaggacgaagtcgtcgtggaggaaatcgacaagcctcaagaggatatcgacagtcagttcgaagcaactgtccgtcgtgccctggcacctttcaacgacgaggagaagcccgagcccaaggatctcgaggactcgtacaagtctttccgtacaatgctggttgttctctggctcttctccaactgtctcttggctgttgcgattactagcgataatttcgacgctttgacaaagaaccaaaacacggccaggactgcctctttcttccagttcttgctgttctcgaccgctttcctctctttgatccgtttcatcggattcctctggttcttgggcaagaccggtataatgtgctgcattgcccgtcgctaa

SEQ ID NO: 327 - DNA, 5619 bp, Magnaporthe oryzae
  source 1..5619: mol_type = genomic DNA
atggcacaacaccttccgcctgtcggcggcaacggtggtgcacacacgcagccttcgctacccgcgctgcccgcccatcttcagtccgacacgcacctcacggggcatcttgccagccgattccacgtcagtctgccaaccgccaaactatcttcccacgccttcatctcgatcaacacatacacttcctcgagcaagggacaagatggaggcaaggccggaagcgctcaaggcgaagctgaggatatggccgacagggctttccttcgtctgggccaccgttccgagaaccaagcaattctgttcctaggtgaatctggctcgggaaagacgaccattcgatcgcacatcctgactgcccttctgaacaagacctccacgcccctttctacaaaggtctcactcgccgcatatgtcttcgacaccctaaccactactaagactgcgaccactccgactgcctccaaggcgggtctcttctacgaactccagtacgacacagcatcaacaacgagcccgctgctcatcggtggaaagctgctggatcatcgtctggagagaagtaggattaccgacgtgccaactggcgagcgaaacttccatatcctgtattacattttggccggcacaagtgccgctgaaaaaacccacctgggctttggagagcccgatgctggaaccggaagcaagcgatggaggtatcttgggcacccgacccaactgaaggtcggcatcaacgacgctcaggggttccagctcttcaagactgccctccgcaagcttgaattccctaggagtgaaattgcagagatatgccaagtcctggctagcattcttcacatcggacagctcgagtttgagagctcggaaaacacgacagttgccggcgatgagagcggtggcttctcgcatgagggtggccagatcacaaccgtggcaaagaacaaggacgtgcttgctatagtggccgcatttttgggtgtcagtgccgctgagcttcaaacaacccttggatacaagaccaagatcattcacaaggaaagggtcactgtgatgcttgaccctgctggtgcacgcgccaatgcaaatgaactagcccggactctttactccctccttgtggcctatgtcatcgagaacattaaccaaaagatctgcgctcccgaggaggccattgttaacacagtgtccatcattgacttcccgggattctcgcagcaaagctctactggctcatccctcgatttgctcctcaacaatgctgctgccgaggctatgtacaacttgaccttgcaaaactttttcgatcgcaaggctgatctcctagagaccgaggaagtcagcgtcccacccaccagctactttgacaactccgacgcagtcaagggactgctcaagaccggcaatggtctcttgagcattcttgacgaccaaaccaggcgtcaccgcaccgacatgcagctcctggaaagtctgcgcaagcgcttcgagggcaagaaccctgccatcggcgtcagtgcagccaccgcaaagctaccgggcagcaacttcttgtccgagaatactgctgcttccttcaccgttcgccacttcgctggtgaggttgaatattcgatcaaggggctcgtcgaggagaatggcgaagtcatctctggtgacctcttgaacctggtcaactctaccaagagtgactttattgctcgtctcttcggtcaagaggccctgcacactgttacccatccgcaggagagaaccacggtgatgcaagcttcagtcagttccaagcctatgcgtgccccaagtgtcatgtcgcgcaagatccgaccgggaacggctcgtactactcgccaacgcaaggagtcaatcagtgggcgacaggacaccctagacgatattgccagcgaagccggagattcccggcgccccgtcaacaagccatccgaggaaggcgcttctggtcagttcttacactcgcttgacaacgtgaccaagtctttccatgcacagaacacaaacgcctattttgtcttctgcttgaagccgaatgacaggcgcattgcgaaccagttcgacagcaagtgtgttcgcacacagatgcaaacatttggcattgccgagattagccaacgtatcagatctgcagacttcagtgtgttcttgccctttggagaattcctgggtcttgctgatgttgacactctcctcgtcggaagtgaacgggagaaggtcgaggctgttgttgatgagaagcgctggccgaccaatgagatccaaattggttccacaggtgttttcatcagtgaacgatgctggatggagatcgctcagctcagtgatatggtaaccggccgattcggcgtgcccgaatcggagggcggcacgccactcgccaacatgccctatggcgcttccaaggagcgcctcatagcggctgggaattcgccatacaacaatgacaaggccaagtcgggctactttggcagcaatgacatcgatggcaggtcagacgctggagtttcggcttttggcggaggcgacatgttcaagaatctggatacccgtgagcagatggctgagcgtggtaatgaaaagtccatggttgaggtggaggagttcaaagacagcccgagccgcaagcgctgggttttcattacctggatgctcacatttttcgttcccgagttcctgatacagcatctcggtaaaatgccccgcaaggatgtgcgtatggcatggagagagaagttggccatcaacttcatcatctggttcagttgcttggccgccgctttcatcctggtcgtgttccctatgcttgtttgccctacgcaatatgtgtttaccggcgaagagctctcggcctacaacggaaaagatggcaaggcttcgtatgcagccatccgtggtcaggtctttgatatcggatcgttcatccctaggcaccccctgccctatctgccatcaaagctcttcacccagtacgctggcactgatatcaccggtcttttccctgttcaggtgtctgctctgtgccaaggcacgactggctctgtcaaccctgccgtgctactggattacaaagacaccaacatcaccgactcgcccaacgtttttaacagccaggatctgaattcgcgctatcacgactttcgttacttcaccaacgatacaagacccgactggttctctcagatgatgattacgttccggggcacgtataagaagggcaacatcggctacccggctcaagttgtccagaagatggcccaacaaaggaacgccatcgcaatactcaatggtcgggtgtacgatttcaccaagtacatcgctggaggccgcgatttcagggtcaagtataacgaaacgcgtcctaccgaccagagtctactcgactttatggacccgtcagtcgtgaggcttttctcggaccgtagcggagaggacgtcacgccgctctgggatgcacttaggctggacccgactttacgaaagtcgatgcaactctgtctggataacctgttttaccttggcgatgtcgatacgcgtaactcggtgcgttgcaactttgccaaatacttcatcctggctgttacgatcatcctttgctccatcatcgccttcaagttcttggctgcgcttcagttcggtaccaagaacatgcccgagaacctggacaagttcatcatgtgccagattcctgcctacaccgaagacgaagagtcgctccgtcgcgccattgactctgcagcccgtatgcgctacgatgacaagcgcaaactcttgatcgtcgtttgtgacggtatgattattggtcagggtaacgacaggcccacgccgcgcattgtgctcgatattttgggtgtctcggagacggtcgatccagagcctctcagcttcgaatctctgggtgagggtctcaagcagcacaacatgggcaaggtttactcgggcttgtacgaggttcaaggtcacatcgtccccttcttggtggtcgtcaaggtcggcaagccatccgaggtgtcgcgccccggtaaccgtggcaagcgtgattctcaaatggttatcatgcgcttcctgaaccgtgtccactacaacttggccatgagcccgttggagctcgagatgtaccatcagatccgcaacattattggtgtgaacccgacattctacgaatacatgcttcagatcgatgccgacacggttgttgctgccgattcagcgactcgtttcgtctcagctttcctggatgacacccgcctgattgcatgctgtggagagacgtcgatcgccaacgccaaatcttcattcatcactatgattcaagtttacgagtactatatttcgcacaacttgtccaaggccttcgaatctctgttcggctccgttacttgtttgccaggttgtttctccatgtaccgtatccgcgccgccgagacgggtaagccgctcttcgtctcccgcgaggttgtcgatgcatacgccactatccgcgtcgacacgcttcacatgaagaacctgcttcaccttggtgaggatcgttacctgaccacgcttctgctcaaataccacaacaagtacaagaccaagtacatttaccgagcacatgcttggaccattgcccccgactcatggaaggtcttcctctcacaacgtcgtcgctggatcaactcgacggtgcacaacttgatcgagcttattcccatgggccaactttgcggtttctgctgtttctcgatgcgtttcatcgttttcatcgatttgctctctaccatcattcagcccgtcaccattgcctacattgtttacctcatcgtgcgcatggtcctcactcctgatctggtccccgttctggctttcgtgctgctcgcggcagtttacggccttcaagctatcatcttcatcctccgccgcaagtgggagatgattgcatggatgattctatacattatcgccatgccaattttctcgtttggtctgcccctgtatgccttctggcacatggacgatttcacatggggtaatactcgtgtcgttaccggagagaagggtaagaaggtcgttgtcactgacgagggcaagttcgatccctcatccatccctcgcaagaagtgggaggagtaccagagcgagctgtgggatgcccagacctccaaggatgacaccaggtctgaggcttccggcttctcgtacgccaccaaggcccccgtcgcggtctccgagtatggtttccccgtcaacccctatggcgcataccctcccagccgacctgggagcaccacgggcataccacacatgccacacatgccatactcggccagccgcatgtcattggcccattcggagatgctcatggcgggcaacagacaaagccagttcggtggatcacagttcaacctccctcaatctggcagcgaaatggaactttcaaacctggctggcttgccatcagatgatgccttgcttgccgagattcgggagatcctgagaacggcagatttgatgacggtcaccaagaagggtgtcaagcaagagctcgagcgcaggttcggtgtaaacctcgacagcaggagggcgtacatcaacagcgccaccgaagcactcttgtctggccagctgtag

SEQ ID NO: 328 - DNA, 2487 bp, Magnaporthe oryzae
  source 1..2487: mol_type = genomic DNA
atgggcaatccctttgaaggatggccggtacacgatatcgtttacacggtaatcgtcggcctggtcatgttggctgccgtcctggagtggttcctctgggtggcggccttcatgtattgtcttgttaaggtgtttataaaggcggagcattggacgattcgggctctcgcggttgtggttgccatccttttcgtcggattcagagcggtcttcttgccaatcatggtagtgacactgcccttaccaagcgctattgtgaaactctggccggaagacatggttgtgggactacagtggtttgccttctgggcgttcgccggtctcctgacgatcccatggcttttctgtgtctaccatttcgtcaccaaccagctaggccgagagaagcgtgtcaagcaggtgctggatgaggtctcggccccaaaggttgtcatcgtcatgccttgctacaaggaagacccagaggttttactcgtggccatgaactcaatcgtcgactgcgactacccgccatcttgtatccacgtgttcctgtcctttgacggagaccaagtggacgagctttatctcaacacaatcgaaacggtcggcgtgccgctcaccttggactcgtaccctaagagcatcgacgtcacttacaaggctgcccgtatcaccatctcccgcttcccccacggcggtaagcgtcactgccaaaaggcaacgttcaagctcatcgacaaggtctacaaggaatacctcgagcgcaacgacaatctcttcattctgttcatcgacagtgactgcattctggaccgtgtgtgcctccagaacttcatctacgacatggagctgagccctggaaactcgagggacatgttggccatgactggagtcattacttccacgaccaaaaagcacagtcttattaccgtccttcaagacttggaatacatccacggtcagcttttcgagcgtacggtcgagtctggatgtggtgctgtcacctgtctgcccggagctctcaccatgttgcgtttctctgcgttcaggaggatggccaagtactactttgctgacaaggccgagcagtgtgaggatctcttcgattttgccaagtgccatttaggcgaggaccgctggttgacgcacttgttcatgatcggtgccaagaagcgataccagatccaaatgtgtacctcagccttctgcaagaccgaagccgtgcagaccatgcagtctctggtcaagcagcgccgtcgttggttcttggggtttatcaccaacgaagtttgcatgttgactgactggcgtctatggacgcgttacccgctcttggtgttgatccgcttcatgcagaacaccattcgtaccaccgctcttctcttcttcatcatggttttggctatccttaccacctcgaagcgggtcagtgacctgcctgtcggtttcatcgccatctcgctcggtctcaattggctcatgatgatctactttggcgccaagctccgccgcttcaagatctggctgtaccccctgatgttcgtactcaatcccttcttcaactggtggtacatggtctacggtattttcacggccggtcagcgcacctggggtggacctcgtgccgacgccgccgccgccgacggagacaccaccgcccaacaggccatcgaggcggccgagaaggccggcgatgacctcaatatcgtgcccgagaccttcatcccggcggcgcagatcaagcgcaaggagagcggcaggcggcgcatcgtggccggtggcaacatccagccctcggccaagatcgacggcatgtttgccatccccgagcgtggcgccaacggttggtaccagcacgacaacatctcgctattcacggttgcccacggccacactggccgcgttcctctgcaccctcgtgactcattcgacagtttcttgtctgcgcagacggccctgaactcggtctacatcccgcgccgtgtcgagagtataatgggtgacgaggatcggcgcaagtacgagctcgcccaggccagccagtttaaccagttcctctccaaccagcgccgctcgaccaacggcgagccgccgcagggccaggtgtacgagtatagtgacgtcgacctgcaaaaggccgggtacactgacaacccgctgccgcccacgcctggagagactgcctctgctgttcctgccgccctcaatctgcaccacaaggttggcagcaccgacagcctcgttagtcttgggtcttcagcgtccaacagcaaccaacgggaccgcggaaggcagcgcaccctgatgccaccaacctcctcacaggcccggaccggtaggagtccactcggccgggcgagcttcttgcgcacgtcgacgattgaggacattgagctggagattggcacaagccatggaagcagcgcaaacagacctgcactgagcaggcaagcgtcgaacaacgaccccaacaacagcaacagcggcggccatcagcaacggtag

SEQ ID NO: 329 - DNA, 1158 bp, Phytophthora infestans
  source 1..1158: mol_type = genomic DNA
atggctccgactgtccaaacgtgtgatcctgtactggtgtgcgaccctgtcctcctgtgtgaccgaagtgactccgtgctggcgagcgaccctgttccgccacagaatctctcgttcgtgctcgaaaaggggggagcagtcaagtttgaagatcgtcccgtgcctgaaattaaggacccacatgacgtgatcttgaacgtacgctacacgggaatctgtggtagtgatgtgcactactgcacgcacggctgtatcggcaagtacgtggtggataagcccatggtgctaggccacgagtctgctggcgtcgtccatgccgtgggatccgccgtcaagtctctcaaggtaggtgacgaagtggccatggagccgggtgtgccgtgccgccgttgcgtccgctgtctcgagggaaactacaacttgtgtccggatatggcgttcgcagccacgccgccgtacgacggcacactggccaagttctaccgcatgccggaggacttctgctacaagctgccgtccaccgtcagtatgcaagagggagcgatgctcgaacccacagccgtggccgttcacttctgccgtctggccaaggtgtccccgggtcagaaagtcgtcgtgtttggtgtcggtcccgtgggtctgttgacctgcaaagtggctcgttacgtgttcggagccacaacagtcgtcggcgtggacgtcaatgagaaacgtcttgcggtcgccaaggaacacggcgcgacgcacgtgtatcaggggaagtccggcgtgacaccacaggagtcggccgagcagatcattgccgagtgcggactgggcgacggggccgacgtcgtgattgacgcgagtggagcggagccctgcattcagacggcaatctacgtcgcacgcagcggtggcacgttcacgcagggaggtatgggcaagacagacatcacgttccccattggcatcatgtgcggcaaggagctccgcgtgaccggcagcttccggtactctgcaggcgactaccaactggcgctcgatatggttgcaagtgggcagctgaacgtcaagggtctcatctcgaagattgtgccgttcgaggaagccaaggaggctttcgacaatgtccagcgcggtaacggcatcaagtggctcattgaaggacccaagtga

SEQ ID NO: 330 - DNA, 3907 bp, Fusarium graminearum
  source 1..3907: mol_type = genomic DNA
gatcttcgcttggccttgctccactaagaaggagtttcactagcggcccgcgatagctagcctgatcctagtctttacctcctcaacagtaacaccttctttcaccaccacaagctgagtcttgctcctttgttggaaacagtgaccggattcacacctgacctctggcaatcaataatttttgacccaagtcaggaacttatggctctgtgacagcaaacaagcgctgctgttgctgatttgctttggctgccattcactgacattgattgactggtggcaactaccaacaaacaccttctctcacataaatatacctactacctatctaattcctctccaatttcttccccgtcaactctctttctgcgcatcagcacacggatatcaactaagaatatgagcgacatttatcaacactctttcttgaagttttaaaacacaatatctttacttctttcgctatcaaacacatccttacatacattgacatcctctttggcccattctttgagtacccagacattatctcatcatggcggacagaggtgatcgaggcggccgtggaggccgtggccgtggcggacgcggcggcggctatcaagatggtcgaggaggcggacgaggtggcggagatgggagaggacgaggtgatggtggtttccgtggcggcagaggacgaggtgagggaggacgtggtgacttccgaggcggcttcagtggtcctagaggcggccgtggaggttctgatcgcgggagaggaggatacaggggaggccgaggtggagggcaattctcaaacgagccgtctttcttcaagatcgaatccggtgttcctcagcccgatgctgctattaccaagctcgaggatgaggtggtaaagaatcaaaataattctgttgcccagcttacatcgaaaatgtccaagttgggagtagaagaaaaggagcatttgagcaaattccctccacgacctgcatttggaaacaaaggccgtccagtcactttatgggcaaactattaccagatcgacaccaatattcccatgcttttcaaatacacaatttctgtcaaagagatcgtagctgaatcagaagaaaagaccgacaagcccactgtcgcccagcctaaggggaaagggaaaggaaaaggcaagcccggaaagcctaagaagtccggttctgtcgaagtcaagggacgtaaacttttcttggtcatcaaagagactctaaacgagctcaccaagaaggacaagagcctgcttcttgcgaccgagttcaagtctcagcttatctccttgcgcaagcttgaccttggacttgacaactcatttcgagtaaacctcccgtcatcagcaaaccccgacaagaccgaagtctttgaagtgaccttaaatggccctgaagtagcccgagttgacgagatgctcaagtacgtcaaatcgaataccagtgcttcacatgacgccccaggcaaacttgccgacgacgacgacgatgcagcaaaagccctggcattcccaaaattccctgatgttgttgatgccctgaatgtcatctttgggtttggcccgaggtcgaacgaagacattagtgctgtcggaaactcccgattcttctctttcaagaacggtggtatctgcagggatatgagcatgcgtgggagacccttacaagctgttcgtgggacattccagtctgtccgcctaggtaccggccgacttcttttaaacacaaacatcactgttggcattttcaagatatccggtaactgtgccaagctcttccaggatctcaatgtctttgaagcacagaagtcggaatggcggaaagtgaataacgcgaagttgatgaacaaatttctcccaaaaacccgcgtactggcaacgatgaagtttgccaatgacaagaaagtccaacgacggaaagcaatttacagtctggcctatgcacctgagattgaacgagcctgtcgtggcaacgatcatcctccccggttcacgaagggttatgaataccctggaccaggcaacgtgagcttctacatggtgtctgattctaaagggaccggtgaatatatcactgtcagagaattctacaagcggaaatacaacgacactacgctcaaagactaccctcttcttaatctcggcactgccgcaaacccgaactttaccccagcggagtatgtcgagatcctaccgggacagtcagtcaaggcgaagttgaatagccaagaatcgaccgcgatggtcgattttgcctgtcggtcaccttacgccaatgctttatccattacgaaagatgcgcgggaaactctaggtcttgacgacgagaaattggtgtacaagcccggcaaaagcatacaaaaatggacctatgtcaatgtcaaaccaggaggcaggtctgggccggttccaaagcgcactgtgatggaatttgctcaggtcatgagacaaatgaatattggaatcagcagcaaccctgtagacccttgcacagaggtcatcacccaagaagattacgctcaaggacgttcagatgctttcttcaaatgggcgaagcagaatcgcatagagtttatacttgtgattcttggtacatcagagtccgaaacatacggcaggatcaagacattgggcgactgcacctatggtattcacacctgctgcgcccaggccgaaaagtttggattcaacagaaaccctctgccatatttcgccaactgtgctctcaaatggaacctgaaggcaggtggtgtaaaccacaagctccacaacgagttcggtctcattaaagagggcaaaacgatgttggtaggatatgacgtcacccacccaaccaacatgccttcaggccagggtgatgatgctcccagtttggtcggattggtggccaccattgaccgagatatgggacaatggccagcctactcttgggaacagtcgtccaaacaggagatgttggacgagactttgactgaagcattcaagtcacgacttgcactttggcaaatgcacaaccgacagcagctgcctgagaacatcgttatattccgtgatggcgtgtcggagggccagtttgcccaagttttacaaagagagctaccacgcattcgcattgcctgcaatgccaagtaccccaagaacaagccaccaagaatttctctgatcgtttccgtcaagcgacatcagactcgcttttatcctacttcttccgagagcatgacgtccaagaacaatatcgaaaacggtaccatcgtcgatcgtggtgtcacgcaggctcgatactgggacttctttcttactgcacactccagcatcaaaggcacggctcgccctgcgcactacactgtgttgctggacgaggtcttccgagcgaagtacggagccgaggcagccaatgaattggagagatatgcccacgagctctgctacttgtttggccgagccaccaaggctgtgagcatttgccccccggcatactatgcagacgttgtgtgcactcgagcgagatgttacagacctgagttcttcgaaatcagtgacgttgaaagtgtctcaacagctgggccgggcttaggtgccagtgacccaaagcaggtccatgcggacctcgccaactcgatgtactatatctaagtgtgccgtgtgtgggagatgagttcgctcttttgggctacaaacagagacgagaaatgaagcttttttttttggggggggggttttttttgggaaattggtaggtttctgttaaaggtatgaggtagcgggatatctttgattgtctttcgtttggtttatatcgttttgtcctcatctttgacttaggacagaatagttaggatagcggaaacagcttgcagtcttgtatttggtacttgaagttgcaaggttatacatagcaat

SEQ ID NO: 331 - DNA, 2955 bp, Fusarium graminearum
  source 1..2955: mol_type = genomic DNA
atgtctgatagagggcgctcaccctctccagggggtccctcagggcctgggaggcgaccttcacagtccccagcccgatcggcaactggctctggtagtggacctgctggcggctatgcaaagcccctgggctacgatcctgcgaagcctccaaagcaggaggaccagggaaacacacgaatggaactacctccagatgcgtacatttccgagaccaaaaaggatatgtttactttaagaaacaatcgtttcaacactgagggaaagcctgagcacatcgaggtcaaccagtaccgaatgaccaagttcgacttcaacaagaagatctaccagtacgatgttgtactttcgcctagccctgacaagatcggtccggtcatgaagaagatttgggctcatcctgttaccgtgaagaccatgaagccctacaagcttgagatgtggcttttcgacggtaagaaactggcatggagccccgcgcttgtcgaccgtggtgaacttcggttcagtgtcgatctagacgaaggccaacgtcctcctggagccaagcctcgggatggtggcaagttcctagtcactattcgaaagaccaccgagatccaagttgctgctctgcagggctatctgtctcacaagatgtccttcaataacagtgttcaagaggcactgaacttcattgatcaccttgttcgacagttcccctccaggaacctacttgctatcaagcgaaacttttaccaaactggtcgacctggagctcctcttcaagacggagccatcgttgaggtccacaagggaacctacgcttcaatccgaatgagtgacaacttgaagcaaggtggtgtcggacttggctacaacattgatgtcgccaacacctgtttctggattggcaaccagccattggacaggatggcctgcaactttcttgctaccattgacccaagcaagttccgaggacacactcctgcgactctcaatgagatcctgaagccagtcaggaataggagtggcgggtgggagtcatctgatggcttcaagcaacttcgcaagttgcgacgcctcaaattcaagatcaagcacaagggccgcccaaacgaggacaagctgtacacgatcatggactttgcattcgatgccaagtttggtgaagctggtcacacctcccgcacccacacctttgagaaggatggaaaggacatcagcgtctatgactactacaagaaaatgtacaatgtcaccctgcgactttcccaccttcctcttatcaacgctggaaagggtggcttcattcccatggagcttgccttcgttgagagcatgcaacgatacccattcaagctcaaccccgaccagacagctgcgatgatcaagatcgcggtcacccgccctgccgtacgcaaagccgacatccaaaagggagctgccgctcttcagatcggtcaagatccttatctgagggagtatggtgtcaatttcgaagcccagtttgcgaagaccgaggctcgtatcttgcctccccctactgtcaggtttggccagggcacagcggaacccaagttcgctggtcgctgggacttgcgaggaaagaagttcttcaagcagaacaccgcccccctccagaactggggctttgttgcctgtgaagcacctgtcccacaggctgttctttcagcattcgccacaacattcaagaccactttccttggtcatggcggcaaggtgactggagaccccatgcttctcaatgcacctagcaacctgcgttttgaacccggaaagctggttgagtgggctcatgaggagatcactcgccgaaaaggctacacacaactcttgttcattgtcgtgtccaagaagaacagtggtacctacgagcgcctcaagaagtctgctgattgcagatacggcattctcagccaggttgtccttggtagccatgtgcagaagaacaatggccaataccactccaacgtttgcatgaaggtgaacgccaagcttggtggtgccactgcctgcacgcctcctctgtggaagactcccacattcttccccgacagccgcccaaccatcattgtaggttgcgatgtctcccacgctgctcccggtggtgcgactgcttcagttgcttccatgaccatgtctgtggaccccaatgccactcgatacgccgcagtcgctcagacaaatggatatcgcgtcgagatgcttacccccagcaacattcgactcatgtttgcagaacttcttcctcagtggcgacacaaccacccaggaaagatacctgctcatctgatctacatgcgagatggagttagtgaaggccagttcgctcatgtattggagcaggaggtatccgaaatcaagaaattctttggaggcagcctcccccccgacaagattcccaagatgacagtcatcatcgctacgaagcgtcaccatgtacgcttctttccacagaggggtgacaagaacggaaatcccttgcccggtactctggttgagaaggaagttacccaccctttcatgtttgacttctacctcaactcccatgttgctatccagggaactgcacgccccgtgcactactcagtgattctggatgagatggctatgccagtgaatgatctgcagaagatgatttaccagcagtgctattcctacgcccgctcaaccacccccgtctcccttcacccggcggtctactacgcgcatctcgctagcaaccgagctcgtgcacacgagaacgtcgcaaccagtgatggatttagaaccggtgccaaggggcatgagattattcgggagaagcaagcccatggcatcacctcggacgctcctaacaggaccgctgatgcaccccccctgatccgtctaggaggcccttgtggacagactcctgctgatggcgagaagcgccaacgagattttttccgcagtaccatgtggtacatctaa

SEQ ID NO: 332 - DNA, 1494 bp, Fusarium graminearum
  source 1..1494: mol_type = genomic DNA
atgtcggacctacaaagccgcttggagaagctgcaggagcttttgggcaacggcgtgaagcttgctgaaacgccacacgaagacaacacaacagatggttccgctgcaaatggccttgggaatagcttcggaatggtgatggatgatgagtacatccggaacgaggagcggcttgcagctagagagcaggcctcccaggaacagctgcgagccgatgctgatgccgccagacaaggcctgctcaaaggtaataaggaaaaagccttcgacaacgctgcttttcgcatcggccagcccgttcacaaggactttgctttctgtccgtttaaggtcgtcgtgtcgtatcccgaacgtttcatcggcaaggccaacaagcctcgtgtgaagccatttttcactgaaattctcaagggccgaacttgggactttttctatcttcatgacccgattgagccagccagagacccgtacctcttgattccatccgcccagttcgaggttttcctcgaagaaatcaatctcaaactgaacactttcctcagaatccctgtttgtcccatgaacaaggacaagttctacatgaagtttggtgaaggcggcacccctcgtcctcgttacttgagacgatctttggatgcgacctctcttgacatccggccgtggcctgcagtcgaccccgaagacgtcagatccttcgaagctgcctcggcaccgcaaaagctcacctggaggtccaagatgcgaatcgttaagtccggcttcgcaccaaagaggacggcagatccagacaaggctgcgaagaagaagcgtcacagggaccaaatgctgcgcaacacattgggctacttgggtcttgcgggagatccggatggccacgacatcgttttcatctgtgtcgacgttgaagccattgaacgtaagccaaaccctatctctgaagttgggatttctatcctggacacacgggacatcaaaggcgttcaccctaaggatgctggtcgtggttggtggcctatgatcaagactcatcatcttcgagtgcatgagtatgccagtttacgaaactaccaatttgtcaaggggtgccctgactcttttgactttgggaatagcgtattcccttacaaggacgagcttcaagaagtcatcatgagcatctttaacccctatatttcctctcaacgggaacttgtcgtcgttgggcatgatgtgcgacaagacatcacctacttcaacgatataggtatagatctccgagcccttgcaggactgagagagcctatcgacacccagggcatgcaccaagcttggtgcagctcaaccaatggacgaggcctcgtcaccgtactcaacgatctgaacattccaaacaagaatctgcacaacgccggaaatgatgcccactacacgctctgcgccatgctaggaattgcggtggtagaggtcaatgggaacgagcaacagagcaacgaaatgcttaacaaggttgactga

SEQ ID NO: 333 - DNA, 4488 bp, Fusarium graminearum
  source 1..4488: mol_type = genomic DNA
atggacaccgactcgaccgacagcgaagatgatcgcgttcagtatcgcctgaccgtgaggccttcgaagcatcgaaagaatacagagaagaagcgcctgaacaagcaggttttgaaacaatacatgatagaacacgacagagaagcctatgccaaagattctgagaaaaagaagcgcggccccttcgctgaagcttccaccgacattacaccgcgagaatatcagatagaactcttcgaagccgccaaggagaagaatctcattgtggttttacctacaggcacaggttctggtaaaacactcatctccatcttattgctaaaatactacattcgaatcgaagtggaatctcgcgctcttggaaatccgaggaaggtggcctttttcttggtggaaaaagtagccctctgtgagcagcaataccgatttcttaaggaccagattttcggccacaacattgtcatgttcacaggcgataaccgcggcgtgaccaaggacaagaagtactgggatgatcagttttcctcaaacaaggttgtggtctgcactgctcacattttgctcgactgtctgaacaacggcttcattacaatggaccagatcaacctcctcatcttcgacgaagcccatcatgcaaagaagaagcatgattacgcgcaaattgtccgacgatattattattctaccgaaaagaacaagagacctcgcattctaggaatgaccgcttcccctgtggattccaaggctggagatgttgcagaactggcacttgaacttgagaaaacccttgacagcgagatcgcaacactctccgacaagatgatgcgacaggcgactgatttccaagttcatgttgaagagacagtcaaatacaacacacttggactaccagacgagaccaagacacagctttgggactcgatctctaagctagtatcgcgaaacaaggaattcaaggcgtctctcgacttcacaaaagaggcctccacaatcctaggaccctggtgtgcggaccgatactggcaagtcttgatcgacgatacagagatcaagcgactcgccgacaggactcgcatggcttttttcgggggtggagagaagttgttggcaagaggagaccaagcagaagaggctgtcagggaggttcaaaaggtcgtcgcagcccacgagtttagggcgatcagtcctcaatcgcaggaattgtcagctaaagtgaaatgtctacatgaaatcctggttcatgccttcacagtcgataacacaaagcgctgcatcgtttttgttgatcagagacacacagcttgcctcctttcggacctttacgaccaagtttcaatggcaattcccggtatgaatgcttcgtatatgattggtcaacaatctagcagcagcacccttggcaatatgtctctgcgaaagcaatgttcaacgctcaagaactttagggacggcgtgataaactgtctctttgcaacatcagtggcagaggagggaattgacattccgagttgtgatcttgttatccgatttgatctctatacttctgttattcagtatgttcaatccaaagggcgtgcgagacacgaatcttcacggtatatcaccatgctggaagacggcaacatgagacagattcgcagtctgaaacaagcagcgagagatgcaacagcccttcgagagttctgtctaagaatacctgccgatcgaaaacttcaagacgatgtatttgatgaggagacggaaagtcagatcaagcaaatacgttttaacgtgtacaaaatagaatcaacgggcgcacaacttacattcccctcaagcctcgagatactagctcgattcgttgcatccttgggtacagcagagagcagccatagcaaggctgaatatcacgtctacaaggtgggaacatatttcacagccgccgtcaatctaccgtccagttcccccatcgtctcccaaacaggctatccacaacgaagcaagcttctcgcaaaatgctcagcggcttttgaggtttgcaagaagctcatcaatggcaaacacattgatgatcatcttcagcctactttcaagaaacatttccacaaaatgcgcaatgctcgtgtgggaataagccctaacaagaagggtgagcatgacatgcgcctgaggcccaacgtttggagtatccgtggagaatggacacacttcttcccaacaagaattactcttgacagggattgtggagagaaaaacaggtcgttgattcttctttcgcgaagtccacttccaggactaccttcaatccctctattcttcggcaatggacgctcagccatcgttgaagtgacatgttctcaagaacctttacccatcacgaccgaggaagctgggggtttgactgctttcacactcaaaatctttgccgacgttttcagtaaagagtttgaggccacttgcgaccagtttccttaccttcttgcccccttggcaaaagacaccaatctaaacgaaatatcgcgaatcgactgggatactgtcaaccttgtcagagaccatgacagtctcgaatgggagaatgcgcccgacgatttctttttcgacaagcttgttgtagatccatatgatggagggcgcaagcttataatcaaaggcattgacaaatccaagaagccttctgatcctacaccggagggagtgcctgagtcgagaagtcgtgcttataggtctgcggaacaaaacattaagcagtacagcaacagtctgttttccaagtctcgactaacggcccagtggcgagacgatcaaccggttgtcaaagctgagcttctctcattgcgacgcaatctgttggacgagtttcaagtaaacgaggaaatcaacaaggattgcttcgtcattttagaacccctcaacgtgtcacctctgccaattgacgtcgtttccatggcactcaagttcccggcaatcatccacagaatcgattctgctctgatcgctcttgatgcatgcgaactattcgacctctctattccgccagcgctggcactcgaggcaatgaccaaagacagcgacaacactgaggatcatggcaagcaacaaatcaatttccaagctggcatgggttccaactatgaaaggttggaatttcttggagactcgtttctcaaaatggccaccacaatctccatttttgtactcaaacccaagagcaacgaatgtttgtaccatgtagagcgcatgctgctcatctgcaacaacaatctgttcaacacggccgtagattgcaagctcccagagtacatacgatccttggcattcgacaggcgaacttggtaccctgatcttacactcagaaaaggcaaagctttcaaggcaacagcgcgacagcgcttagccgacaaaagtattgcggatgtctgtgaagctctcattggtgctgcatacctctcaagcaaggatgacaatttgaacatggccgtcaaagctgtgtcacagatgtgcaaagcaaagtaccataccatgatggcttacgatgagtactacgcatctttcaaggttccagattggcagaaagccagtccaaacgccaaccagcgtagacttgtgcagaaagtggcagacgctaccgggtaccacttcaagtctgcgccgctgctccagagtgcattcacacacccttcttacgcgtattcagggaacgttccaaactatcaacgcctcgagtttctaggcgatgccctcatcgacatgaccatcgtcgaatatctctatcgcaactttcccctcgcagaccctcagtggttgacggagcacaagatggcaatggcctcgaaccaatttctcggttgtctgtgtgttaagctcaatctgcaccaccatcttctgttcaacacgtcgcagttcatcagcaaaattcgtgactatgtggccgaacttgagttggctgaagagactgcgcgccaagaggcagaagaagacgggactccaatgcgcatggacttttggctcaatgcgacaacgcctccaaaagcgtacgcagattcaatcgaggctcttatgggggccatgtttgtggattctgaattcgactattctgttgttgaggatttctttaccaagttcatcttcccgtactttaaagacatgtctctgtacgatacctttgcaaacaagcatccttacacatttctcaccaagaagatgcaacaggagatcgggtgcatgaaattctgtatgatttcagacacccgcgttcctgatgcagagcgtggcatggaagttatgaaagagtacgacatatattcagcctttcaagtgcacgaaagagtcatcacatgtcacgtatcaaagagtggaaggtacggtaagattgctgctgcaaagggggcactcgagttgttggagccgtatggcggtgatgtggtcgcgatgaagaagctgttgggctgcgactgcgactctgtaacagcagccatggcggagatggaccatggaacagctgtctaa

SEQ ID NO: 334 - DNA, 4356 bp, Fusarium graminearum
  source 1..4356: mol_type = genomic DNA
atgtcctcaagcgataaggtcatggcggacgcctcttccataccagactccgaggtcaaaacaatagcgtcgtcctcggtcgtcgagatctctgctacaggcgagaaggagataacgactcatatacctgtcgcagatacaccaatgtgctcagatgaccaggccaatgtgcaagagcaagacgaagaagttaagcctcagaaagtgacgcccaatccagaggtggtaaatccccgcggttaccagcgagagatgctggaacaaagcatcaaaaggaatgtcatcgttgcaatggacacgggaagtggtaaaactcaagtggccgtgatgcgcatccaacatgaactcgatacatgtgcaccagacaagattatctggttcttaggcaagacagtatcgctatgtgaacagcaatacagcgttgtccaaaggcaaatgccgtcggtatcgatgaaactgctaacggggcaattgaacatcgatgcatggtccgaggacgtctggccccgtatccttaatgggactcgtatcattgtctcgacctttgatatcctgcgagatgctttggaccatgcatttgtcaagatgaacatgctgtcccttatcgtcttcgatgaagttcataattgtgtaaagaatagctctggtcgaaaggttatggtgaatttctatcacgaacacaagaacgccggcatgcccgtgcctgctatcctgggtttaacagccagcccgatacagtcgaagtcaatccacgacgaaatccttgagctcgaggtcaccatggatgctgtatgcatcactccaacaattaaccggaaagaactcctccagcacgtcaacaagcccaatctttcccgagtattgtatgatgtggaagagcatccgactcgaacccccctaatgcagactctgcagtctgagtactcggcgatggacatcacccaggacccaagtattataaaggccaagcaacttatcgctaagggcgagaagactggacctgaaatactaagtatgttgatgaaacacaggaccttctctcagaagcagttaaagtccttatggaacaaaagcaaagacattcttgatgaactcgggccttgggctgctgacaagtacatctccgagttggtcagtctgtttctcaagagaatcgactcgccaatgacgtttaacgagtcctggagcaatgaggataggacctacctcgcaggtcatttgagacagatcgctgccagtccccatcagcccaaactaccagacagacacaacttggccgacaagacgaataaactaatccaggaactacttgcagcggatgaagatgtggtcggcattatattcgtcagatcaagggctgctgccaacgtcctttgtgctcttttgagggagcaccccgagattcgacagcgatatcgagtcggctctgtagtaggatccgcagccaccaagattcgaaagcaaaacatctacgagtatctgcccggcgcgactgccgatacattacgcgatttcaaaacaggcgccatcaaccttttggtctcgactagtgttcttgaagagggtattgatgtcgcagtgtgcaacctcgtcatatgtttcgatgagacaacgacactcaagtcccatatccaacgccgcggacgagctcgcaaacaaaaatcaaagatgatagtacttgctagatcttcatccgacgctcgggaatgggattccctagaaagagacatgaagagtcgttatgagcaggaaaggggagagttggacgctttagagatagaggctcgcactgaagcgacgtcctctttttcttatactgtgaaaaactcaggggctagattggacctcgagaattctcgccagcatctggaacatttttgtaacaaggttttccagcgagattacgttgatccgagacccgtctacattttccacaagaccgaactgggatcagcaccgccgactttcagcgcaacggtgactcttccctcgggtctgcctaagcacctccgaaggtgccaaggtggaggtggatggagatcagaaaagaatgcgatgaaggaagcggcttttcgtgcattcgtcatgctgcaccaagaaggtttggttagcgaccaccttcttcccctaaatgcagattcgaaagaagcagaagaagaggtgcagctaactgcgcccgagcttctatttgacccatggaaagacattgcacagcggtgggagaccacggctgagaaatggctctatgcttacgagttcgccgatcacgagtatgttactcctcttcatttcgagattgccttgcctgtgtgtcttccacgaccccgcgacatcacctttcatcctgaagagggacttaaatggcatgtcaaatgcacctcaatcaagaggatctccaatgatgaatgcttgggcttgccagatcatacgtcaaccctattggcgatgcattatggccaccgctggaacgtggaagatcgtgaccatgtgatcaaattcatatatgagaacaagaatctcacccgagatcaaattggatcggtacccttcggcgaaagcattgatgctctattggaaaagagagtcctggttcgggaccccaaaaatactcccttccactacgtcaaaatgatcccatcaaagcctccaaaagagcaagttcagcacccatttaatgaatacgaggaagcgccagaagaacagtatctagttgtggatcaatggacacgcaggtcggacctgttgcatgagataaaacccggtcaggggaagagctcttgcaccaaaccctaccgctgggttctcccgatttccagagcgactgttgatgaggttcctcggcgtgccgctaagtgcggtatgcttatcccttccatcattcacgaattggaggttcagctcatcgcgaatgaactgtcctcgacacttttggcgccagttggtatcacagatctgcaattggtgattgaagccatcagctcgcgtagcgctgcagagcctgttgactatgaacgtattgaatttttgggcgattcggttttgaagtattgcactgttattcaagcctactctgaacatcccttttggcccgaaggtctactcaaccatttcaaagaccgactagtctccaatacccgtttgactcgcatgtgccttgagacaggcctttccaagttcattttttccaaaacatttactggaatcaagtggagaccgctatatcgagacgaattcctagataagaagccagtcgatggtgtatcaaggtttgttggtccaaagactcttgctgatgtggtcgaggcacttgttggagcctcctaccaggatggaggaatcagcaaagctctggagtgcatcaaggttttcttgggcaccaagtgcaattggcatgatgacaaagtcgccagagacatactcttccgagcagcaattagcgacgtaccgttgccccccacgatggagcctttggaagagctcatcgggtacacatttcagaagaagtctctactcattgaggcaatgactcacgggtcgtatgcggctgatgggcagcagcgatcttatgaacaactcgagtttcttggagatgcggttcttgactacattgtcgtaacccgaatgttccaatctgaccccccagtgcccaatggacgcttacacatggtcaagactgccatggccaacgctgatttccttgcttttacaaacatgcaacatggactacgccggcctgaagttgaaataaatgagaacggcgaaccagtgcctacagaagtttcactgccgatatggaaattcatgcgtcatagctctccagagatgggtagaatcatgaatgagacccaggcccgatttgagagccttcaagaggaaatcaatgaggctaggacgaatggtaaacactacccctggacacttctcgctcgtcttcacccgaagaagttctactccgatattttcgaggctaccctaggtgccatttgggttgattcaggagatatcgaagtatgcacagcctttcttcacaagttcggcgtcttgccgtatcttgaccgaattctcagcgataatattcatgttcaacatcctaaagaggaactcgccaaactagcaatcgaccagaaaatgacgtatgattatacggctgttgatgggcctataaaggagtacctctgcacggccaaggttggagatcgcgtcgtgggagtcgtgtcaggggcactcaataaggctgaggcaatgaccaaggctgccgaagagggcgtgaattttttgaatggggagcagaaacgtgcagagaaggcggctcaggatgaaatggcgcgatttcttgttgccatggaactcatttag

SEQ ID NO: 335 - DNA, 156 bp, Verticillium nonalfalfae
  source 1..156: mol_type = genomic DNA
tcatgaccacagtcatgagttctcaccgaatgaagacccagggtcactgatcgactggagccatctgctgtcgaccaaagaggttgagtacttgccttgggatgaagatcacagtcccagcttctatcaaagcaagtttgtgattgatccatacac

SEQ ID NO: 336 - DNA, 156 bp, Verticillium nonalfalfae
  source 1..156: mol_type = genomic DNA
agaaggtcaacgatctactgccacaggcgacaaacaagaagccatatgctagggtttatccggcaccgtgggcgaaagtcgacacgattccattagatcatgcttactttggggcgttgatccctttcatttcacacattgtcgaggttcgactgg

SEQ ID NO: 337 - DNA, 2877 bp, Verticillium nonalfalfae
  source 1..2877: mol_type = genomic DNA
atgcccggcatcgctcgcaaggtcgtcatttgcgcggcgatcgacggcctcatcgtacagcctctgtcctccaaagggcagcgccctgcgcagcccgtccgcattggatatggtgacggtgccatttccccagcgccgcgggatcaactccctgatctcaccaagcccaacgcctcgttcgaggcttttggtgttgtgggcctgattaccctttcaaaactgaatttcctcattacaattacccgtcgacaccaggtcgctcaaattctaggatttcctatctacgttgtcaccgaggttgcgattacaccatgcgcctctcgccaggaagccgaggatgccgttcttcggacctccgtgcagctgcagacccgtactgatgatacggacacagaggattcggacagcgatagtaccatcgagttaatggcccacgctgtcgatgaggtcgacgatcagacgcagtcagagggctccatctcagcaggcgttaagagcaccgtcgccgaagacgtcatgagtcgtaaggggggctatggtcgattcgcccagcgctggttcagcagctccggctggatgcagggccagaaacgcaacgctggctggagctacacgacgaccgagttgcctcgagcttcgatggaccagcgcccggacctggagcccccggcggcatcgaaggtgcctctggaagaagaggacgacagagtcaacgaagcaaaggcgtcttctctgcttcccaaattgctccgaactgcgcaaattctttacgggtcatctaggagcttcttcttctcgtacgacgtagacataaccaggcactgggcgactcgagcacaatctccatctggtgagctgccactataccgtcgcgtcgaacctacattcttctggaaccgaaatacttctcagccattcattgattccggaaacgatgcgctagttctcccactcatgcagggattcgtcgggcagagggagtttaccatggataagagcccaccgcagcatgacgaagacgcgaataacgcactggaaatgtcaaacatgtctgctccaacatctccgccagggtcgccccctacagaagcgattcgcggctccctggatctccggggctcggaaaagaagttcctgattacggtgatttctcggcggtccattaagagagccggcctccgatatttgcgccgcggtattgatgaggatggccatgtggccaacgctgttgagacggagcaaattctgtctaactcttcgtgggatcagagctctaaaatttactcgttcctgcaaattcgcggcagtatacccctattcttcacccagagcccgtactcattgaaacctgcaccagtcatacaacactccacagaggcaaactttgaagcctctaagaagcacttcgagcgccttcaccgagaatatggtatgctgcaagtggtcagcttggtggaaaaacacaatgttgaggctacaatcggcaacgaataccagcatactgtcgcgaagctaaacgaaaccgtcttcagcgatcatacttctcaagtcccgttcgaatggtttgatttccacgcagcctgtcgtgggatgaagttcgaaaacgtcagcctccttctggatgccatgaggaccaagcttgatgagcttgggagcactgtcgaaaaggatggagagctgttccttcgccaacgtggagtgcttcggacaaattgcatggactgtctcgaccggacaaatgtttgccagagctcatttgcaaagtatatgctggaatcacagctcaaggctgagggatacgatctgagcatgcaagtagaccagcaatctgcatggttcaacacgctgtgggcggacaacggagactccgtgtcgaagcagtacgcttctacggcagccatgaaaggcgactacacacggtacaagactcggaactacagaggaatgctcaatgatcttggcttctcattgacaagattttataacggcatggttaatgactatttcagtcaagctgccattgacttcctccttggcaacgtcacttccatggtctttcaagagttcgaagctgaaatgatgacgaaagatcccgccatgtcgatgctcaagatgcgtgaatcagctatcgaattatgccagaaacgcgtcatctcagaccaaaaagaggactttgttggcggatgggtcatgctgagccctccaacgtctgacgttgtcaagtcacagacacccttcgaagaagtgattctccttctcacagatgctgccctttatctctgtcgctttgactggaagcttgacaaggtatcgtcgttcgaacgcgtcgacctcgcgcatatcgtgggtatccgcttcggcacttatattacatccacagtttcgcctggtcacaccgacgagagtaaaaacattgggttcgtggtgtcataccagcctggaaagactgacatccaacgcacaaatactcgtacgctttcgagcaactttatcaaacaacctggtcaggtcgaagaagagtcattggccgcggtggcggtcgacgagcctgcggcgctctcggggctgatgggactgctgtccggtcatcgacccaaaccccaaacaccgactcgaaagctcgccttcaaggcgccgtattcgcagtcgtcggccgcggtgacgggtgaggggccacgcttgagcgagacacagcaggttgtgagtatctgtgctgatgtcgagagactggccttcaaagcgcagcctggaaaggacgtgcctggaaccaagagcatcatcgagaggggtgacatcatctcattggaggacgcacaagcaaacacgacgattttagaccagctgagccactctatcaagaggcttgtttgggcgtag

SEQ ID NO: 338 - DNA, 4014 bp, Verticillium dahliae
  source 1..4014: mol_type = genomic DNA
atgtcagatctagcagtcggtcagatcgtccagctgaccgacggccgcaatggcgtcgtacgcttcgccggcaccacccatttcgcctcgggcgaatgggtcggcattgaattggaggatgactctggaaagaacgacggcagcgtccagggcgagcgctactttgactgttccatggggcgaggcatgtttgtgcggccgtcgaccctgaccattctcgcccaggctccagctccagctgcggcgccggccgccagacctaccgtcaggaagacgagcaggcccagcagcttcgtgcccggcacgggcagggtgtcgagcgtcaccgacccgagcatggccaagcggatgagtctgaatgctgctagtcccagcccggccccgcgcacatctcgacctgcgagccttgtacggtctcctacgaagtcgccaacgaagcaaattggttcgaccacctccagcaccgcaccctcccggaccggcacaccttcaaacgccaaaggcaccaccgccacgcgaactcgcccggcagtaggtgttcgcacctccatgggaccccctccgattccctccgcacgagtgagccgacagccatcaacatcgtcagcgacaggtcgccctcccgccaggccgctttccaatcgactctccctgtccggctcgcgcagcgtgcccaagccagaccccctccgacgcccatcgaccgattcgcaagcaggcagggagcccggctcggcagcagacagcggcgacgacggcaggagcagctcgccatctaagggagcggctgatctggcctcaccgcatgccacgagcccggtgcaagctcggaccaacgcgctcgagcggttgacctcgggcaggacggcgaccacgacggcacggtcgccagccacggcgtcgcctcgaacggccggcggcaacacggctgcggcgcgggagaacgaagacctcaaggcgaagctccgtgtcatggagcgcaagaggctggaagaccgggagaagctgaagcagctggagaagctccaaggcgaacgcgacaagtttgagtcgatcatccagaagctgcagacaaagtaccaaccccagcaaacggagaatgcagagctccgcaagcagatcaaggaggccgagacgcggttcgaggccgtggagcagatgcaggccgagcatgagacggccttggagctggccacgctggaccgtgagatggcggaagagacggccgaagtgctcaaggccgagctcgaagcgttgaagcagaaatcagaggagcttgagctcgaggtggaaatcttgcgagaggagaacgaggagtttagccagggcatgacgcccgaagagcggtcaagcacgggctggctgcagatggagaggacgaacgagcggttgagggaagcactgatacgattgcgcgacctgacccaggctcaagaggccgagcttcgagaccagatcaaggccctggagtctgacctgcaagactacagtaccgtgcaggagcagttcgcggcctccaaggaaaagctggcacagtctgaaagcgcggtcgaggatcttcgccaacagctcgacaatgctcttggagcggaggacatgattgaggacctcaccgagcgcaacatgagcatggccgaagagattgaggagctcaaggccgtcatcgaggatctcgaaaacctcaaggagatcaatgatgagctcgagattaatcacgtacaaaacgagaaggagatgcaggaggaactcgacttcaaggacagcgtcattgcggaacaggcccgacgagccggtcagcaagaggaagccctcgaagacatggagtacaccctttcgaggttcagggaactcgtcacgagcctgcagggcgaccttgaggacatgcgcgcatcgcacgctgtcaccgaggccgagtcggagcaattagacagcaagtcccgcgccatgatggacctcaacatgaagctccagatctcggctgccaagacacaggtcaagacgatcgacctggagcttcgccgtctggaggcgcaagaagcggagcagcacctcgaaatcgtcaagctcttcttgcccgagacctaccaggaggaccgcgactccgtgttggcgctccttcgcttcaagcgactggcgttcaaggccactctgctccagggcttcctcaaggaacgcgtcacgggccagccgcaccccggccacgaggacgacatgtttgccggctgcgatgccattgacaagctcacctgggtggcggccatgtgcggccgcttcatcaacgccatcagccactgctcgatcgagcagttccagcactaccagggcgctctgtttgagctggagccggtggagcgggcggtgaacgggtggatcgacggcctcaggagggatgaactcaaggaggccaagtgcgccagcgagctgcagcgctccattgcgctcatgacccatctcgccgaggttcaccttacggacgatctgcagagcttcgccgacgccatgcacatgcgcgctctcgtcgtgcaaagccatctggattcggccgccgcggccattacgaccgccagggccatggtccagagagtcatccccgagtctggcgaggacgacgagatggcacagcacttcagcaagaaggccgagcacgttgtcggccagacccgcagcaccaaggtcattgccagcaaggccgtgcgcgccctcgaggatctcaagaaccgatctctctcgctggctcgggacgacagcacgcaagaggcgtttgagcagtgcgaagaggccgcaaaggacctcgccgcactggcgcggcagattggcctcgacttgcacaagctgctgcacgaggagggcaggaccgagccatacacgcacacggaggtgcagaacacgatggcgcagacggccctgtcggccggttcgtcgaccgactcggatctcttctcgacctacgtgaccaagctccgggtcgtcacgcagcagatcacggaccttgcgggcctcagctctgacctgacgcagacgcaagagtttgagctcaacccggccccctggaagctccgctctcaagaactcaaggctctcaagacgatccccgtggatgccgaagaggagctccgccgcgtcaaggaggagcacaacgaggcgcgccgcacgattgcgcagcgcgacgagagcctcagcacggcgacgctcaagattgagacgctcgagtcccgcatgcgcgacgcgcaccaaaaggcgtcgcgcatcgccgaccttgaggcccagatcgagacggccaagcagcgcgcggcggcgctcaaggaggacattgaaaagggcgaccgcgagctcaaggcgctcgaggcggaccgcgaccagtggaagaagattgcgggcgacagcaaggcgttcgccggcgccaacgacgctggcgccgccaagtcgggccaggaacgggccgtggcgacggcgcgcgagatggacgccctcaaggccgacattgcgcacctgcaggcggcggtgcggtacctgcgcgaggacaaccggcgggcgcggctcacggagcaggccgactacgactggctcgcggcgccgctgcgcaaggcggcgtcgccggccgagcagcggcgcgcgctcgtcgtggccgagggccgcgacgcgctcggcgagctcgtgcggttcgcgacccaggccaaggtgtacgacctccaggacctgccgcaggacaagctcgcgtggcggccggccaagagcacgccgcagtaccacgccgcgcggcaggcggaggacctcgcggcctggaagggctggcgcgactcggtggtgcagaagacggaggtcgtcgccgggcgcaggggcggtggtgctccggacatgaagagggtcgaggcgctgcggcggagcgcggcggctgcgcgactgcagattcggctgccggggcccgacggcaagatggcgcggggcagcggacgggatgtgcagattgtcggatcgagggagtgggagggtctgcaggggcggttggccgtgtaa

SEQ ID NO: 339 - DNA, 1089 bp, Rhizoctonia solani
  source 1..1089: mol_type = genomic DNA
atgcgctccactgctactactttctcccttctctctttggctcctgccctgtttgcatccccagttgagcgttgtacaggtaccatatcatctttagatgatgttgccaatgcaatcaaatgtactactatcaatatcaactcgttcacagtacccgctggaaagactttccaactggatgcccccagtggcgctacagtcaacctattgggagacgttacgtttggcgtctctgcatgggcgggaccactattccaattgaccggaacaagcatcactttcaacggcaatggacataccttcaacggccaaggcgaacaatactgggacggtcttggaagcagtggaacgactaagcctcaccccatgatgaaaatcaaatcgtccggaacgttctcgaacgttgtagttaaaaactccccacagcaatgctttagcttcggcaacagcgcagctctgactgtttccaaggtcacagtcgacaattctgcaggagatgctgcgaacagcaagagtggtggtaaagctgctggtcataacacggacgggtttgatgtctcggtttccaatctcactatcgaagactccaccgtgcacaatcaagatgattgtctcgcaattaataaaggctccaacattattttccagcgtaacacatgcaccggtggacatgggatctcggtgggctctatcgactcggatgtcacagtcagtggcgtacagatccttaataatgtggtcacgaacaacgacaatggtcttcgcatcaagaccaaggctgctgccactggctccactgtatctggcattacctacaccggcaacaccgtcactggttgcaaaaagtacggtgtcatcattgaccagagttacccagatacccttggtactcctgggactggcgtcaaaatttctggcgtgaccttcagtggtaccaacaccgtttccgtcgttagtggagccaaggaggtcgaagtcaactgcggctcaggttcttgcacaggaacttggaattggtcgggtctcaaggtttctggtggatccgcgggggccatcaattactctggtatcaccggtttctcgctttaa

SEQ ID NO: 340 - DNA, 169 bp, Botrytis cinerea
  source 1..169: mol_type = genomic DNA
ttcgttccaggagttacacgcaaagatcacttcactggtggaccagcaaaaagatagtaaacatatcgggaaaatatcgatatatattctccgaattctacgagatatcagagcagaattacctagtaaccctgcactacaaaagtttggactctcacttgtctcatca

SEQ ID NO: 341 - DNA, 179 bp, Botrytis cinerea
  source 1..179: mol_type = genomic DNA
ttcgtgctctcgtcgaaagcaaagacaataaagaagaacaaatggagcgcgagttggagggattgcgaagaggaagtgttagcaatcctactacgcatcgtactagtgccatgagcagcggaactgtgactcaggataggaattctctccaagacaataagagcacagttgtaagctgg

SEQ ID NO: 342 - DNA, 168 bp, Botrytis cinerea
  source 1..168: mol_type = genomic DNA
acgttgttcaaagtgcagtggcaaagcgagcacttgaaatgcagttaaagaatgagggactagatgtcactctacaaattgatcaaactcaacaatggttcaatactttgtgggccgacaatggtgacgccatttctaagcaatacgcttctacagcagcattgaagg

SEQ ID NO: 343 - DNA, 259 bp, Sclerotinia sclerotiorum; identical to SEQ ID NO: 312
  source 1..259: mol_type = genomic DNA

SEQ ID NO: 344 - DNA, 200 bp, Sclerotinia sclerotiorum; identical to SEQ ID NO: 313
  source 1..200: mol_type = genomic DNA

SEQ ID NO: 345 - DNA, 230 bp, Sclerotinia sclerotiorum
  source 1..230: mol_type = genomic DNA
gcattggctgcgctgaagacgaaacctttattgaaagatgaaagtattcgagatttggagggattgagattagatgtatgtgagcggtggtttggtgatgaaattctttactttacaccttatgttcgacacgatgatttggaaggatcattagccgttgagacattaagaggttgggcgaagaaagcatcagaggtactactggaaggattcacaaagactcttcaagg

SEQ ID NO: 346 - DNA, 196 bp, Sclerotinia sclerotiorum
  source 1..196: mol_type = genomic DNA
tcaatgccagagattgacggttactcttcagcagcggaggatttctgtgaattgtgcgaggcatcaggtcatgatgttctacattgccccatgttcggtcctaatggtaatagtggcaactctagagaggagtctcctaaagagcaacgaacaggaaaagacgttgtcatggaaggactcaaactatcacccaaac

SEQ ID NO: 347 - DNA, 194 bp, Sclerotinia sclerotiorum
  source 1..194: mol_type = genomic DNA
gcttacatttccaagcaggaaatcaatggccgcttgactgaaataatcattaacaataccgctgtaaaatctagagatagaaagtcccatgtctgtcaaagcacccttgtaatcacgctttctagtacgagtgaagtctcccttcagggctgctgtagaggcatattgcttagagatagcatcgccattatcag

SEQ ID NO: 348 - DNA, 753 bp, Fusarium oxysporum
  source 1..753: mol_type = genomic DNA
atggagacggatatgcaccgagtcatccgcacccaggacctttctgacgaccactgccagtacttcatctaccagaccctccgcgccctcaaggccatgcactcagccaacgtgctgcaccgagacttgaagccctccaacctcctcctcaacgccaactgtgatctcaaggtttgcgattttggtcttgcgcgatccgctgcttcccaggaggacaactccggtttcatgactgaatacgtcgcgactcgatggtaccgtgcgcccgagatcatgttgactttcaaggagtacaccaaggctattgatgtgtggtcggttggctgcattctcgccgagatgctcagcggcaagcctcttttccctggcaaggactaccaccaccagttgacactcattctggatgtgctgggcacgccgactatggaggattactacggaatcaagtcgcgccgcgctagagaatacattcgatcgctccccttcaagaagaaggttcccttccgaactctattccccaagacctcggatctggccctcgacctgctcgagaagctcctcgcattcaaccctgttaagcgcattaccgtggaggaagctctgaagcacccataccttgagccttaccacgatcccgaggatgagccaacagcgcccccgatccctgaggagttctttgactttgacaagcacaaagacaacctgagcaaggagcagctgaagcagttgatctaccaggagattatgaggtaa

SEQ ID NO: 349 - DNA, 1074 bp, Fusarium oxysporum
  source 1..1074: mol_type = genomic DNA
atggccgagttcgtacgcgcccagatctttggcaccacattcgagatcacctcgagatactccgatctccagcctgttggcatgggagcttttggcctcgtttgctctgcccgggatcaacttaccaaccaaaatgtcgcagtcaagaagatcatgaagcctttcagcacacctgtgctcgcaaagcgcacataccgtgagctcaagctgctcaagcacctcaagcacgaaaacgtcatttctctcagcgacatctttatttctcctttggaagatatctattttgtcacagagctcctcggtaccgatcttcaccgattattgacatcgcgccctcttgagaagcagttcatccagtacttcctctaccaaattatgcgaggtctgaagtacgtgcattcggccggcgttgtccaccgcgatctcaaacccagcaatatcctcgtcaacgaaaactgtgatctcaagatttgcgactttggtcttgcacgaatccaggaccctcagatgactggttatgtctccacacgatactaccgagcccctgaaattatgctcacctggcaaaaatacgacgtcgaggttgatatttggagtgccggttgcatttttgctgagatgcttgagggcaaacctttgttccccggaaaagatcacgtcaaccaattctctatcatcactgagctacttggtacccctcctgatgatgttatcaacaccatcgccagcgagaacacactgcggttcgtgaagtcgctgcccaaacgcgagcgacagcctcttcgtaacaagttcaagaatgccgacgattcggctattgatctgctggagcgcatgcttgtcttcgaccctaagaagcgaataactgccacagaggccctgtcccacgactatctctctccctaccacgaccccacagacgagcccgtggcggaggagaagtttgactggagcttcaacgacgccgatctccccgttgatacatggaaaatcatgatgtactcggaaattctcgattatcataacgtggaagccggagttactaacatggaggagcaattcaacggacaataa

SEQ ID NO: 350 - DNA, 1965 bp, Fusarium oxysporum
  source 1..1965: mol_type = genomic DNA
atgtctgcctccgactcgatcccggcccccccggaggactggaaggatctgtcgacacctgcatctccaggctctgaagattcgtcagaacccagtacgccgctcgaatctcccggtcatgatagccccagtgagcctcctcgaagagtaccatctctgcgctccgtttccgatcctcgcaacatgaatccgaactcaactgctatgggtgttttaggcatggccagacgccctgtacaaacatcctcgagttttgctggaagtagtagtgcctcggtggaaaacagtataatggccaaagcccgagcattacatcaacaacgcatgcagaagggcatgtctcccgctggaatccccggaacaccctcggggtcatcacctacggccagcgtcgctaacggattccctaccaatctgggattgccgcccaatatgcaacgaccgcacgcaccacatgtaaattcagctcctgcgataacgaagccctcgctgagtgagagaagggccatgggcggcggcatgggcatgaagctgtctgatatgggtagacccagccctgtcaccgccactgggaagaaacgggggcctcctggaaagctttctgatatcacaggtgatgcgccaggtagtcaacaatccaacggaacagggggtgggcaggggtcaaaaatggacgatttcaagaaatatattgacacagagaagggttgggtgacctttgatggcgctgccacaatcacacggacaggtgtcaactttgccaatggccaaaccttcagcatatctcttgatgaagttgaagtcttgaccgagctgggtaaaggaaactacggaacagtctacaaggtcaagcatgccaagcgaagagtccctcgcttcggacaaggcctctcgagaaagccccttcctgttcagtattcgcagtcggacccttctcccattggatctgcggaagactccgccgagggcttgccagacacgaccgacggtacaacgggcacagtaatggcgatgaaagaaatgcgcctggagctcgacgacgccaaattcacaaccattctgaaggagctcgtcatcttacacgagtgtgtttctccgtatatcatcgacttttacggcgccttcttccaggaaggtgctgtttacatgtgtattgagtatatggatggcggatctatcgataagctgtataatggtggtatcccggagaatgttcttcgaaaaatcacatactctaccgtgatgggtctcaaatcactgaaggaggagcatagcattattcatcgcgatgtcaaaccaacaaacatcttggtcaatacacgaggccaggtcaagatttgcgattttggtgtcagtggtaatctggtagctagtatagcgcgaaccaacatcggctgtcagagctatatggcccccgagagaatctctggtggtggattcgcacaagccggtaattccgatggctcatacagcgttcagagcgatgtctggagtttgggcctgaccatcatcgagtgtgctaagggcgcttatccttacccaccggaggtctcttctactattttcagccaactgagtgctattgttgaaggtgaaccacctgctatgccagaggacacttactcggacatggccaaggattttgtgaaaagctgtcttcacaagattcctatgaagcggccaacctacgccatgctattgaaacatccgtggctcgtcgaatttacaaagcctcaaacaatcacggaagaagctgaggagggtgatggagttgatacggtcgcggaagctgttggtaaaattgatttgagctcatcaactgcagatactgaagtggcagattgggtcaatggcgttctacaacgagagaaagatggcctgaaggaggacgggcccttgaaaccagcactacacaatgcaccgcttgatagcgtcagtcctatgtcaagcccaaaggatgcatga

SEQ ID NO: 351 - DNA, 108 bp, Medicago truncatula
  source 1..108: mol_type = genomic DNA
gcnttyathcarytnwsnaarccntgyathwsngayaargartgywsnathgtnaaraaytaymgngcnmgntgymgnaarggntaytgygtnmgnmgnmgnathmgn

SEQ ID NO: 352 - DNA, 120 bp, Fagopyrum esculentum
  source 1..120: mol_type = genomic DNA
gcncartgyggngcncarggnggnggngcnacntgyccnggnggnytntgytgywsncartggggntggtgyggnwsnacnccnaartaytgyggngcnggntgycarwsnaaytgyaar

SEQ ID NO: 353 - DNA, 120 bp, Fagopyrum esculentum
  source 1..120: mol_type = genomic DNA
gcncartgyggngcncarggnggnggngcnacntgyccnggnggnytntgytgywsncartggggntggtgyggnwsnacnccnaartaytgyggngcnggntgycarwsnaaytgymgn

SEQ ID NO: 354 - DNA, 558 bp, Capsicum annuum
  source 1..558: mol_type = genomic DNA
atgatgaaygcnaayggnttywsnggngtngaraargartayathmgnaarcaycayytncaycarccnaargaraaycartgywsnwsnttyytngtnaarcayathmgngcnccngtncayytngtntggwsnytngtnmgnmgnttygaycarccncaraartayaarccnttygtnwsnmgntgyathgcncarggngayytngarathggnwsnytnmgngargtngaygtnaarwsnggnytnccngcnacnacnwsnacngarmgnytngarytnytngaygaygargarcayathytnwsnttymgnathathggnggngaycaymgnytnmgnaaytaywsnwsnathathwsnytncayccngargtnathgayggnmgnccnggnacnytngtnathgarwsnttygtngtngaygtnccncarggnaayacnaargaygaracntgytayttygtngargcnytnathaaytgyaayytnaarwsnytngcngaygtnwsngarmgnytngcngtncargaymgnacngarccnathgaycargtn

SEQ ID NO: 355 - DNA, 981 bp, Phaseolus vulgaris
  source 1..981: mol_type = genomic DNA
atgaaraaraaymgnatgatgathatgathtgywsngtnggngtngtntggatgytnytngtnggnggnwsntayggngarcartgyggnmgncargcnggnggngcnytntgyccnggnggnaaytgytgywsncarttyggntggtgyggnwsnacnacngaytaytgyggnaargaytgycarwsncartgyggnggnccnwsnccngcnccnacngayytnwsngcnytnathwsnmgnwsnacnttygaycargtnytnaarcaymgnaaygayggngcntgyccngcnaarggnttytayacntaygaygcnttyathgcngcngcnaargcntayccnwsnttyggnaayacnggngayacngcnacnmgnaarmgngarathgcngcnttyytnggncaracnwsncaygaracnacnggnggntgggcnacngcnccngayggnccntaygcntggggntaytgyttygtnmgngarmgnaayccnwsngcntaytgywsngcnacnccncarttyccntgygcnccnggncarcartaytayggnmgnggnccnathcarathwsntggaaytayaaytayggncartgyggnmgngcnathggngtngayytnytnaayaarccngayytngtngcnacngaywsngtnathwsnttyaarwsngcnytntggttytggatgacngcncarwsnccnaarccnwsnwsncaygaygtnathacnwsnmgntggacnccnwsnwsngcngaygtngcngcnmgnmgnytnccnggntayggnacngtnacnaayathathaayggnggnytngartgyggnmgnggncargaywsnmgngtncargaymgnathggnttyttyaarmgntaytgygayytnytnggngtnggntayggnaayaayytngaytgytaywsncaracnccnttyggnaaywsnytnttyytnwsngayytngtnacnwsncar

SEQ ID NO: 356 - DNA, 1020 bp, Oryza sativa
  source 1..1020: mol_type = genomic DNA
atgwsnacnccnmgngcngcngcnwsnytngcnaaraargcngcnytngtngcnytngcngtnytngcngcngcnytngcnacngcngcnmgngcngarcartgyggngcncargcnggnggngcnmgntgyccnaaytgyytntgytgywsnmgntggggntggtgyggnacnacnwsngayttytgyggngayggntgycarwsncartgywsnggntgyggnccnacnccnacnccnacnccnccnwsnccnwsngayggngtnggnwsnathgtnccnmgngayytnttygarmgnytnytnytncaymgnaaygayggngcntgyccngcnmgnggnttytayacntaygargcnttyytngcngcngcngcngcnttyccngcnttyggnggnacnggnaayacngaracnmgnaarmgngargtngcngcnttyytnggncaracnwsncaygaracnacnggnggntggccnacngcnccngayggnccnttywsntggggntaytgyttyaarcargarcaraayccnccnwsngaytaytgycarccnwsnccngartggccntgygcnccnggnmgnaartaytayggnmgnggnccnathcarytnwsnttyaayttyaaytayggnccngcnggnmgngcnathggngtngayytnytnwsnaayccngayytngtngcnacngaygcnacngtnwsnttyaaracngcnytntggttytggatgacnccncarggnaayaarccnwsnwsncaygaygtnathacnggnmgntgggcnccnwsnccngcngaygcngcngcnggnmgngcnccnggntayggngtnathacnaayathgtnaayggnggnytngartgyggncayggnccngaygaymgngtngcnaaymgnathggnttytaycarmgntaytgyggngcnttyggnathggnacnggnggnaayytngaytgytayaaycarmgnccnttyaaywsnggnwsnwsngtnggnytngcngarcar

SEQ ID NO: 357 - DNA, 759 bp, Solanum chilense
  source 1..759: mol_type = genomic DNA
atgaarttyaayathgtnwsnccngtngcnytnwsntgyytnttyttyytnttyytnacnggnacnytngcncaraaygcnggnwsnathgtnacnmgngarytnttygarcaratgytnwsnttymgnaayaaygaygcntgyccngcnaarggnttytayacntaygaygcnttyathgcngcngcnaaywsnttyccnggnttyggnacnacnggngaygayacngcnmgnaaraargarathgcngcnttyttyggncaracnwsncaygaracnaarggnggnwsngcnggnacnttyacnggnggntaytgyttygtnmgncarathgaycarwsngaymgntaytayggnmgnggnccnathcarytnacncaycarwsnaaytaygarmgngcnggncarggnathggngtnggncargayytngtnaayaayccngayytngtngcnacngayccnathathwsnttymgnacngcnathtggttytggatgacngcncargayaayaarccnwsntgycayaaygtnathathggncartggacnccnwsnccngcngayacngcngcnaaymgngtnccnggntayggngtnathacnaayathathaayggnggnytngartgyaayatgggnccnaayacngcngtngarwsnmgnathggnttytaymgnmgntaytgyggnatgytnaaygtnccnacnggngaraayytngaytgyaayaaycaraaraayttygcncarggn

SEQ ID NO: 358 - DNA, 998 bp, Hordeum vulgare
  source 1..998: mol_type = genomic DNA
ctacgacagtagcgtaagcgtaacaccgagtacgtactctgtgctttgttggctcgcacaatgagatcgctcgcggtggtggtggccgtggtagccacggtggccatggccatcggcacggcgcgcggcagcgtgtcctccatcgtctcgcgcgcacagtttgaccgcatgcttctccaccgcaacgacggcgcctgccaggccaagggcttctacacctacgacgccttcgtcgccgccgcagccgccttcccgggcttcggcaccaccggcagcgccgacgcccagaagcgcgaggtggccgccttcctagcacagacctcccacgagaccaccggcgggtgggcgactgcaccggacggggccttcgcctggggctactgcttcaagcaggaacgtggcgcctcctccgactactgcaccccgagcgcacaatggccgtgcgcccccgggaagcgctactacggccgcgggccaatccagctctcccacaactacaactatggacctgccggccgggccatcggggtcgatctgctggccaacccggacctggtggccacggacgccactgtgggctttaagacggccatctggttctggatgacggcgcagccgcccaagccatcgagccatgctgtgatcgccggccagtggagcccgtcaggggctgaccgggccgcaggccgggtgcccgggtttggtgtgatcaccaacatcatcaacggcgggatcgagtgcggtcacgggcaggacagccgcgtcgccgatcgaatcgggttttacaagcgctactgtgacatcctcggcgttggctacggcaacaacctcgattgctacagccagagacccttcgcctaattaattagtcatgtattaatcttggccctccataaaatacaataagagcatcgtctcctatctacatgctgtaagatgtaactatggtaaccttttatggggaacataacaaaggcatctcgtatagatgctttgct

SEQ ID NO: 359 - DNA, 978 bp, Oryza sativa
  source 1..978: mol_type = genomic DNA
atgmgngcnytngcngtngtngcnatggtngcnacngcnttyytngcngcngcngtncaygcngarcartgyggnwsncargcnggnggngcngtntgyccnaaytgyytntgytgywsncarttyggntggtgyggnwsnacnwsngaytaytgyggngcnggntgycarwsncartgywsngcngcnggntgyggnggnggnggnccnacnccnccnwsnggnwsnggnggnwsnggngtngcnwsnathgtnwsnmgnwsnytnttygaycaratgytnytncaymgnaaygaygcngcntgyccngcnwsnaayttytayacntaygaygcnttygtngcngcngcnwsngcnttyccnggnttygcngcngcnggnggngaygcngayacnaayaarmgngargtngcngcnttyytngcncaracnwsncaygaracnacnggnggntgggcnacngcnccngayggnccntaygcntggggntaytgyttyaargargaraayggnggngcngcnggnccngaytaytgycarcarwsngcncartggccntgygcngcnggnaaraartaytayggnmgnggnccnathcarytnwsntayaayttyaaytayggnccngcnggncargcnathggngcngayytnytnggngayccngayytngtngcnwsngaygcnacngtnwsnttygayacngcnttytggttytggatgacnccncarwsnccnaarccnwsntgycaygcngtngcnacnggncartggacnccnwsngcngaygaycargcngcnggnmgngtnccnggntayggngtnathacnaayathathaayggnggnytngartgyggncayggngargaygaymgngtngcngaymgnathggnttytayaarmgntaytgygayathytnggngtnwsntaygaygcnaayytngaytgytaywsncarmgnccnttyggnwsn

SEQ ID NO: 360 - DNA, 1098 bp, Brassica juncea
  source 1..1098: mol_type = genomic DNA
aaataaaattcatcaaaataacccatccaaaagagtccaaaataacaaatgacaattccacctttattttaacaaaaattatattcaaactagacaaacatgataattgtgatatagtttctcaacaagtttcaaaaacaattatagttttccaccataattgtaaacacacatattttcgccaaaaccataaaatatatattctcgctaaaacaacaagaaaaacatttgtccgtgaattccatctcttctcataaacttcatcttccatcgtatcaagcgaacccatcctattggggggtatgtgattcatgagccttaattagggtggtacagtcagcgactcctgagcttcagagagggtagtccagcagctagtgactctgctagagatagtgtggcccagctagtgagtagtgactcatgaggtagagagagggtggtccatcatatatcgtgttagacaaattctatatagacaatgaggtaaatgtgggatatgaaggtggtggcaaattttagaacaattagtatttaagtatagtaaacataaaaacaaaccagcactgcttatcttcgattctatcaagcgaacccaccttatattgaattaatttatggtagcagtgattcgtgaacgtcagagagggtggtccctctagtgactcatgagctagagagagggtggtccagctatcgtgtagaaatattctatagaccattagataaacgtgccaaatgaacttggtggtgacaaaatagaagtttagaatgtttgggttcccggtaaaaaggtgaaaccacctttttttttttttttttttaccaacgttgaattggcctaatgataaaagggttacgcttgtaactaccgccacccaggtttaattcacggtgggagagactatttataatgcttaggtttctggcaaagaagtgaaaccactttttttctttccagaaaaaatagaagtctagaaaacataaaaacaagtatataaaattcgatgtgatttaacactaactgattttgtacattgcatgttgctatatatacccttacttgcctcttaaaacaaccatacagctcagagaaac

SEQ ID NO: 361 - protein, 36 aa, Medicago truncatula
AFIQLSKPCISDKECSIVKNYRARCRKGYCVRRRIR

SEQ ID NO: 362 - protein, 40 aa, Fagopyrum esculentum
AQCGAQGGGATCPGGLCCSQWGWCGSTPKYCGAGCQSNCK

SEQ ID NO: 363 - protein, 40 aa, Fagopyrum esculentum
AQCGAQGGGATCPGGLCCSQWGWCGSTPKYCGAGCQSNCR

SEQ ID NO: 364 - protein, 186 aa, Capsicum annuum
MMNANGFSGVEKEYIRKHHLHQPKENQCSSFLVKHIRAPVHLVWSLVRRFDQPQKYKPFVSRCIAQGDLEIGSLREVDVKSGLPATTSTERLELLDDEEHILSFRIIGGDHRLRNYSSIISLHPEVIDGRPGTLVIESFVVDVPQGNTKDETCYFVEALINCNLKSLADVSERLAVQDRTEPIDQV

SEQ ID NO: 365 - protein, 327 aa, Phaseolus vulgaris
MKKNRMMIMICSVGVVWMLLVGGSYGEQCGRQAGGALCPGGNCCSQFGWCGSTTDYCGKDCQSQCGGPSPAPTDLSALISRSTFDQVLKHRNDGACPAKGFYTYDAFIAAAKAYPSFGNTGDTATRKREIAAFLGQTSHETTGGWATAPDGPYAWGYCFVRERNPSAYCSATPQFPCAPGQQYYGRGPIQISWNYNYGQCGRAIGVDLLNKPDLVATDSVISFKSALWFWMTAQSPKPSSHDVITSRWTPSSADVAARRLPGYGTVTNIINGGLECGRGQDSRVQDRIGFFKRYCDLLGVGYGNNLDCYSQTPFGNSLFLSDLVTSQ

SEQ ID NO: 366 - protein, 340 aa, Oryza sativa
MSTPRAAASLAKKAALVALAVLAAALATAARAEQCGAQAGGARCPNCLCCSRWGWCGTTSDFCGDGCQSQCSGCGPTPTPTPPSPSDGVGSIVPRDLFERLLLHRNDGACPARGFYTYEAFLAAAAAFPAFGGTGNTETRKREVAAFLGQTSHETTGGWPTAPDGPFSWGYCFKQEQNPPSDYCQPSPEWPCAPGRKYYGRGPIQLSFNFNYGPAGRAIGVDLLSNPDLVATDATVSFKTALWFWMTPQGNKPSSHDVITGRWAPSPADAAAGRAPGYGVITNIVNGGLECGHGPDDRVANRIGFYQRYCGAFGIGTGGNLDCYNQRPFNSGSSVGLAEQ

SEQ ID NO: 367 - protein, 253 aa, Solanum chilense
MKFNIVSPVALSCLFFLFLTGTLAQNAGSIVTRELFEQMLSFRNNDACPAKGFYTYDAFIAAANSFPGFGTTGDDTARKKEIAAFFGQTSHETKGGSAGTFTGGYCFVRQIDQSDRYYGRGPIQLTHQSNYERAGQGIGVGQDLVNNPDLVATDPIISFRTAIWFWMTAQDNKPSCHNVIIGQWTPSPADTAANRVPGYGVITNIINGGLECNMGPNTAVESRIGFYRRYCGMLNVPTGENLDCNNQKNFAQG

SEQ ID NO: 368 - protein, 326 aa, Oryza sativa
MRALAVVAMVATAFLAAAVHAEQCGSQAGGAVCPNCLCCSQFGWCGSTSDYCGAGCQSQCSAAGCGGGGPTPPSGSGGSGVASIVSRSLFDQMLLHRNDAACPASNFYTYDAFVAAASAFPGFAAAGGDADTNKREVAAFLAQTSHETTGGWATAPDGPYAWGYCFKEENGGAAGPDYCQQSAQWPCAAGKKYYGRGPIQLSYNFNYGPAGQAIGADLLGDPDLVASDATVSFDTAFWFWMTPQSPKPSCHAVATGQWTPSADDQAAGRVPGYGVITNIINGGLECGHGEDDRVADRIGFYKRYCDILGVSYDANLDCYSQRPFGS

SEQ ID NO: 369 - protein, 135 aa, Arabidopsis thaliana
MEGKTVIFSVLVMGLVISQIQVEAQKTCCPSQSTRKEFEDCISEGNLQILCSAESGCRDTYVGYCPSGFPYGSLTNSGDVVNVYCKLGCVSSLCGALTSLQKLDTSGKVNVAVERCTKACSTICTKGSKTAVETV

SEQ ID NO: 370 - protein, 61 aa, Vigna mungo
PNPKVFFDMTIGGQPAGKIVFELFADTTPRTAENFRALTTGEKGVSRGRKPLHYHGSIFHR

SEQ ID NO: 371 - protein, 512 aa, Camptotheca acuminata
MENLYYCLALLLSILFIFRHFFRHSSKLPPSPFALPIIGHLHLIRNSLHQVLECLASQYGPILFLKFGTRSILVVSSPSAVEECLIKNDIIFANRPRSMILDLSSFNYSIFSWAPYGHYWRSLRRLAVVELFTSRSLQTSSNIRKEEIHNLLCHLFKFSKSGTQKLQLKYWFSLLTFNIITRLVAGKRCVRDAVAGTDSGKQILEDLEGKFTSKMPFNMCDFFPILRWFGYKGLEKILITLHKERDEFMQGLIDEVRRKRTCSANINSVTNRAKTTLIEALLSLQESEPDFFSDTIIKSIISDMFFAGPETSTITLEWAMSLLLNHPEVLGKLRAEIDDHVGHGRLLDDSDLGKLPYLRCIINETLRLYPPTPLLLPHCSSEDCIVGGYEIPQGTILWVNAWAMHRDPKLWEEPTKFKPERFEGMEGRERYKFMPFGIGRRACPGASMAIRTVSLALGALIQCFEWENVGPDKREMSQGRLTLPKAESLEAVSIPRPSAVKVLSQLEGTCFR

SEQ ID NO: 372 - protein, 105 aa, Nicotiana alata
MARSLCFMAFAILAMMLFVAYEVQARECKTESNTFPGICITKPPCRKACISEKFTDGHCSKILRRCLCTKPCVFDEKMTKTGAEILAEEAKTLAAALLEEEIMDN

SEQ ID NO: 373 - protein, 266 aa, Triticum kiharae
MGVKGGGVLWCLLLAGLLLLAVACAAERDTEKEKEEEIRWCEEDCDWKAGQDTGKARECKEQCERRRHGHELLQEDGDSFDSCVSKCRGHGGWWGKERWERCRQICRQSQEGEGGDEGDNTDDRCERMCQHYHDRREKKQCMKGCRYGESDLLSSDDGHEHGDRCQTQCKRLRPGSYDRQQCIEKCQCQQKEDEEVMNHHGGGGHGHGGSSCEQKCQQRYRHEYDKQQCVRDCKSGGGGGAGGRGREGDERQHGREMVIEAILEEV

SEQ ID NO: 374 - protein, 320 aa, Euonymus europaeus
MKYLWVFIVFSIAVLSHACSAQQCGRQAGNRRCANNLCCSQYGYCGRTNEYCCTSQGCQSQCRRCGVRTVGEIVVGDIGGIISKGMFNNILKHRDDDACEGKGFYTYEAFVAAARSFPAFGSTGDDATRKREIAAFLAQTSHETSAGWPSAPDGPYAWGYCFVRERNPPSKYCDTTTPCPKSYYGRGPIQLTWNYNYEQAGRAIGADLLNNPDLVATDAVISFKTAIWFWMTAQSSKPSCHDVITGSWRPSASDNSVCHVPDYAVVTNIISGEIEYGKSRNPQVEDRIEFFKRYCQILGVSPGKCYEERTFVSGLMMETI

SEQ ID NO: 375 - protein, 305 aa, Euonymus europaeus
MKYLWVFIVFSIAVLSLACSAQQCGRQAGNRRCPNNLCCSQFGYCGRTNEYCCTGFGCQSNCRRCGVRTVGEDVVGDIGGIISKGMFNNILKHRDDDACEGKGFYTYEAFVAAARSFPAFGSTGDDTTRKREIAAFLAQTSHETSGGRPSAPDGPYAWGYCFVKERNPPSKYCDTITPCPKSYYGRGPLQLTWNYNYAQAGRAIGVDLLNNPDLVATDAVTSFKTAIWFWMTAHSSKPSCHDVITGSWRPSASDNSVRHVPDYAVVTNIINGEIEYGKSRNPQVEDRIEFFKRYCQILGVSPGKF

SEQ ID NO: 376 - protein, 38 aa, Taraxacum officinale
VAKCTEESGGKYFVFCCYKPTRICYMNEQKCESTCIGK

SEQ ID NO: 377 - protein, 44 aa, Taraxacum officinale
GGKCTVDWGGQGGGRRLPSPLFCCYKPTRICYLNQETCETETCP

SEQ ID NO: 378 - protein, 42 aa, Taraxacum officinale
ANKCIIDCMKVKTTCGDECKGAGFKTGGCALPPDIMKCCHNC

SEQ ID NO: 379 - protein, 49 aa, Triticum kiharae
RTCQSQSHKFKGACFSDTNCDSVCRTENFPRGQCNQHHVERKCYCERDC

SEQ ID NO: 380 - protein, 47 aa, Echinochloa crus-galli
RECQSQSHRYKGACVHDTNCASVCQTEGFSGGKCVGFRGRCFCTKHC

SEQ ID NO: 381 - protein, 47 aa, Echinochloa crus-galli
RECQSQSHRYKGACVHDTNCASVCQTEGFSGGKCVGFRGRCFCTKAC

SEQ ID NO: 382 - protein, 30 aa, Amaranthus caudatus
AGECVQGRCPSGMCCSQFGYCGRGPKYCGR

SEQ ID NO: 383 - DNA, 3666 bp, Oryza sativa
  source 1..3666: mol_type = genomic DNA
atggaggccacggcagtgagcattggcaggtccgtgctgaagggagcgcttggctttgccaattccaccttggtggaggaggtttccctgcagctcggcgtccagcgcgaccaggcgttcatcagggacgagctggagatgatgaactccttcctgatggccgccaatgatgagaaagatgacaacaaggtggtaaggaccttggtgaagcaggtccgcgacgtggcctacgacgtcgaggactgcctccaggacttcgccgtccgcttggggaggaagagttcatcctggtggctcagccctcacacgctgtgggagcggcgccgcatcgccaagcagatggaggagctgaggggcaaggttgaggatgtgagccagaggaacatgcgttaccaactcatcaagggctccaagcctaccgtagctaccaatgtcgcacccagcagcactgcccgtgcgaccatgtctggcgcgcatgaagaacgatggcagcatgagaaggcaatagatcatctggttcggctggtcaaaaccaaagtcgatgaacgtagagtgatcgcggtgtggggaacaagtggtgatatcagggaaatgtccatcgttggaggggcctatgatcatctcaagagaagcaacaagtttgagtgctgtgcctgggtaaatttgatgcatccactgaacccaacaaagctcctgcaaaccattgttaggcaattctatgtaagatctcttcaggaggctggcaaagcaactccgtcgtgtcaaattctgagtagcatgttgataaaggaagatcagggtttggggtttagggttctgaggagcatgctgatgaaggaagatcatttgaatgatgagttcaataaatatttgagtgacaagtgctacctcattgtgcttaatgacctatcgtccgctgaagagtggaagcaaattaaaatgctcttcccagacaacaagaaaggaagccgaatcatagtgttcacacaacaagttgaagttgcaagcttttgcgctaggacagaggaggtggcacccgagcacatgcagttgtttgctgatcagactctttatgcttttcactgcaagggtgctaaagatggagtagattcaatggaggactcatctaacttaaacgaagacactacatacaacgctgtagaaggaaagagccttactcgcacatattcaatggtaactgctttcaaggaatctgagatcgttgggcgagttgatgaaataaaggagattattgaactgatttcaaaaggtagcaaccaacttgagaagatctcagtgtggggaatgggtggtattgggaaaaccactctaattcaaaatgtctaccgaagcgaaaaggttaagaagatgtttgataagcatgcatgtgtcacgatcatgcgcccgttcaatcttaatgatcttcttatgatcttagttaggcaactagaagattcaaaaacttctggaggaaaggagttggttagcattttacaaggaaagaaatacttgattgttcttgatgatgtattattcacaacagaatgggatgctatagaatcatatttcccagcaacggaaacaggaagccggatcataataaccacaaggcatgaaagtattgctaagcattgttcaggggatcaacaaggaaaaatgtatcaactcaatcgtctaggagacaacgatgcaaagaacctctttgcaaagaaggtatttaaggagtcagtaaatttggatcaacaagatcttgaattgatcaaagaagcgaaaccgattctaaagaagtgcaatggacttcccctcgcaattgtcaccataggtggtttcttggcaagcagccccaaaactgctttggagtggagaaaattgaatgagcatattagtgcagagttggagacaaacccagggcttgaggccatcagagctgtccttaatataagctacgatggattaccttatcacctcaagtcttgcttcttgtatctgtccatctttcctgaagatgacaagattagccgggaacgtttggtgcgccgatggtgtgcagagggttactcaagggagctatgggacaaatctgcagaggaaatagcaaacaactacttctttgaactcatagacagaagcatgatcctaccaactcaaaaattaacttacaacaatagacctgattcttgccaggtccacgatatcatgcgcgagatagccatctcgaagtcaaaggaggaaaatcttgttcttagactcgaagggggtcataggctacacaatcatggcatagttcgacatctttccattacaaacagcggcgaggatcgggagacagattttgctgaattggagacaacagtagacatgtcccgaataagatcattaacagtgtttggggagtggaagccatttttcatttctgacaagatgaggttgttgcgtgtgctcgacttggaagacacagaaggtgtacgtaatcaccatattaagcaaattgggaagctccttcaccttagatacctttctctaaaacgatgtagggagattgcttacctgcctgattccttaggtaacctaaggcaactggagatactagatatcagaggtacgctcatagtcaggctgccaaagaccatcatcaatcttcgcaagctaaagtatctccgtgctgttccaaacatagacgacatagcagagattctaattctaccagagctcatgaggaacaggctatgcatttctactgtttcgttgctggggctttgtctgctatgctcagcaagtgcgattggtaagtttgatgaagagactagtacccgtgacctctgcaccatgtggtgctgcagtattctccctagcattgctatgcgcctccaagggaatggtgtagtagcaccaagagggctgaggatcaggagactgacagccctgcacacgctaggtgtggtggacatttcatggcagccatcaattttacaagatatcaagaggctcatccagctgcgcaaattggaagtgaccggtgtcaacaagaaaaatagcaaaaagcttttctctgcccttgccgctctcagccaactagaatcattgtcactgttctcgaagtggaagccaggtctctggggctgtctggatgctgaagaaaagttttcgccacctaagaatctcaagactctgaagcttcaaggcaacctggttgagctgccaaaatggatcgggaagctcaacaatcttgttaagctgaagctatcaaaatccaggctcaaggatcatgatgctgctatacaagtccttggtatgctaccaaacctgaccatcctatgcctgccgcgcaagtcatttcactcgcttgagggtggtgaactcaatttctcggagggatctttcaaaagcctggtggttctcgagctccacttcggtgggagcaaacgcgtcaagtttcaacaaggagcattccacaatcttgagctactggagctttcaggttacattgataaagtcgaaactaagttctctgggctagaatttctcccaggaatcaaggaagtctggctccagggtgaattttattccagaaacgagcaagccgcacgaagattgaaagaggacttgctggcacagctttctgagaatccaaagaaaccaatcctgaagactagcgggtatttttag

SEQ ID NO: 384 - DNA, 9576 bp, Oryza sativa
  source 1..9576: mol_type = genomic DNA
ggaaatactagaatgacttacattgtaaaacagagaaagtatgattatctaaactctcagatagtctattgtaatcattgtatgcatgacatcagcttgtgtcaaagctgcagctttgttggatcaaccagaatttactagttctaaaaaaaacagaatttacttagatcctgctgaaagacttcgggccaattagaagcccagtatttggcccaaaactggtgtaaactacaggcccataatagaaataagttcactggaggtcccccaacttaacaccgagatttttttgaggtcccttaaccataaaccagaaatgcgtacccctaaactatgtaaaaccgtcaaaaaaaaaaaggtcccgaggcagtatagttgctcggtttcgctgacgtggcatcctagtcagcaaaaaaaattaaaataaatatgtggggcccacatgtaagtgagagaaaatggtgtgggccccacatttctcctttcttttctttttctcttctcttctctcccgattttctcgagtgggcgcggcggcagaggggagagaggtgaccggcggtggagcgggggtggtgggagaggggggctggcgcgacgtcggcggcgggagaaaaggagaggaggcggctggcgcgacggcgagctcggacggcaacggcgggaggaggaggaggagaggaggcagtcggcgctgtaaaacgcgcatgggatgcggcggatgatgtcgagcgggacggtgtcctcatcaccatcttcctcatcgtcatcgcagtctgcgggtgccgggcggagcggtttgggagggagggggaggcggccagcgagcccgttcgagctcgcccggcctgcgcgcgagctcgcccctcccatagcttggtgtgctggggacgacgacgaggaaagggggagaaaggaattgacggccgatgatagcaatggcgggcgagcgcggcgccgggctgctcatgctcgccgaccaggcccccggcttcgccgcactcgtccgccgtgctcgcccacgcactcgccgacctccgctccacccgccgctcctgcccgctgcccgctgcccgccggcctccctgactgaagaagagaagagagaaattaaagagaagagaaggagaagaaaagagaagagaagaaaaaaagatgtgtagctgacatgtgggccccatgtacttttttattttttttgctgactagaatgccacgtcagcgaaaccacccatatatactgtcataggaccttgagtgcatagtttgtgtgagtttagggatacacatttctcgttttgtagttaagggacctcgtaaaaatctcgctgttaagttgagagacccctccggtgaacttattcccccaaatattttctccatgctctgggctcaaacgcactcttggatgggccgtgtaatctacaccatttctggcccaatccaacgaaggtagctccagactcctaactccgccgccgcatgcccaatcctcgccggccgccgctgccatctcccttcccccaccgccaccgtcgccttctccgttcccccaacaaaggctcagtagcagcagccgcggcgcggagagcagaggccttggagggcctgcagaggagcgcccgcgtcgacgaagacgacatcagcaggcagtggacatggcgactgcgaatgctatcgccgacgtgggagcttcaggcgaggatgcgtggccttcatcagctgctgctcccttacctgctctggtttgtcattgtgttggttcgtggtttggggatatcaggatggggaaggggaatgggtttcgtgccatgttgttctattgtgcaatttgatgttctcttgtcgaatttcatggtgattcaatctgcatctgtgttattggttgtcaagcaaacattttatttctttcgagatgggtgtttcatctgaaattggtgtgtctgatgatgtgaccttgtgcaaatcattgtttcattttcttctattccacagagatttttttgtttagagtttattctaccatcttcttaccttttgaatgctatgcaccacagatttctgatttttacacattcaatcacagtgccgacccttggcgaatttaaaattttctcaccgtcaaaatttaatcaaacatctgatctaacagtagtagcgccagcacggctggtatttaaggcagaaagaaaggttgcgagggcgaggagttggtgatgatctgccggtcgtgtcgtgactttaggctataaaagatagctgtttggattaacccaaccaatgaagcgaatcatcgatggccgatagcgagattatatccaactaatgaagagaatcaactttaatcttttgtgagctacaagtttcgtggtgaaggcatatactaataccaccatcatggctgcagcgaatcaacgagatgcatttgtcttgcacatttcccaccggatactttgccatccatggctttatctcctccatgattgtatccccttcttcctcaacaaggaacgatcgatcattgtttgcttctttctctgacgacactttggtgcaagtgaaaggctctttcctggaactcgtcccgtgagctccttcctggctacatcctccttaattccttgccgatttccggcttcgtcttcactatcgtcagttcatttctcccgctctgcctgagagtccagtttcttggagatagtcgccggcttgctctctctctctctctcccttctcatcgccagctccagctcacaatccgagcttacgtggtggaatcgctatcgccacctctcggaagattattgtactttgccttgcctacttcttgagtccgatcaaacacatccatcatgcatctgtttgtacttgcattcagccaaacacttccagtttaactccgtccgcaagtcaatacttgcattcaatttccatttcctacaaaagcagctgctcagactcttgccttctccacccagcaatcgtgtttccttccctgtatcctgcgcgtgtgttcttagctgctctaggggatccttccaatggcggagctaatggccaccatggtggtcgggccactgctgtccatggtgaaggacaaggcctccagctacctcctggagcagtacaaggtgatggagggcatggaggagcagcacgagatcctcaaacgcaagctgccagccatcctcgacgtcatcgccgacgccgaggagcaggcggctaaacacagggaaggggtgaaagcatggctcgaggcgctccggaaggtggcctaccaggccaatgacgtcttcgacgagttcaagtacgaggcactccgccgcaaggccaaggggcactacaagatgctcagcagcatggttgtaatcaagctcattcctactcacaaccgtattctgttcagttataggatgggcaacaagctcaggatgattctgaatgccattgaagttctaattgaagagatgaatgcctttaggtttaaattccgaccagagccaccaatgtcgtccatgaaatggaggaagacagattctaaaatctccgacctttctttggacattgccaacaactcaagaaaggaagataaacaggagattgtcagcagattgcttgttccagccagcgaaggggatctcactgttcttcccattgtaggaatgggggggatgggcaagaccaccttagcgcagctcatttacaatgaccctgacattcagaagcatttccagttgctgctctgggtgtgtgtttccgacaacttcgatgtggatttgctggctaaaagcatagttgaagcagctcgcaaacagaagaatgataacagtggaagtactaacaagtcaccattggatgaacttaaagaagttgtgagtgggcagaggtacctcctcgttttggatgatgtctggaaccgtgatgctcgtaagtgggaagcgctcaagtcctaccttcagcacggtggcagcggtagctcagttttgacaacaactcgtgatcaagaagtggctcaagtgatggctccagctcaaaaaccttatgatctcaagagactgaaggaaagcttcatagaggaaattatcaggacaagtgctttcagttcacaacaagaaaggcctcctgagcttctcaaaatggttggtgatattgccaagaaatgttctggttcccctttagctgcaacagcattgggctctacactgcgtacgaagaccaccaagaaagaatgggaggctatattaagcagaagcacaatttgcgatgaggaaaatggaattttaccaatactcaagctcagttacaattgcttgccatcatatatgcggcaatgcttttccttttgtgcaattttccccaaggatcatgagattgacgtggaaatgctgatccagttatggatggccaatggttttatcccagagcaacaaggagagtgccctgaaatcattggtaaaagaattttcagtgagttggtgtcaaggtcattttttcaggatgcgaaagggatcccgtttgagttccatgatataaagaactctaagattacttgtaagatccatgaccttatgcatgatgttgcacaatcctccatgggaaaagaatgcgctgctatagatacagaagttagtaaaagtgaggattttccttattctgctcgccatctatttttgtcaggtgatagaccagaagctattcggactccttccccagagaaaggatatccaggtatccaaacattaatatgttcacgtttcaaatatttgcagaatgtatcaaaatacaggtcattgcgagtattaacaacgatgtgggaaggttcattcctgataccaaaatatcatcatcacctgaggtatcttgatctctcagaaagtgaaattaaagcacttcctgaagacataagcatcctatatcatttgcaaacattgaacctttcccgttgtttatctctccgtcgacttccaaagggaatgaagtacatgaccgccctccgtcacttgtacactcacggatgttggagtttaggaagcatgcctcctgacctcggacacctcacttgcctacagacgcttacatgctttgtagccggtacttgctctggctgcagtgatttgggagagctgcggcagttggaccttggtggtcgactagagctaagaaaactggaaaatgtgacaaaagctgatgcaaaagcagcaaatctcggaaagaaggaaaaactgaccaaattgaccttaatatggactgatcaggagtacaaggaggcacagagtaataatcataaagaggtgctggaaggtctcacgcctcacgaggggctcaaggttctgagtatatatcactgtgggagcagtacatgtccaacttggatgaataaactgcgggacatggtggggcttgagttaaatggttgcaaaaatctcgagaagcttcctccgttgtggcagctaccggctctacaagttctttgcctggaaggactgggtagtttaaattgcttgttcaactgtgacacacacacacccttcacattttgcagactgaaggagctaaccttgtctgatatgacaaattttgagacatggtgggacacaaatgaggtacaaggagaagagctgatgtttcctgaggttgaaaagctgtcaatcgaaagttgccataggctaactgccttgccaaaagcatcaaatgcgatttcagaatcgtccggcgaagttagcaccgtgtgtcgttctgcatttccagcattgaaggaaatgaaattatatgatttgcgtatctttcagaaatgggaggcagtcgatggaactccaagggaggaggcaacatttcctcagcttgacaaattagaaatcagacagtgcccagagctgactactctacctgaagcaccaaagctaagtgacttagagatatctaaaggcaatcaacaaatatccctacaggcagccagcagacatattacttcattgtccagtctcgttctgcatttgtccactgatgacacagaaacagcatcggtggccaagcaacaagattcgagtgatttggtgattgaggatgagaaatggagtcataaatctcccctggaacttatggtcttgagtcggtgcaaccttttattctctcacccaagtgcactggctctgtggacatgttttgctcagctcctagatctgaaaattcggtatgttgatgcgcttgtcagctggccagaagaggtgttccagggcttagtttccttgaggaagttagagatttctgtatgcgagaatctgacaggacacacacaagctcgtgggcaatctacacccgcaccaagtgaactcctgccacgtttggagtccctagagataacgtgttgtgattctattgtggaggtccccaatctaccggcgtctctcaagctattagaaattagggggtgccccggcctggagtccatcgtattcaatcagcagcaggataggacgatgttggtgagtgcagaaagctttgcagagcaggataagtcatcgttaatatcagggtccacaagcgagaccaacgatcacgtccttccacgcctagaatctcttgtaataaattggtgcgatcgtttggaggttctccatcttcctccgtccatcaagaaattgggtatttatagctgtgaaaaacttcggtccctctcagtaaagctggatgccgttcgagaattaagtatcagacattgcgggagcttgaaatcactggaatcttgcttaggagagctcgcgtcgctgcaacaactcaaactttttgattgcaagagcctggaatccttgccgaaggggcctcaagcatactcatctcttacatctcttgaaattcgtggttgttctggtataaaggtgcttccaccgagcctacagcaacgtctggatgacatcgaggacaaagaactagatgcctgctatgaaggtaatcttcagtttcttaaccgtgtaccatttagtggtaaaagtttcgagtttcgtgtctagaacccctagtcaaccattaatatgattatatgtacatagagtacaatgcgcattcataactcacttctgcagctgtgtcatctaaaccctttaaactttgagttgcatttgggtatctaatcgcatgcaaaggaatttagttatatctcccgtagccattccttatatgtgatgatctcttcctgtgattatgcttgctagtttggactatgtaattaattttgccgggtgactatgtaattacatgacttcatttagtcgccaggtgtggcatcatgcaattattatggcaaagctgtattagtcatgatcgaagccacttggtgaacttattccctgctactttgaaccaatactcattgattatttccctttaagcgtttgatatggacgacagtttaaatttgcagagctaactaacgcagcgcttgtctttacatttctctggaaactcacagctccattgcatatgtagtttgagtatacatagtttctttgaactgtcttatgcctttgaaaagcttgactatggaattctagtctatatattcaatacatatatttttttttcttttgtttgccagaggcagaagcagaaccaaagtctcgtcatcgtcaatctgcaatcagtaggctgatgtgcttgaagtagcagtttcaggaccagatgagagttgtcatcatggtttgtaacgcgtgcttgatgattgatttcgaatgaaattctagccactatccttatgcttactctctctatggtgtgacttccttgtaggatcgttaccgaatctgcaattgttgggttattaattgtgtggttgtatctcatggtagaatgtattacctacctaccctttctcaagataaactccagtaaagtcgatcgtctggttggtgtgagctgctacaagaaggatgaagccgatgatcccaaggccttgactttaagctagtcccaggttgtaagctgaagaacaacatactggagcttaaactgcttcactctttttttatccttttccttttcttgtgaactgtgatgtgtttgatctcgttcatgctccatcataagagaatcacagctagcacttccatttcaatgatgtttttcctaacatgacatgactgcagaggatacttgtgattgatcaacaacattttgcagcaacgttctctcccgataacgctgcaatggaattgatcaattggtgttcctacttattggaatgaatttcccattgtggaataaaatggaaagattggtacaatctgctgaaaaatgaactgtcgttactcaagttgaaacatgtgtcatgtgtgtaactatcagaattgttctcgacaaaatcgttgggacttgcaaggtaaaaaaaaaaaattcctcagctctgtaaatgctattgctgaactaaagttcagaaagctatagtgccgaaagatctcagatggcctactgcaacaaaattcagtacaaatgcaaaacaatgtaacattacgtggcccagcccatcatggtaagcccatactgtatgcgctgcaaactaatattagttcaggcaattactctgaaatttctgatagacgaacctgattttttcatgtcaggtgccgtgcttgttcagattcagcaacttacatttccaaagaagaaaaaggaaattcataccttctctttatttggtttttaaaagtggcctggattttcattatttggttaaaatttggcctttgtcgtaaggatttggatcctctatccaaacacatgccttccaagataaacgaatccctcattatacaaaaaaaaaagcacaagatgctcaacaagaagcttcaaattcgtgtaaatacatgtcatgtctcgctaccaaacaatatctcaacaatgacaacagattggaggtattcatctcacaatgatacatttcaacacaaatttatgtaggcctcgctgacaggacttggctggatggctgtcagttcagttcttgaaccaactgaagcatgagcagccctgcaaggaagcgataaactgaattaaaataggaatttgttacacaatacctgtaaagtggattacattaaaatattaccaaatcatactgtaagcaatcatacagtacaagattccttgcaaacaaccctaaccaaacttctagtaaaaccattattttttctgtagtaccaactttttgcaaccactatatactccagtaaaaaccagaagtattgttgcaatgactttgccgataaattatagaacgcggctactcgaagcagtagatttaagacaatttttactgcataataactacgcatggtgtcaagatccctaaaaattaacagaggcagacccagctcaagtattgacaaactcaagtggcaactggcatatgaacaattttctcgttcaaatatatctgaagcaatgtgtaaaacaaattagttttgctccacacatctgacaataatttttttcagtaagcagacttactgtggattcatatttgcgttgttgatagcgtttgatataatctgcctcgctagtcatgacgggagcgttgccggtacc

SEQ ID NO: 385 - DNA, 3720 bp, Arabidopsis thaliana
  source 1..3720: mol_type = genomic DNA
atggattcttcatgtttcttggtttatagaatattcagatttcgtaaaagaaataagaatatttcttcttctctatcttcttcatctcccccttcttctttgtctcaaaattggttgcaccctgttttcttgagcttccgtggggaagatgtccgcaaaggcttgctcagtcacattcagaaggagtttcaaagaaacggaatcacaccgttcattgataatgagatgaagagaggaggatccattggtcctgagctcttacaggctattagaggatctaagatcgcgatcatcttgctttcgaggaactatggttcttcgaagtggtgtcttgatgaattggtggagattatgaaatgcagagaagagttgggtcaaacagtgatgaccgttttttatgatgtggatccatctgatgtgaggaagcagaagggagattttgggaaggtttttaaaaaaacttgtgttggaagaccagaggagatggtacagagatggaagcaagctttgaccagcgctgcaaatatactcggggaggattctcgcaactgggaaaacgaagcggatatgatcattaaaatctcaaaagatgtctccgatgtgttgagttttacgccatcaaaggattttgatgagtttgttggcattgaagctcatacgacggagataacttcgttgttacaacttgatctggaagaagtgagaatgatagggatttggggtcctgctggtattggcaagacgaccatctccagagttctatataacaaactctttcatcagttccaactgggcgcaatcattgacaacatcaaagtacgttatccaagaccttgtcacgatgagtacagtgcaaagctgcagttacagaaagaattgttgtctcagatgattaaccagaaagatatggtggttcctcatttaggtgttgcccaagagaggttgaaggacaagaaagttcttctagttcttgatgacgtcgatgggttagtacaacttgatgccatggcgaaagatgtacaatggtttggccttggaagtcgcattattgtcgtaactcaagatctaaaacttttaaaagctcatgggatcaagtatatttacaaagttgattttccaacttctgatgaggctcttgaaatcttctgcatgtatgcttttggtgagaagtcccctaaagttggttttgagcagattgctcggacggttacaacacttgctggtaaactcccgttaggactaagggttatgggatcatatttacggcgaatgtcgaagcaggagtgggcgaaatcaataccaaggctaaggaccagccttgacgatgatattgagagcgttttgaagttcagttacaactccttagctgaacaagagaaagatttatttcttcacataacctgttttttcagaagggaaaggattgagacattggaagtatttcttgcaaagaagtctgtagatatgaggcaagggctccaaatcttggcagataaatctctcttatctttgaacttgggaaatatagagatgcataatttgctagtacaactaggcctagacattgttcgtaagcaatctattcataagcctgggaaacgtcagttcttggttgatactgaagatatttgtgaagtactcactgatgatacgggtaccagaactcttataggcatagatcttgagttatctggtgtaatcgagggcgtaataaatattagtgaaagagcctttgaaagaatgtgcaatctccagttcttaagattccaccatccatatggtgatcgttgtcacgacatattgtacttaccgcaaggtttgagccatatatctcgaaaacttagactacttcattgggaacgttatccactgacatgtttgcctcccaagtttaatccggagttccttgtcaaaataaacatgcgagacagcatgctcgagaagctgtgggacggaaatgaacccattagaaacctcaaatggatggatttgagtttttgtgtaaacctgaaggagcttcctgatttctctactgccactaatctccaagaattgagactcataaattgtttaagcttggtggagcttccctcttccattgggaatgccactaatttactggaattggatcttattgattgctcaagtctggtgaaactcccctcctctattgggaatctcacaaatctaaaaaagttgtttctcaatagatgttcgagtttggtgaaactcccttcctcttttgggaatgtcactagtctcaaggagttaaatctcagtggttgttcaagtcttctggagatcccctcttccatcgggaatattgttaacctcaagaaagtatatgctgatggatgttcaagtctggtgcaactcccttcctctattggaaataacactaatctcaaggaattgcatctactgaattgctcgagtttgatggaatgcccttcttctatgttaaatttaactcgtctcgaagatttgaatctcagtggatgcttaagtctggtgaagctcccctctattgggaatgttattaatctccaatcattgtatctcagtgattgctcaagtctaatggaactccccttcactattgagaatgccactaatctcgatacattgtatcttgatggatgctcgaatctactggagcttccctcatctatttggaatatcactaatctccaatcattgtatctaaacggatgctcaagtctaaaggagctcccttccttggttgagaatgccattaatcttcaaagtttgtctcttatgaaatgttcaagtttggtagagctcccttcctccatctggagaatcagtaatctctcatacttagatgtcagtaactgctctagtttgctagagctcaatcttgtctcgcaccccgtggttccagattccctaatcctagatgcaggagattgtgagtctctggtgcagagactagattgcttctttcaaaatccaaagattgttctcaacttcgctaactgcttcaaactgaatcaagaagcaagagatctcatcatccagacatcggcttgtagaaatgcgatattaccaggtgaaaaagtgcctgcatacttcacgtaccgcgctactggtgattctttaacagtgaagttgaaccagaagtatcttcttcaatctttgagatttaaagcttgccttttgctagttgagggtcaaaacaaatggccaaattgggggatgaatctagtaacttctcgagaaccagatggacacattgttctgtacacaccaagcagccatcttcaaggtccacttttaatggagaatctgtatacattcgaatttgaactagtggtgacttccagtgagttcgttttggagttcagagctgatcgttacaagtgtgcggtaagcgaatgcggcctaatccaactcttttaaatccctttatgtccatgagcttcagaggtcagtggaggctgttattttgcagtctttgagatttgagacaaacactagactgaagttagggcatgacaagagctgaaatacattaatgctatatgatgaaacattttcttttaaagttgggtcgatttgacaagtttggtgtgcatgttgtgtggtgtcacttagtatgattatcattactatatatgtgatgttggtaatatgtataatttatcaattaagtcacagtatacatctatgtgtttatatgtagatattacagcgaag

SEQ ID NO: 386 - DNA, 2845 bp, Arabidopsis thaliana
  source 1..2845: mol_type = genomic DNA
caaagacttttgaatgtctcccaccaaattctgatgaatgaatatgtggatgtggtatttcatggaccagcacaaaagagcatttcaagaagtcgtttggtagctgtaccatctaattatgttcacatgatgctgagagttgaataattcagaaagggacaaagagtgttatgattgcgttgacttggagtcatgtttcatgaaggtagtgcgtagttgactcttttctagtgtaggaggtagagatttgggagagtcactagaacacgaaatggcagaggctattgtttctgttacagtgcagaagctaggacagttgctcttggaagaaccgttgttcttatttggtataggtgaccaagtgaagcagctgcaagacgaattgaagcgtttgaattgctttttgaaagatgcagatgagaagcagcatgaaagcgagagagtgcgtaactgggttgcaggcattagagaagcttcttatgatgcagaggatatcctcgaggcatttttcctcaaagcagaatcaaggaaacaaaaagggatgaaaagggtgcttaggaggcttgcttgcatcttgaacgaagcggtttcacttcatagtgttggctcagagattagagagatcacctccaggctttctaagatagcagcaagcatgctagattttggtataaaagaatctatgggcagagaaggtttgagtttgtctgatagtctaagagaacagaggcaatcgtttccatatgttgttgagcataatcttgttgggttagagcagagtctagagaagttggtgaatgatttagtttccggaggtgagaaactaagagtcacgtccatctgcggaatgggtggtttggggaaaacaactttagccaaacagattttccatcaccataaagtgaggcgtcatttcgatagatttgcttgggtatatgtttctcaagactgtagacggagacatgtttggcaagacatttttctgaatctcagctacaaggatgaaaatcagagaatactcagcttgagggatgaacaacttggagaggagttgcatcggttcttgaaaaggaataaatgcctcattgtgcttgatgatatctggggcaaagatgcttgggattgtctgaaacacgtctttccacatgaaacaggaagcgaaataatcctcactactcggaacaaggaagtcgctttatatgctgatcccaggggtgtgcttcatgagccacaattgctaacatgtgaagagagttgggagctgttggagaaaatttcattatctggaagagaaaatatagagccaatgttggtcaagaaaatggaggagattgggaagcagatagttgtaaggtgtggaggtttacctctagctataacagttcttggaggacttctggcaacgaaaagtacatggaacgagtggcaaagagtatgcgagaacatcaaatcatatgtttcaaatggaggtagtagcaatggaagtaagaacatgctagttgcagatgttttgtgcttgagttacgagtacttgcctccccatgtaaagcaatgtttcctctactttgctcattatcctgaagactatgaggttcatgtgggaacactagttagttattgcatcgcagagggaatggttatgcctgtaaaacacacagaggctggcacgacagtggaagatgtcgggcaagattatcttgaggaattagtaaagagaagcatggttatggttgggaggagggacattgtaacttcggaagtcatgacatgccgtatgcatgacctcatgagggaggtgtgtttacagaaggcaaagcaagaaagctttgtgcaagttattgattcaagggatcaagatgaagctgaggcttttatatctctttcgaccaatacatctcgtagaatttctgtccaactacatggtggagcagaggagcaccatatcaagagtctgtcgcaggtttccttcagaaagatgaaacttcttcgagttctagatcttgagggagctcaaatcgagggagggaagttgccagacgatgtaggagatctcatccatttgaggaacctgagcgtgagattgacaaacgtgaaggaacttacatcatctattggaaacttaaagttgatgattactctagacttgttcgtgaaagggcaactgtatattccaaaccaactctgggattttcctgttggaaagtgcaatccaagggatcttttagcaatgacaagtcttagaagattgtctatcaatctttcttcgcagaacacagacttcgtggtggtgtcttcactaagtaaagtcttgaaacgtctccgtggcttgacaataaacgttccatgcgaacctatgcttccaccagtagatgtaacacagttggtctctgcatttactaatctctgtgaactggaactgttccttaaactagaaaaactcccaggagaacagagtttctcctctgatcttggtgctctacgtttgtggcaatgcggattagtggatgacccgtttatggttctcgagaagcttccaaacttgaagattctccaactgtttgaaggatcatttgtaggtagtaagctttgttgttccaagaatctagagaatctagaggagtggactgtagaagacggtgccatgatgcgtcttgtcaccgtggagctaaagtgttgtaacaaactgaagtcagttcctgaaggaacgagattcctaaaaaatctacaagaagtagagattgggaacaggacaaaggcatttaaggacaagctaatctctggtggtgaagatttctacaaggttcaacatgtgccttgtgttgtttttgagaactgtgaactttaa

SEQ ID NO: 387 - DNA, 3152 bp, Arabidopsis thaliana
  source 1..3152: mol_type = genomic DNA
agcttttttgtttgtctattagagattagtcaacgtagtgatgacatactgacatctttggattgtttcaaagtttacgtttttactatacattgactagtcttagagattttatattatgcatatagtgacatagacttttcctttcttatctattcctcttctctacctaatctgtgaatctctctctctcactctctctcttttccttgattgtgcagagatgggaggttgtttctctgtttcattgccatgtgatcaagtagtgagtcagttctctcagttgttatgtgtcaggggaagttatattcacaatctctccaagaatctggcttctctgcagaaggccatgcgaatgctcaaggctcggcaatatgatgtgataagaaggttggaaacagaagagtttacagggcgtcaacaaaggctttcccaagttcaggtatggcttactagtgtcctaatcattcaaaaccagtttaatgatctgcttcgtagtaatgaagttgagcttcaaaggttgtgtctttgtggtttctgctccaaagatttgaaattgagctatcgttatgggaaaagagttatcatgatgttgaaggaagttgagagtctcagttctcaaggattctttgatgtggtttctgaggcaactccgtttgctgatgtggatgagatcccttttcaacccacaattgttggtcaggagataatgcttgaaaaggcatggaaccgtctcatggaagatggatccgggattttgggtctgtacggtatggggggagtaggcaaaacgacactactcacgaagatcaacaataagttttctaaaatagatgacagatttgatgttgtgatatgggttgttgtgtctagaagttcaacagtccgtaagatacaaagagacatagcagaaaaggtaggccttgggggaatggagtggagcgagaaaaacgataaccagatagccgttgacatccacaatgtccttaggagacgaaagtttgttttattgttggatgacatatgggagaaagtgaatttaaaagcggttggagtcccgtatccaagcaaagataacggatgcaaggtagcattcactactcgttctcgagatgtgtgtgggcgcatgggggttgatgatccgatggaagttagctgtctacaacccgaagaatcttgggatttgtttcaaatgaaggttgggaaaaatacactgggaagtcacccagacattcccggacttgctagaaaagtcgctaggaaatgtcgtggcctaccattagcactcaatgttatcggtgaagctatggcatgcaaaagaacagtacatgaatggtgtcatgccattgacgttttaacatcatctgccatagatttttcaggtatggaagatgaaattctccatgttttgaagtatagctatgataatttaaatggggagctgatgaaatcctgcttcctctattgctctctgtttcctgaagactatcttattgataaagaggggttggtagactactggataagtgagggattcataaatgaaaaagaaggcagagagaggaatattaaccaaggttatgagataattggtacccttgtccgtgcatgtttgttgttggaggaagaaaggaacaaatcaaacgtgaaaatgcatgatgtggttcgtgagatggctctatggatatcatccgatcttgggaagcaaaaggagaaatgtattgtgcgagctggtgttgggttacgtgaagtaccaaaagtcaaggattggaacactgtgagaaagatttctttgatgaataatgagattgaagagatatttgacagtcacgagtgtgctgcacttacaactctatttctccaaaagaacgacgtggtaaagatctcggctgaattctttcgatgtatgcctcatctggtggttttagatctatcagagaatcagagtcttaatgaattaccagaagaaatatcagagctggcctctttgagatatttcaacttgtcatatacatgtatacatcaactacccgttggtttatggacattgaaaaagctaatacatctgaatctcgaacacatgagcagtcttgggagtatattagggatatcaaatttgtggaatttgaggacattgggactacgagattccagactgttgctagatatgagtttagtgaaggagctgcagctcttagaacatctagaagttataaccctagatatatcatcaagtttggttgcagagccattgttatgctctcaaaggttggtggaatgtataaaagaggtagattttaagtaccttaaggaagaatcagtgagagtattgactttgccaaccatgggtaatctccgcaagctcgggataaaaagatgtggaatgagggagataaagatagagaggacaacttcatcatcgtctcggaacaaaagtcccacaactccatgcttctcaaacctctccagagtctttatagctaaatgccatggtcttaaggatttgacgtggcttttgtttgctcctaatcttacttttcttgaagttgggttctcaaaggaagtagaggatataattagtgaagagaaagctgaggagcattcagctacgattgttccttttaggaaattggagacactacacctgtttgaattacgcgggctcaagagaatctatgcaaaggctctgcattttccgtgtctgaaagttatccacgtagaaaaatgtgaaaagctgagaaagcttccattggattctaaaagtgggatcgcgggtgaagaacttgtcatatattatggagagagagaatggatagaaagggttgaatgggaggaccaagcaactcaactccgtttcttaccttcatccaggtggcggtggagagaaacataatgaacttcactttcttctacaaacttttgttgtcatggtctaaagacatttgccggtgtgtaaatctcttccttgtctcttcttgtttgcataaccgttctcatcgttcttttggttagtgatcattggatttgtacttatctctttctctaaacgatgagtgtttgtttcggcttcatagaaacattacacagagactcatgagaaaatgaataaaaacttgcaagttcctaaccattgtaataaaataataattaac

SEQ ID NO: 388 - DNA, 1159 bp, Arabidopsis thaliana
  source 1..1159: mol_type = genomic DNA
gtttggtttaggcatctgaaatctaccgaaatgggccggtaattagctcatacccaacacgaccagaccagaccgacccgacccgacggctccagattcatccatgtttcatcttcctcatcagatctaattcaatctgcgaatttctcttaaaccctaaccctctcgctgccgtccggtggtttttccgacgacgaactatgacgattcacgctgcagtaatccagaagcttctgaacaccggagcacatctcggccgtcgtgccgccgagcaccatttcaagcaatacgcttacgggacgcgtaacggaatgacaattatcgactccgacaaaaccctaatttgcctccgtagcgccgctcatttcgtcgctaacctcgcccacatgagaggtaacatcttcttcgtcaacacgaatcctctcttcgacgaaatcattgagctcacttctcgtcggatccaaggagattcgtataatcacaaccgtgcgatgaatctgtggaagatgggagggtttttgactaacagctacagtcctaagaagtttcgatctaggcataaaaagctttgctttggtccaactactatgcctgattgtgtcgttgtgtttgattctgagaggaagagctctgtgatacttgaggcatcgaagcttcagattccggttgttgcaattgtggacccgaatgtgccattggagttctttgagaagattacgtatcctgtgccagctcgtgattcggtcaagtttgtgtatttgttctgtaatgtgatcaccaagtgctttgtggcagaacagatgaagttggggatcaaagaagggagcaatgaagatttgatgaaggatttagctgcttgattttgatatttgcaacaaaagtatgaaactttacagttgtttttctgagtctggaataattgttcttcagaattgtggttacttcaactttgaaattctgggagttttttacacatggatgattttgtttctctgatggatatttctgtataagattgttgagttctagtgttctacatcttgataactgccttgtcttttccttgcacaactcattttttggaaatgctttagacattgtatatggtaatcgttacttcacaagttttggaatgagctatttacaagtaactgtctgg

SEQ ID NO: 389 - DNA, 3126 bp, Arabidopsis thaliana
  source 1..3126: mol_type = genomic DNA
caatgataagattctaaagtagattgagacaagtttcgtagtcggcagcagtaaccaagaaaacgagtaaggttgactcttgacttgttaaaccattgacttcaatttcgataaagtctctatgtaagctcatttttctgaaacaagttttgctaaaaaaatccaaagatctgaagcttcagatccttctcggctaaggctaagtcacaaccttgtaagtttactttactttggttagatttgtttcaatgttctaggattctacatgtttcttgagaagatatggattagttaaagaataatccaatcttttggttattgagattctatagtcgttggttgattgatttttggaaagttcaatctagtgatgatacacataaccgattgaattattgcttggttatagtttaccaattagagatatttcttgaagttgcagggtctgagtaaatggtggacgctgttgtaacagtgtttttagagaaaaccttgaacatcctcgaagaaaaaggccgaaccgtatcggactaccgaaaacagttggaagatttgcaaagcgaattgaaatatatgcagtcttttctcaaggatgcagagaggcagaagagaactaatgaaacgttgcgtactcttgttgcggatttacgagaactggtttacgaagctgaggatatacttgtggattgtcagctcgcggatggtgatgatgggaacgagcaaaggtcatcaaatgcgtggctttcgcggcttcatcctgcccgggttccgttgcagtacaagaaaagcaaacgtttgcaagagatcaatgagaggataacgaaaataaagagtcaagtagagccttatttcgaattcataacgccgagtaatgttggaagagataatggaactgatcggtggagctctccggtgtatgatcatactcaggtggttggtttggaaggagataaaagaaaaatcaaggagtggctctttcgatcaaacgacagccagcttttgataatggcctttgttgggatgggagggctaggtaaaactacaatcgctcaagaagtgttcaatgacaaagagatcgaacatcgtttcgaaagaaggatatgggtgtctgtgtcccagacttttactgaagaacagatcatgagaagcatattgaggaacttgggggacgcgagtgttggagatgatattggaacattgctgagaaaaatccagcagtatcttttggggaaaaggtacttgatagttatggacgatgtatgggacaagaatttgagctggtgggacaagatctaccaaggactgcctagaggacaaggaggtagcgttatcgtgaccacaaggtcggaatctgtagcgaaaagggtgcaagcgagagacgacaagactcaccgtccagagctccttagtcctgataacagttggctgctgttttgtaatgtggcatttgcagcaaatgacggtacttgtgagcgtcccgagctagaggatgttggcaaggagattgtaacgaaatgcaaaggtttgcctttgacaatcaaagcggttggtgggttacttctgtgcaaagaccatgtctatcatgaatggagacgaattgcagagcattttcaggatgagctaagaggaaacacttctgaaactgacaatgttatgtcttctctgcagttgagctacgatgaactcccttcccaccttaagtcgtgcattctcacgctttcgctctatccagaagactgtgttataccaaaacaacaactagtacatggatggatcggagaaggttttgtcatgtggagaaacggaagatctgcaactgaatctggagaagactgcttttccgggctcacaaacaggtgtctaatagaagttgtagacaaaacctatagcggaaccatcatcacttgcaagattcatgacatggttcgtgatttggtgatcgatatagccaagaaggattcgttctctaacccggaaggcctcaactgtcgtcaccttgggattagtggaaactttgatgagaagcagatcaaagttaaccataagctgagaggcgtagtgtcaacaactaagacaggtgaagtgaacaagctcaactcagacttagctaagaaattcacagactgcaaatatcttcgggttctcgatatctcgaaatccatatttgatgctcctctgtctgagattttggatgagattgcaagccttcaacacttagcatgtcttagtttgagcaacacacatccgttgatccagtttcctcgttccatggaagatctccacaaccttcagattctagacgcaagctactgtcagaatctgaaacaacttcaaccttgcatcgtcttgttcaagaaactccttgtacttgacatgacgaactgtggatcccttgaatgcttccccaagggtatcggaagtctcgtgaagctcgaagttctgttgggatttaagccagccaggtccaacaatgggtgcaagctcagtgaagtgaaaaatctcacaaaccttcggaaacttggtctttctctgactcgtggcgatcagatagaagaggaggagcttgattctttgataaacctaagcaagctgatgtccatttcgatcaactgctatgatagctacggcgatgatctcataaccaaaatagacgcccttactcctccacaccagctccatgagctttctctacaattctatcctggaaagtcgagtccatcgtggttgagtcctcacaagcttccgatgttgaggtacatgtcaatatgttcaggtaatttggtgaaaatgcaggaaccattctggggaaacgagaatactcactggagaattgaaggtttaatgttaagttcattgtcggacctagacatggactgggaagtgctgcaacagtcaatgccgtacctgaggaccgtgaccgcaaactggtgtccagagctagagtctttcgcgattgaagatgttggctttagaggcggagtgtggatgaaaacaccattgcacagaacctgatgaaacgttttaagcaactagatcaatgtttattaaacagtgacaataagttggtgtattacatataccttgatacaatgtaatgttgctttgaccgtttggatttcatatcgc

SEQ ID NO: 390 - DNA, 1170 bp, Arabidopsis thaliana
  source 1..1170: mol_type = genomic DNA
gaaaacggcccatataaatccaccaaacgaatcttctctcttggtataaatatgctgtcttgcgttacagagaaaccctagacgtcgaagatgaagttcaacgttgcgaatccaactactggatgccagaagaagctcgagatcgacgatgaccagaaactacgtgcgttttacgacaagagaatctctcaagaagtcagtggagatgctttgggcgaggagttcaaaggatacgttttcaagatcaagggtggttgcgataagcaaggtttcccaatgaagcagggagttttgactccaggccgtgttcgccttttgcttcaccgaggaactccttgcttcagaggacatggaaggagaactggtgagaggagaagaaagtctgttcgtggttgcattgtgagccctgatctctctgttctgaaccttgtcattgtgaagaagggtgagaacgatcttcctgggcttaccgatactgagaagccaagaatgagaggaccaaagagagcctccaagatccgtaaactgtttaacctcaagaaggaagatgatgtcaggacctatgtcaacacttaccgccgcaagttcacaaacaagaagggcaaggaagttagcaaagcccctaagatccagaggcttgtgaccccattgactcttcagaggaagagagctagaattgctgacaagaagaagaaaattgctaaggctaattctgatgctgctgattaccagaagcttctcgcctcgaggttgaaggaacagcgtgacaggaggagtgagagtttggcaaagaagaggtcgagactctcttctgctgctgccaagccctctgtcacagcttaaaaaagcttgagaatcaaatcaaagatgtcacctttctagttttgttctcttttcttctccggctattaaaaagttagttcgagttcatattcagctgtttttgttccaagacatgggtacacaatcgctttgggcttgtttcatgatttatgcttttagttgaagaccattttaaactcaatttttattgcttatctttctcagtttttgatcaaagcgtttctccattgaaaaccattttaatcacctgtttcaatcatacataatgttaaacacatgtactggcgattacaataggtatatattttgactgaaatttatggagca

SEQ ID NO: 391 - DNA, 3147 bp, Arabidopsis thaliana
  source 1..3147: mol_type = genomic DNA
aatggagttgccatggaggttgaggtaatttgtagctcgaatgcatctgatcatgcagttagtatagataatctgtggatattttgcaatattcgtagggaaaaggaaccaaaaatccatcaagttgtaagtgtttagcaaatatctacaagacttcatcttttgtgctttctcttaaatgtatccgatttttttttgcatttgaaagttctacaatattattagagtagtgggaaatgtcataatcgtggaaaagtataaatattttcaataatgcatacagtaatcattgattccctttgtgtggttgaaattctattctatacatctttaaattcgatatagtaatcatttattccctatctcttcttttcatcattttgaataattgtcactcactcaatttggtttcttgttttgctctctagatctctcttttctctcttctttccatctccagcaatgggagcttgtttaacactctcgttctcttgtgatgaagttgtgaatcaaatctctcaaggtttatgcatcaacgtgggttatatttgcgagctctccaagaatgtagtggctatgaagaaagacatggaagtgctgaagaaaaagcgagatgatgtgaaaagaagggtagatatagaagagttcacaaggcgtcgtgaaaggctttctcaagtccaaggatggcttacgaatgtctcgaccgtcgagaataaattcaatgaactgcttaccactaatgacgctgagcttcaaaggttgtgtctctttggattttgctctaaaaatgtgaaaatgagctatctttatgggaaaagggttgtcctgatgttgaaggagattgagagtcttagttctcaaggagattttgatactgtgactttagccactccaatagctaggattgaagagatgcctattcaacctacaatcgtaggtcaggaaacaatgctcgaaagggtatggacccgtctcacagaagacggagacgagattgtgggtctttatggcatgggtggagtaggcaaaaccacccttctcacacgaatcaacaacaagttttctgaaaaatgtagcgggtttggggttgtgatatgggtggtggtgtctaagagtccagatatccataggattcaaggagacatcgggaagagactagaccttggaggcgaagagtgggataatgtaaatgaaaaccagagagcccttgacatatacaatgtccttgggaaacaaaaatttgtgttgttgttggatgatatatgggagaaagtgaatttagaagtgcttggagtcccttatccaagcagacaaaatggatgcaaagtagtattcaccactcgttctagagatgtttgtgggcgtatgcgggttgatgacccgatggaagtcagttgcctagaacccaacgaagcctgggaattgttccaaatgaaagttggagaaaacacattgaaaggccatccagacattcctgaacttgcaagaaaagttgctggaaaatgttgtggcctaccattggcacttaatgtcattggcgagaccatggcatgcaaaaggatggtacaagaatggcgtaacgcaattgacgttttgagctcatatgctgcagaattccctggtatggaacaaattcttcctattctaaagtatagctatgataatttaaacaaggagcaggtgaaaccatgtttcctatattgctctctgtttcctgaagattatcgtatggaaaaagagaggttgatagactattggatatgtgagggattcatagatgaaaatgaaagtagagaaagagcattaagccaaggttatgagatcattggtatccttgtccgagcatgtttgttgttggaggaagctatcaataaagaacaagttaaaatgcatgatgtggttcgggagatggctctatggattgcatctgatcttggggaacataaagaaagatgtattgtgcaagtcggtgttggattacgtgaggtaccgaaagtcaagaactggagttctgtgagaaggatgtcgctgatggaaaatgagattgaaattttatctggcagtcccgaatgcctggaacttacaactctgttccttcagaaaaatgattcattgctacatatctcggatgaattcttccggtgtatcccaatgctagttgttttggatctatcagggaattcaagtctccggaaattgcctaaccaaatatcaaagttagtctccttgcgttatcttgacttgtcgtggacatacattaagcggctacctgtcggtctacaagagttgaaaaagctcagatatttgagattggattacatgaagagacttaagagtatttcagggatatcaaatatatcaagtttgaggaaattgcaacttttacagtctaaaatgtcgctagacatgagcttagtggaggagttgcagctattagaacatttagaagttctaaacataagtatcaagtcaagcttggtagtggagaagttgttaaatgctcccaggttggtgaaatgtcttcaaatcttagtacttagaggagttcaggaagaatcatccggagtattgactttgccagatatggataatctcaataaagtcatcataaggaagtgtggaatgtgtgagataaagatagagaggaaaactttatcattatcatcgaacagaagtcccaaaactcaattcctccataacctctccactgtgcatataagtagctgtgatggtctgaaggatttgacgtggttgttgttcgctcctaacctcactagtctcgaggttctggactcggaactagtagaaggaataataaaccaagagaaagctatgactatgagtggtatcattcctttccagaaactagagagtctacgcctacacaatctagcgatgttgaggagcatctactggcaacctctgtcttttccatgtctgaagacaattcacataacgaagtgtcctgagctgagaaagcttccattggattctgaaattgccataagggatgaagaacttgtcattaagtaccaagaggaagaatggcttgaaagggttgaatgggacaacgaagccacaagactccgtttcttaccttttttcaagttctttggacctgaatggcaagttagttatgtgcggtag

SEQ ID NO: 392 - DNA, 3034 bp, Arabidopsis thaliana
  source 1..3034: mol_type = genomic DNA
caaaaaaacaaagaaggattataagctatacttacttttcagcttctctcatggaagaatcttcatctttgtcattgcagtcttgcaattggagacaccatgtgtttccaagcttcagcggcaaagatgtccgcagaacctttctcagccaccttctcaaggagttccggcgtaagggaatccgtactttcatagataatgatatcaagagaagccaaatgatcagttctgagcttgtacgagctatcagagaatctaggattgcggttgtagtgttgtcgcggacctatgcatcttcaagctggtgtttgaatgagttggtggagataaagaaagtaagccagatgatcatgccggttttctacgaggtggatccatctgatgtgaggaaacgaacgggagaatttggaaaggcgtttgaggaagcatgtgaaagacaaccagatgaggaagtgaagcagaaatggagagaagcattggtctatatagctaatatagccggcgagtcttctcaaaactgggacaatgaagcagatctgattgacaagattgctatgagcatttcatatgaattgaattctacattatcacgagattcctacaatctggttggaatcgacaatcatatgagagagctggattctttgttatgtctggaatcaactgaagtgaaaatggtggggatttggggtcctgcaggtattggcaagacaacaattgccagagctttattcaaccggctatctgaaaacttccaacacactatttttatggagaatgttaagggaagttctaggacctcggagctcgatgcctatggcttccagttgcgtttgcaagaacagtttctgtctgaagttattgatcataagcatatgaagatacatgatttaggtttggtaaaagaaagattgcaggatctgaaagttcttgttgttcttgatgatgttgataaactagaacaacttgatgccttagtgaaacaatctcagtggtttggttctggaagtaggatcattgtgaccacggaaaacaaacagctattgagagcgcatgggatcacttgcatatatgagttgggttttccatctagaagtgattctcttcagattttctgccaatatgcatttggagagagttctgcaccagatggttgtatcgagcttgctactgaaataacaaagcttgctggctatcttcccctagctctaaaggttttggggtcctctctgcgagggatgagcaaagatgagcaaaaatcagcattgcctcgactcagaaccagtcttaatgaggatattagaaatgttttacgagtcggttatgatggtatacatgacaaggataaggtcatattccttcatattgcttgtttattcaatggtgagaacgttgattatgtgaagcaaatacttgcaagttctggcttggatgtcacatttgggcttcaagtccttaccagtaggtctctcatacacatatcgagatgcaatcgtactattacgatgcacaatttgctagaacaattgggtcgagaaattgtttgcgaacaatctattgccgagcctggcaaacgtcaattcttgatggatgcttcagagatttatgatgtacttgctgataacactggtactggagctgttttgggcatatctttggacatatctaagatcaatgagttgtttctgaatgaaagagcttttggtgggatgcataatctgttgtttctaagattctacaagtcctcttcgagtaaagatcaacctgagcttcatttacctcgaggcttggattatttaccccgtaaacttaggctgctgcattgggatgcattccccatgacatcaatgcctctgagtttttgtccacagtttcttgttgtgataaacataagggagagccagcttgagaagctgtgggaaggaacacaacctcttagaagtctaaagcagatggatttaagtaagtctgagaatctaaaagagattcctgatctttcgaaagcggtaaatatcgaggaactctgtctcagttattgtggaagtttggtgatgttaccttcctcgatcaagaacctcaacaaattggttgttcttgacatgaagtattgctcaaagctagagattatcccctgcaatatggacttagagtcccttagcatcctcaatcttgatggatgctcacgattggagagttttccagaaatttcttcgaagattggatttctctctctgtcagaaactgcaatagaagaaattcccacaacagtcgcgtcttggccatgtctggcagcattggacatgtcaggctgcaagaacctcaagacgtttccatgtcttccaaaaactatagaatggttggatttgagcaggacagagatcgaagaagttcctttgtggatcgataaactctcaaagctcaataaactattgatgaacagctgcatgaagctaagaagcatctcttctgggatctctacgctggaacatatcaaaacactagattttttggggtgcaagaatattgtgagctttcctgtagagatattcgagagctctcggttctgtcataatctggtgatggagatgagaaacattcaaaaccctgatcttcctcgaccattttatttcaagaacaactatattgacactattccagattgtattacacgtcactgcaagctgccttttctgaattcatcaggatcaatctccagcaagatagagaatgatttcatctggttcgataaataaatatcagtgaagaattgcatgataatgatgagtcagatggagtttcatcttcaaaccctgctcattacaattgtaagtgacatcatttgacttttcccctgtggacccatctttgggcactgcaagtgttccagaccatatagttcaacatctctgaaactgagaatgaaatccgtgtacgttgggcacgttattattgttgaaatgtaggttcttgtaagatatagcttatagacaattgtttgtatatccgtgtacgttgggcacgttattattgttga

SEQ ID NO: 393 - DNA, 3099 bp, Capsicum chacoense
  source 1..3099: mol_type = genomic DNA
caaatatttcttggagtgaatttgaagttgtattatctgcaattgaatggttggtcatagtcgcaaaggacaaaaacgagaatacagtatatatggctcatgcaagtgtggcttctcttatgagaacaatagaatctctcttgacattcaattcgccgatgcaatctctatcctgtgatcacagagaagaactttgcgctcttcgtgaaaaagttagttccctggaagtatttgtcaagaactttgagaaaaacaatgtttttggggaaatgacggattttgaagtagaggtaagagaagttgcaagtgctgctgaatacacaattcaactgagactaacaggaactgtactgggagaaaataaaagccagaaaaaaaaggcgcgtcgaaggtttcgtcaaagcctgcaacaagtagcagaggacatggatcatatctggaaagagtcgacaaagatccaagataaaggaaaacaagtatcaaaggaatcattggttcatgatttttcaagttcaacaaacgatattttgaaggttaagaacaatatggttggacgtgatgatcaaaggaaacagttgttagaagatctgactagaagctactctggggaacccaaagtcatcccgattgtcgggatgggaggcataggtaaaacaaccttagcaaaagaagtttacaatgatgaatcaattctatgccgttttgatgttcatgcctgggctaccatatctcaacagcacaacaaaaaggaaattttgctgggccttctgcattccacaatcaaaatggatgacagggttaagatgattggtgaagcagagctagcagacatgttacagaaaagtttaaagagaaagaggtacttaattgtcttggatgatatctggagttgtgaagtgtgggatggcgtgagacgatgctttccaactgaagacaatgcagggagtcgaatactgttgactacccgtaatgatgaagtagcttgttatgctggtgtagagaatttttctttgcggatgagcttcatggatcaagatgagagttggagtcttttcaaaagtgcagcattttcaagtgaagcattaccatatgagttcgagactgttggaaagcaaatcgcagatgaatgtcacgggttaccactaactattgtcgtggttgcagggcttctcaaatctaaaaggacaatagaagattggaaaactgttgctaaagatgtcaagtcattcgtcacaaatgatcctgatgaacgatgttcacgtgtgcttgggttgagttacgatcacttgacaagcgatctaaaaacatgtcttctgcatttcggaatttttccagaagacagtgatattccagtgaagaatttgatgagatcatggatggctgaggggttcctgaagttggaaaatgatttggaaggagaggttgagaagtgtttgcaagagcttgtcgatagatgtctagtcctcgtcagcaagagaagtcgagatggaacaaaaattagatcatgtaaggttcatgatctaatatatgacctgtgcgtgagagaagttcaaagggagaacatttttatcatgaacgacattgttcttgacgtatcatatccagaatgttcatatctctgtatgtataaaatgcagccctttaagcgcgtgactggtgatgaaattaattattgtccctatggtctttatagggctcttcttacccctgtaaatcgtcagttgagagatcatgacaacaacaatcttttgaaacgaacccattctgttttctcttttcatcttgagcctttatattatgttctcaaatcagaggttgttcatttcaaattactcaaagtcttggagctgagacacagacagattgatggtttccctcgagagatactaagcctcatctggttgaggtacctatcattgttcagctatgggaatttcgatgtacctccagaaatttgcaggttatggaatctgcagacattcattgttcaacggtttcgatcagatataataatttttgctgaggaaatttgggaactaatgcaattaaggcatcttaaactgcccagattttatttgccagattgcccaagtggatctgttgacaaaggaaggcacttggatttttcaaacttacaaactatttcttacttgtctccacgttgttgcacgaaggaggttattatggggattcagaatgtcaaaaaattaggaatcagtggaaataaggatgactataaaagttttcgggactctgggcttcccaacaatcttgtctatctgcagcaacttgaaatattgagtcttatatctgttgattatagccttttgccagtgatcatttcaagtgcaaaagcttttccagcaacgctcaagaagttgaagttggaaagaacttatctaagctggtcatacttggacatcatagctgagttgcctaaccttgaggtgctgaagctgatggatgacgcttgttgtggtgaagaatggcatccaattgttatgggatttaatcgattgaagcttttgctaattaaatatagttttctcaagttctggaaagccacaaatgacaattttcctgtccttgagcgcctcatgattagaagttgcaaaaatttgaaagagatacccattgagtttgcagatatacacacactacagctgattgagttaagagagtgtcctcccaaacttggggaatctgctgcacgaattcagaaagaacaagaagacctcggaaacaaccctgtggatgttcgtatctcaaatccattgaaggagagtgattctgattcagaagaacattaggaaaggatctcaaggccagaaggattgaactcttgggatttcatttcggccctctatcacaaaataccactaaattatcggtttcaagcaatgtgtgacttccaaggagatgtgatatcttttgtgttgtaacatatttttgagttgtactgattcccttcttcccttctctttttatgtaactttactaattcaacttcaagtactagcagaccacatggttgattgtgatcgagtttgatgattattttatacgatgagacaaccagtttagttttaaaaaaaaaaa

SEQ ID NO: 394 - DNA, 4010 bp, Glycine max
  source 1..4010: mol_type = genomic DNA
aatacagctgttaaagtttgtcttgttgggaacactcaacagttattggttgactcaatcttaattaaagccatccttcataaaattgcctatcactgatttgatcagttcatgaaccctgcactgcacttcaaattactcattttcattcatccactcaactccctttcctaccatggcactagaattggttggtggtgctcttctttctgctttccttcaggttgcgtttgagaagcttgcttctcctcaagttctggacttctttcgtggaagaaagcttgatcaaaagctgctcaacaacttggaaatcaagctgaactccatacaggctctggctaatgatgcagaactaaagcagttcagagatccacttgtcagaaactggcttcttaaggtcaaagatgctgtgtttgacgcagaggatatcttggatgaaatacaacatgagatctccaaatgccaggtcgaagctgaagctgaagctgagtctcaaacctgcacttgcaaggtaccaaatttcttcaaatcttctcctgctagttcctttaacagggaaattaaatccaggatggaagaaatccttgatagattagatcttctctcaagccaaaaggatgatctaggcttgaaaaattctagtggtgttggcgttggatcagaattgggtagtgcagtaccacagatatcacaatcaacatcttcagttgttgaaagtgatatttatggcagagataaagacaaaaaaatgatttttgattggctgacatctgacaatggcaatcctaaccagccatcgatactttctattgtgggcatgggtgggatgggtaagaccacacttgctcaacatgtattcaatgaccctaggatcgaggaggctagatttgatgtcaaagcttgggtctgtgtttcagatgattttgatgctttcagggtaacaagaacaattcttgaggccatcactaaatcgactgatgatagtagagacctagagatggttcacggaagattgaaagaaaaattgacggggaagagatttcttcttgttttggatgacgtttggaacgaaaaccgacttaaatgggaagctgtgctaaaacatcttggttttggggctcaggggagtagaattattgccaccacacgtagtaaggaagttgcttctaccatgaggtcaaaagaacacctcctggagcaattacaagaagatcattgctggaagttgtttgctaaacatgcattccaagatgataatattcaaccaaatccagattgcaaggagattggtatgaagatagttgaaaaatgtaaaggacttcctctggccttgaaaacaatgggaagtctattacacaacaagtcatctgttacggaatggaaaagcatattgcagagcgagatatgggaattttcaacagagcgtagtgatattgtacctgctttagcactaagctatcaccatcttccttctcatctcaagagatgttttgcttattgtgccttattccccaaagattatgagtttgataaggagtgcttaatacaattgtggatggctgaaaaatttctacaatgttctcaacagggtaagagtccaggagaagttggtgaacaatacttcaatgatctattatcaaggtgcttctttcaacaatcaagcaacacagagagaacagattttgtcatgcatgaccttctcaacgatttggcaagatttatttgtggggacatttgtttcagattggatgggaatcaaacaaaaggtacaccaaaagcaacccgtcattttttaattgacgttaaatgttttgatgggtttggaactctatgtgacacaaaaaagttacgtacttatatgccaacaagttacaaatattgggattgcgagatgtcaatacacgaattgttctccaagtttaattacttacgtgtcttatctctgtttgattgtcatgacctaagagaggtgcctgactctgtgggtaatctcaaatatctccgttcgttagacttatccaatactaaaatagaaaaactacctgaatcaatatgttcactctacaacttgcaaatactgaagctaaatggttgtagacatttgaaggagctgccctcaaatttgcataaactcactgatttgcatcggcttgaattaatagaaactggagtgagaaaggtaccagcacatttgggaaaactggagtatcttcaagtattaatgagttcgtttaatgttggcaaaagtagggagttcagtatccagcagttaggagaactcaatcttcatggaagtctatcaataaggcaactgcagaatgttgagaatccatcagatgcattagcggtggatttaaaaaataaaacacaccttgtcgaggtagagttagaatgggattcagactggaaccctgatgattcaacaaaagaaagggatgtaatcgagaatctacagccttccaaacacttggagaagttgaggatgaggaactatgggggtactcaatttccaaggtggttattcaacaattcatcatgtagtgtggtgtccttaaccttgaagaactgtaaatattgcctatgtttgcctccccttggacttttgccatctctgaaggaactttcaattaaagggcttgatgggatcgtgagtatcaatgctgattttttcgggagtagctcttgttcatttacatccttgaaatctttggagttctaccatatgaaggaatgggaagaatgggaatgtaaaggtgtgacaggtgcttttccacgtcttcaacgtctttctatagagcgttgtcccaagctgaaagggcacttgccagagcaactatgtcatttaaattctctaaagatttctgggtgtgaacaacttgtaccttctgctctcagtgcccctgatattcataaattatacctaggagactgtggagagctgcaaattgatcatgggacaactttgaaagagcttaccattgaaggtcacaacgtggaggcagccttattcgaagagattgggcgcaattactcttgttcaaataacaatattcccatgcacagttgctatgatttccttgtaagcttgcgcatcaaaggtggctgcgactctttaacgacctttccgctagatatgttcacaatactcagggaactttgtatctggaagtgtcctaatctacggaggatttcacaagggcaggctcataatcatctccagactctggatatcaaagagtgcccccaattagaatcattgcctgaaggaatgcatgtcctccttccatctcttgattctctgtgcatagatgattgtccaaaagttgaaatgtttcccgaaggaggtttgccatcaaatttaaaagaaatgggtctctttggtggtagttacaaacttatctccttattgaaaagtgccttgggaggcaatcactctctagaacggttagttattggaaaagtggattttgagtgtcttcctgaggaaggtgtactgccacactctcttgtttctctacagatcaatagctgtggagatcttaaaagactggactacaaaggtatctgccacctctcctctctcaaggaattgagtcttgaagactgccccaggctccaatgcttaccagaggagggtctgcccaaatccatttcaactttgtggatttggggggactgtcagttgctcaaacaacgttgccgggaacccgaaggcgaagactggccaaagattgctcacttttgcccgttgctcaatcaacgttgccgggaacccggaggcgaagactggccaaagattgctgacattgaaaacgtgtatataaggtagtgaggttgattataaagaataatggtgaaagatgtagatgcttctctattgcctgcaatttactaaataattgttttctaaacttatttttgctttctgcttgctggacgccgccgctcagttatttattattcgacaaaataattgtttaatatagtttcaagtgattgattctgcttgg

SEQ ID NO: 395 - DNA, 3639 bp, Glycine max
  source 1..3639: mol_type = genomic DNA
atggcagtagaattaattgctggtgctcttctttcttctttccttcaggttgcattcgaaaagcttgcttctcctcaagttctccacttctttcacggaaaaaaacttgatgagacgcttctgagaaagttgaaaattaagctgctgtccatcgatgctctggctgatgatgctgaacgaaagcagttcgcagatccacgcgtgagaaactggcttcttgaggtcaaagatatggtttttgatgcagaggatctcttggatgaaatgcaatatgaattctccaaatgggaactggaagctgaatctgaatctcagacctgtaccggctgtacttgcaaggtaccaaatttcttcaaatcttctcctgctagttcctttaacagggaaattaaatccaggatggaaaaaatccttgatagcttagaatttctctcaagccaaaaggatgatctaggattgaaaaatgctagtggtgttggcgttggatcagaattgggtagtgcagtaccacagatatcacaatcaacatcttcggtggttgaaagtgatatttatggcagagataaagacaaaaaaatgatttttgattggctgacatctgacaatggcaatcctaaccagccatcgatactttctattgtgggcatgggtgggatgggtaagaccacacttgctcaacatgtattcaatgaccctaggatccaggaggctagatttgatgtcaaagcttgggtctgtgtttcagatgattttgatgctttcagggtaacaagaacaattcttgaggccatcactaaatcgactgatgatagtagagacctagagatggttcacggaagattgaaagaaaaattgacggggaagagatttcttcttgttttggataacgtttggaacgaaaaccgacttaaatgggaagctgtgctaaaacatcttgtttttggggctcaggggagtagaattattgccaccacacgtagtaaggaagttgcttctaccatgaggtcaagagaacacctcctggagcaattacaagaagatcattgctggaagttgtttgctaaacatgcattccaagatgataatattcaaccaaatccagattgcaaggagattggtacgaagatagttgaaaaatgtaaaggacttcctctggccttgaaaacaatgggaagtctattacacgacaagtcatctgttacggaatggaaaagcatattgcagagcgagatatgggaattttcaacagagcgtagtgatattgtacctgctttagcactaagctatcaccatcttccttctcatctcaagagatgttttgcttattgtgccttattccccaaagattatgtgtttgataaggagtgcttaatacaattgtggatggctgaaaaatttctacaatgttctcaacagggtaagagtccagaagaagttggtgaacaatacttcaatgatctattatcaaggtgcttctttcaacaatcaagcaacacaaagagaacacattttgtcatgcatgaccttctcaacgatttggcaagatttatttgtggggacatttgtttcagattggatggtgatcaaacaaaaggtacaccaaaagcaccccgtcacttttcagttgcaatcgaacacgttcgatactttgatgggtttggaactctatgtgatgcaaaaaagttacgttcatatatgccaacaagtaacaaaaagatttttgattacttctcttcttgggatcgcaatatgtcgatacatgaactggtctccaagtttaagttcttacgtgtcttatctttatctcattgttctaacctaagcgaggtgcctgactctgtgggtaatcttaaatatctcagttcgttagacttatccaatactgaaatagtaaaactacctgaatcaatatgttcactctacaacttgcaaatactgaagctgaattattgtaaacaattggacgagctgccctcaaatttgcataaactcactgatttgcatcgccttgaattaatagatactggagtgagaaaggtaccagcacatttgggaaaactgaagtatcttcaggtatcaatgagtccgtttaaggttggcaaaagtagggagttcagtatccagcagctaggagaactcaatcttcatggaagtctatcaattcagaacctgcagaatgtcgagagtccctcggatgcattagcagtggatttgaaaaataaaacacaccttctggaggtagagttagaatgggattcagactggaaccctgatgattcaacaaaagaaagggatgaaattgtaatcgagaatctacagcctcccaaacacttggagaagttgaggatgaggaactatgggggtaaacaatttccaaggtggttattaaacaattcattattgaatgtggtgtccttaaccttggagaactgtcaatcttgccaacgtttgcctccccttggacttttgccatttctgaaggagctctcaattcaagggcttgcagggattgtgagtattaatgctgattttttcgggagtagctcttgttcatttacgtccttggaatctttgatgttccacagtatgaaggaatgggaagaatgggaatgtaaaggtgtgacaggtgcttttccacgtcttcaacgtctttctatagagtattgtcccaagctgaaggggcacttgccagagcaactatgtcatttaaatgatctaaagatttatgggtgcgaacaacttgtaccttctgctctcagtgcccctgatattcatcaattatccctaggagactgtggaaagctgcaaattgctcatccgacaactttgaaagagcttaccattacaggtcacaacgtggaggcagccttactcgaacagattggacgcagttactcttgttcaaataacaatattcccatgcacagttgctatgatttccttgtaaggttggtcatcaatggtggctgcgactctctaacgaccattccactagatatgttcccaaaactcagggggcttgatatcgggaagtgtcctaacctacagaggatttcacaggggcaggctcataatcatctccagagtctgtatatcaaagagtgcccccaattagaatcattgcctgaaggaatgcatgtcctccttccatctcttcattatctgagcataagggattgtccaaaagttgaaatgtttcccgaaggaggtttgccatcaaatttaaaaggtatgagactccatggtagttacaaacttatgtcctcattgaaaagtgccttgggaggcaatcactctctaattagcttatatattggaggagtggatgttgagtgtcttcctgacgaaggtgtactgccacactctcttgtttctctatggatcagtgactgtgaagatcttaagagactggactacaaaggtctctgccacctctcctctctcaagaacttgtttctttatgactgccccaggctccaatgcttaccagaggagggtctgcccgaatccatgttatctttgcacatttacgattgtccgttgctcatacaacgttgccgggaacccgaaggcgaagactggccaaagattgctcacattgattataaagaatttaatggtgaggttgattataaataa

SEQ ID NO: 396 - DNA, 3306 bp, Hordeum vulgare
  source 1..3306: mol_type = genomic DNA
atggtgagcgccttggcaggggtgatgacctctgtcatcggcaagctcaccgccctgctcggggaggagtacgcaaagctgaaaggtgtgcacagggaggtggagttcatgaaagatgagctgagcagcatgaacgcgctccttcagaggctggcagaggcggaccgtgatcttgatgtgcagacgaaggaatggagggaccaagttcgggagatgtcttacgacattgaggattgcatagacgactttatgaaaagccttggccaaactgacagtgctcagacagcagggcttgtgcaaagtgtggtccagcagctcaaggcgctgagggcgcgccatcaaatatccagcaaaatccaggggctcaaggcacgtgttgaagatgcaagcaagcgacgtatgaggtataagcttgatgagcgcaccttcgagcctagcatctcaagggctatcgaccctcgtttgccttcactctatgctgagcctgatgggcttgtcggtattgacaagccaagagacgagctcattaagtgcctaatggaggggatgggtgcatcagtgcagcagcaaaaggtgttatctattgtgggtcctgggggtctcggtaaaactacacttgccaatgaggtgtaccgtaaactggaaggccagttccagtgtcgagcttttgtttccttgtcacaacaaccagatgtgaataagatcttaagaaatatactctctcaagtctgccagcaagagcttcctagcacaagtgtacaggacgagggaaaactcattgacgcaatcagagaagttttaaagaacaagaggtacattcaccaactttgaattagttggctgttggtactgcatcattttttcttcagcattgatgcttatttagtagcctagccattctactatagtctactgttgtttaattaaattaaatatagatgattttgtttcattttaagcatatatatgcaattgtgaatagtgctttgattcacagttcatgaggttatctatctaaagggctcaaaagacttcctttaaatatcgtaaccccctatgataaattcaactttttgtggtgtggccaaaccattggggaaggggataatggctgtctgtaatagtaatatatagaagagaaatgattctgtccccataaacagtgaatttcaagaaacctgaagccctatatcattctcatgatttactaacatttgacgacaaggaaacatgccattttatttatttgttcacatattttccttattcatgagatttgcaaaacatgcactttgcaggtacttagttgttattgatgatatatggagtactcaagcatggaagattatcaaatgttctttgtttctgaatgacctgggaagcagaataatgacgacaacacgtagtattgatatagccaagtcatgttgctctcggcgccatgatcgtgtctatgaaataatgcctctgacgacagccaactctaagggtttattttttaaacgaatatttggctcagaagatatatgtcctcctcaattggaagaaatctcctcggaaatattaaaaaaatgtggtggttcaccattagcgattcttacaatagcaagtttattggccaataaagatagcacaaatgaagaatggaagtgggtgtataattcgatcggttcgacactgggaaaggaccccggtgtagaagagatgagaaggatactatctcttagctacgatgatcttcctcaccatttgaagacatgtttattgtatctgagtatatttccggaggactatgagattgagagggatcgattgataaggaggtggatcgctgaaggattcattgatacagatggtggacgagatttggaggaaataggagagtgttattttaatgatcttatcaatagaagtatgcttgagccagtgaaaatccaatatgacggtcaagtcgtttcatgccgagtgcatgatatgattctggatctccttgcatctaagtcaattgaagaaaactttgccaccttctctggtaaccaaaatgagatattagtccttcggcataagatccgtaggctatctctcaattattatgccctagagcacaccatgcttccatcaacagcgatcatttctcattgccgttcgctcagtattgtcgggtatgctgaaaagatgccttctctttcgaagtttcgtgttctgcgagtacttgatattgagaatggtgaggagatggagagcaactgttttgagcatctaaggacgcttttccagttgaggtatttgcgactccacgttagaagtatttctgcactccctgagcagttaggagaactacagcatttgaggactctggatatgggctggacaaagatcacaaaaatgcccaaaagcattgttcagctgcaacatttgacatgtttgcgcgtcagtaatttggaattacctgaagggattgggaatctgcaagctctgcaggagctatcagatatcaaagtcaaccggcacagcacggcgtcttgtttgctggagctgggcagtctgaccaaactgaaaatccttgggctacgctggtcaattgtcagtacacacggtaacgaagacacttttgtggataacttggtatcctcgctgcgcaaactgggcagatccagccttcgatccatatgcattcgtagttatcatggctataccatggagttcttactggactcctggttcccctcccctcatctcatgcaaaagtttcagatgggcacgtactacaacttccccagagttcctccttggatcgcgtcgctggacaagctcacatacctagatatcaatatcgatccagtagaagaggaagcactggagatccttggagaattgccttctttgctgtttctctggctgacatcgaaatcggctgctcccaaacagcggctcgtcgtaagcagcagcatgtttgtgcgtctgaaggagctccacttcacctgctggagcaatgggcaaggactgatgtttgaggccggggccatgccgaggctcgagaagctgtgggttccgtttgacgcaggcagcggtcttgattttggcatccagcacctctcttccctcacgcatcttgccgtcgagatcatttgcgtcggcgcgaccgctcgggacgtagaggcgttggaggaggccatcagaggtgcagcccgtctccttccgaaccgccctgcggtggaattccgaacatgggatgatgaaaagatggtggtggaggaggaggaggggcaaggcgtccctgaagaggagatccacgctagcggttga

SEQ ID NO: 397 - DNA, 3306 bp, Hordeum vulgare
  source 1..3306: mol_type = genomic DNA
atggtgagcgccttggcaggggtgatgacctctgtcatcggcaagctcaccgccctgctcggggaggagtacgcaaagctgaaaggtgtgcacagggaggtggagttcatgaaagatgagctgagcagcatgaacgcgctccttcagaggctggcagaggcggaccgtgatcttgatgtgcagacgaaggaatggagggaccaagttcgggagatgtcttacgacattgaggattgcatggacgactttatgaaaagccttggccaaactgacagtgctcagacagcagggcttgtgcaaagtgtggtccagcagctcaaggcgctgagggcgcgccatcaaatatccagcaaaatccaggggctcaaggcacgtgttgaagatgcaagcaagcgacgtatgaggtataagcttgatgagcgcaccttcgagcctagcatctcaagggctatcaaccctcgtttgccttcactctatgctgagcctgatgggcttgtcggtattgacaagccaagagacgagctcattaagtgcctaatggaggggatgggtgcatcagtgcagcagcaaaaggtgttatctattgtgggtcctgggggtctcggtaaaactacacttgccaatgaggtgtaccgtaaactggaaggccagttccagtgtcgagcttttgtttccttgtcacaacaaccagatgtgaataagatcttaagaaatatactctctcaagtctgccagcaagagcttcctagcacaagtgtacaggacgagggaaaactcattgacgcaatcagagaagttttaaagaacaagaggtacattcaccaactttgaattagttggctgttggtactgcatcattttttcttcagcattgatgcttatttagtagcctagccattctactatagtctactgttgtttaattaaattaaatatagatgattttgtttcattttaagcatatatatgcaattgtgaatagtgctttgattcacagttcatgaggttatctatctaaagggctcaaaagacttcctttaaatatcgtaaccccctatgataaattcaaccttttgtggtgtggccaaaccattggggaaggggataatggctgtctgtaatagtaatatatagaagagaaatgattctgtccccataaacagtgaatttcaagaaacctgaagccctatatcattctcatgatttactaacatttgacgacaaggaaacatgccattttatttatttgttcacatattttccttattcatgagatttgcaaaacatgcactttgcaggtacttagttgttattgatgatatatggagtactcaagcatggaagattatcaaatgttctttgtttctgaatgacctgggaagcagaataatgacgacaacacgtagtattgatatagccaagtcatgttgctctcggcgccatgatcgtgtctatgaaataatgcctctgacgacagccaactctaagggtttattttttaaacgaatatttggctcagaagatatatgtcctcctcaattggaagaaatctcctcggaaatattaaaaaaatgtggtggttcaccattagcgattcttacaatagcaagtttattggccaataaagatagcacaaatgaagaatggaagtgggtgtataattcgatcggttcgacactgggaaaggaccccggtgtagaagagatgagaaggatactatctcttagctacgatgatcttcctcaccatttgaagacatgtttattgtatctgagtatatttccggaggactatgagattgagagggatcgattgataaggaggtggatcgctgaaggattcattgatacagatggtggacgagatttggaggaaataggagagtgttattttaatgatcttatcaatagaagtatgcttgagccagtgaaaatccaatatgacggtcaagtcgtttcatgccgagtgcatgatatgattctggatctccttgcatctaagtcaattgaagaaaactttgccaccttctctggtaaccaaaatgagatattagtccttcggcataagatccgtaggctatctctcaattattatgcccaagagcacaccatgcttccatcaacagcgatcatttctcattgccgttcgctcagtattgtcgggtatgctgaaaagatgccttctctttcgaagtttcgtgttctgcgagtacttgatattgagaatggtgaggagatggagagcaactgttttgagcatctaaggacgcttttccagttgaggtatttgcgactccacgttagaagtatttctgcactccctgagcagttaggagaactacagcatttgaggactctggatatgggctggacaaagatcacaaaaatgcccaaaagcattgttcagctgcaacatttgacatgtttgcgcgtcagtaatttggaattacctgaagggattgggaatctgcaagctctgcaggagctatcagatatcaaagtcaaccggcacagcacggcgtcttgtttgctggagctgggcagtctgaccaaactgaaaatccttgggctacgctggtcaattgtcagtacacacggtaacgaagacacttttgtggataacttggtatcctcgctgcgcaaactgggcagatccagccttcgatccatatgcattcgtagttatcatggctataccatggagttcttactggactcctggttcccctcccctcatctcatgcaaaagtttcagatgggcacatactacaacttccccagaattcctccttggatcgcgtcgctggacaagctcacatacctagatatcaatatcgatccagtagaagaggaagcactggagatccttggagaattgccttctttgctgtttctctggctgacgtcgaaatcggctgctccgaaacagcggctcgtcgtaagcagcagcatgtttgtgcgtctgaaggagctccacttcacctgctggagcaatgggcaaggactgatgtttgaggccggggccatgccaaggctcgagaagctgtgggttccgttcgacgcaggcagcggtcttgattctggcatccagcacctctcttccctcacgcatcttgccgtcgagatcatttgcgtcggcgcgactgctcgggacgtggaggcgttggaggaggccatcagaggtgcagcccgtctccttccgaaccgccctgcggtggaattccgaacatgggatgatgaaaagatggtggtggaggaggaggaggggcaaggcgtccctgaagaggagatccacgctagcggttga

SEQ ID NO: 398 - DNA, 3921 bp, Nicotiana benthamiana
  source 1..3921: mol_type = genomic DNA
atgttgacttcatcttcccatcatggacgcagttatgatgttttcctaagctttaggggagaagacactagaaaaacatttgtgggtcatctgtttaatgctcttattgaaaagggtattcacacattcatggatgataaggagttaaagagagggaagtcaatctcatctgaactcatgaaagccattggagaatcaagatttgctgttgttgtcttttccaagaactatgcttcctctacatggtgcttggaagaactggtaaagattcttgaaattcatgaaaaatttgagctaattgttgtcccagttttctatgatgtggatccatcaactgtgaggaaacaaaatggggagtatgctgtttgttttactaaatttgaagctaacttggttgatgatagagacaaagtgctaaggtggagggaagcacttactaaggtagctaacatatcagggcatgatttgcgcaacacttacaatggggatgaatcaaaatgcatacaacagatactgaaagacatattcgacaaattttgtttctctatctcaataactaacagagatttagttggaatagaatctcaaattaagaaactaagttcattgttgaggatggacctgaaaggagttcgtcttgttgggatttgggggatgggtggtgtgggaaagacaactgctgcaagagcattgtttaacagatactatcagaattttgaaagtgcttgttttctcgaagatgttaaagaatatctgcaacaccataccttgttgtatttgcagaagactctcctttccaaactgttgaaggtagaatttgtagattgtactgatactgaagaaatgtgtgtaatattaaagaggagactttgttctaagaaagttctggttgttcttgatgatgttaatcataatgaccagctggataagctggtcggagctgaagattggtttggtagtggtagtagaattgttatcacaactagggatatgaaactgttgaaaaaccatgatgtgcatgaaacgtacgagataaaggttttggaaaaagatgaagcaattgagcttttcaatttgcacgcattcaagagaagttcacctgaaaaggagtttaaggagctcttaaatcttgtggtagattatactggaggccttcctttagctcttaaggtgcttggttctctgctgtacaaggaagatcttgatgtatggataagtacgattgatagactaaaagataaccctgagggtgaaattatggctacacttaaaataagttttgatggattaagggattatgaaaaaagtatatttttagatattgcatgtttcttcaggggttacaatcaaagagatatgacagcattatttcacgcttctggtttccacccagttctaggagtaaagacccttgttgaaaaatctctcatttttattttagaggacaaaatccaaatgcatgatttgatgcaagagatgggtagacaaatcgcagttcaagaatcaccgatgagaagaatatatcgtccggaggatgtgaaggatgcatgcataggagatatgaggaaagaagcaattgaaggcttgttactcacagagcctgaacagtttgaagagggtgagttggaatatatgtacagtgctgaagctctcaaaaagacgaggaggctgaggatacttgtgaaagaatattacaacagagggtttgatgagcctgttgcctatcttcctaacagtctgctttggcttgaatggcgtaactactcttcaaactcatttccatcaaattttgaaccgtcaaagctcgtatatcttactatgaagggtagttctatcatcgaactctggaatggtgcaaagaggttagcatttttgacaactcttgatctcagttattgccacaaattgatacaaaccccagattttaggatgatcacaaatttggaaaggttgatcctgagctcttgtgatgcattggtggaagtccatccatctgttgggtttctcaagaatcttattttgttaaatatggatcattgcatatcacttgagagacttccagcaattattcaatcagaatgtcttgaagttcttgatctcaattattgctttaacttgaaaatgttcccggaagtggaaaggaatatgacgcacttgaagaaactcgacctcacttcaactgggataagagaactgccggcatcaattgagcatctcagttccctggaaaacctacagatgcattcctgcaaccaacttgtaagtctccctagtagtatttggagattcagaaatctgaagattagtgaatgtgagaaactggggagtttaccagaaattcacgggaatagcaattgtacccgtgaactcatcttaaaattagtttcgattaaggagcttcccacctctataggaaacctcacctcactaaatttccttgaaatctgtaattgcaaaactatttcgagtctctcgagcagcatatggggattgacaagtcttacaactctaaagttgttagactgcagaaaacttaaaaacttgcccggaattcccaatgccataaatcatttgtcaggacatggacttcagctccttctgacattggagcagcccacaatttatgaacgccttgacttgcttaggattattgatatgagctggtgtagttgtattagcagtctcccccacaacatttggatgttgaaatttttaaggattctgtgcatctcttactgctcgagactggagtatttaccagaaaatttgggtcacttggaacatttggaggaattacttgcagatggtactggtattttaagactaccatcttcggttgcacgtttaaataaacttgaggtcttatcattcaggaaaaagtttgcgattggaccaaaagtccaatattcatcatcaatgctcaatttacctgatgatgtttttggaagtcttggaagcttaggctcagtggtgaagttaaatcttagtggaaatggtttttgtaatttgcctgaaacgatgaatcaacttttttgccttgaataccttgatataacattttgccagaggctcgaagcattgccagagcttcccccaagcatcaaggagctatatgtagatgaacacttggccttgagaatcatggaagatttagtaattaaatgcaaggagttgaatttaatagccgtcacaaaaattgagtaccaaaatttctatcgatggttagactcaatatggtcagatgtgtcagaactgctggagaacagtcagaagcaacaactggatgatatgttgcagcttattcccttttcatatctgtcgacggctaagcgtgaggaagttcttaagattgttatccatggaacacgaattccagaatggttcagatggcaagatagaagtgccacaacgatgtcagtcaaccttcctgaatattggtacactgaaaatttcttgggattcgctatatgctgcagctgctgcttttatcattctgcacgtagttacgatgttgaatttgaggggagcatgcatcattacaattatgattccagttattggaaagagtatgaggaaccaagttatgacttttatgagagagatagcattgagattacagcaaaactaactccccgacataaaggaatgcggactgaagagctcaagaaagtctgttcattttccatgaatgtgttacgtcgtgctactgctgtccctaatatgtgctttgcattttttccatttaacagtctctgtcacatatcaaatttacaggcaaataacccaaatgactatgggatatttgaaacctgtttgagtccaggggacatccgccatcgtggaaaacaatgggggtttaatttggtgtataaagatgaaactggtggcagtgttacacacgaaatgctcataaacagatag

SEQ ID NO: 399 - DNA, 2538 bp, Nicotiana benthamiana
  source 1..2538: mol_type = genomic DNA
atggtggatgcggtggtcactgtattcttggagaaacttctgcatgttctcacagaggagagtaggtttcttactaaatacagacagcagtttgaaaaactgaagaacgagctgctattcatgcaaagctttctcaaagatgcagagaggctcaagaggaaaaacaacacccttaaaggggtcatgtcctgtttgcgagacttaatctttgaagctgaagagatacttgaggactgccagaatcaatctgcagatagcgatcgggctactacatgcttccatcctaaaaggctctctcttcgccatcaaactgggaagtgccttgctaaaatcaatgacagaatctcggagataaagcaaaacatttcaacatatcttggagtaccacttctcgaagaaggaagtatggaggcacacaataatctaatgtcaagatggacttcttccctttatgaccacactcaggtagttggtttggaaggtgacactgagaagataaaggattggctatttgaagcaagagatggtttacttaccattgcatttgtgggtatgggaggacttggtaaaaccactcttgctcagaaagtcttcaatgacaaaagggtggaggatcacttggagaggaggatttgggtgtctgtttctcaaacatttactgaggaacaagtcatgagaagcatattgaggagtttaggagatgcatgtgttggtgatgaccagtgtgaactgttaagaaaaataaaccagtaccttttgggaaagaggtttttgattgttatggatgatgtttggagctgggacaatgcctggtggcaaaaaatctatactggactgcccaaaggaaatgggagcactgttattgtaacaacgagaaatgagctagtcgctcgcaagatgggagttacagaagcaagaatacattggccaaaattcctcaatgagcactacagttggttactattccggaagattgcatttgcaggaagtgcaggtgaatgccatttccccgagttggaggacgtgggaaaggagattgtggaaaaatgcaagggtcttcctttagcaatcaaagcagtaggaggagtgatgctttgcaagccatcttactatcacgaatggaggcgtatttcaaatcatttccgtgatgaattgaaagaaaatgatgactcagtgatggcctcactacagttgagctatgatgaactccctccttacttgaaatcctgtttcctctgtttttcactatttcctgaggattgtgtcataccaaaagaccaactgatccgttggtggattggagaaggtttcatacctctgagaagtggtaggttatcgactgaagtgggagaagattgtttctcacaactatccaatcggtgtttgatagaagttgttgataaggcttacaatggtgtgatccacacatgcaaaatgcatgacatggttcgtgacttggtgatcaaattagccgaggatgatgcatttttcaccccagctgatgcaacttgtcggcatttgggtattaagagtgagatgaattggaagcaactattgagcaatcaaaaattacgagcactgctaacaaccaccaagagtggtgaagttaacaaaatccattccgacattgccaagaagctgtgcaagagtcgacacctccaagtattggatctgtcaaaatcaattttcgatgtgcctctttcaagtttgttggaaggaattggatctgctaagcagctcacttatctcagtttaagcaatacacatccaatgattggagttccagcttccatatccaagcttgaaaaattacagattttggatttcagctattgccaaaatatgaaaatgctcccctcttgcgttctgacatttgaggaacttgctgttttggatgtgaacaactgtggttcccttgagtaccttccaaaaggattaagtaggctttccaatcttcaagtattgcttgggtttaagcctgcaaaattaagccaaccaggaggttgtcgtattgctgagctcagaagcctgactcgactcagaactctcagtttaagactaaccgaaaatgaggagattggagacgatgaggggaacgcactggtagatctccaagaacttcaatttttaacaataagttgctttggcagtcaagataatggacttgcgacaaaacttggtagactttatcctccacgacaactccacgagctgattctcaaattttatccaagtaagacaagtcctgaatggcttaaccccaatctctcccccatgttgcgatatttatcaatcatctctggtgatattacacaaatgcacgagaacttctggggtgatggtagtactgcttggaaaattgagggcttaatgttggaatctttatcggatttgagattggaatggtcagcaatgcatcaagtcatgccttcgttaagaatactcaaggttagctggtgccctgagttggagtcatttccaattgaagatgcagggtttagagggggtctatggaagaaggaagaacataggaactga

SEQ ID NO: 400 - DNA, 8394 bp, Oryza sativa
  source 1..8394: mol_type = genomic DNA
tcctcgagggtatagaccatatttcccctggtttccattgatgtggcatatatcagggcccactacctcaaccatcaccacgtccagtcctttcggcctgttcgcgatgacgagctcggccaccacctcaacatcgtccatgctgcggcgatggcgaggagacagctgggacggtgaacctcatagctccgtctgttgcaacatcctctcgccatgctcacgtcgccacgacacccttgtcctcctgctccgtagcagcctcgcaagctcacgccgcggcctcgtcgaggtcctctgtccccgagccgcttctagcatcgatgagctgaggaactccccactgccgaggcgatgacgatttggcagggagggctcgattcgcccactccaattcgcagcttcacacctcccctccccctcctattcatccaccaccaacgcggataggagaagggatagaggaaggtgtgcgtggacacttacatgttggtcccatatattttttttactcggatgccacgtcagataaaacaaccgtcggtcaacatttttcgtattgcggattaggaacgtcattcatgactcgacgcagagctgagggatggcaagtgaacttattcccataaaacttccaaaagtttggaatgctcaacttgggcttctcttcggatgctgaagtgctaatgggccaaataaccaactagcccacagcccatcgaagtggaagccgacgagtccaccgtcaacgcggcagtagtaatccgagaaaacgcgggtcgcgcgaagcaatcgatcatcatcagacgattaatccacgacgaccaggagcgctgccccgagccacacgcccacacgcactggtgaatcttctcctttccacctagttttcactctgcagtctcctctcctagctactactctgccttcccatcctcgcttgttgcagccctcttgcacacgccattggccacagtccaaggactgctcctgttccgatggaggaggtggaagccggtttgctggagggcgggatcaggtggctggcggagaccatcctggataacctggacgccgacaagctggatgagtggattcgccagattaggctcgccgctgacaccgagaagctacgggctgagatcgagaaggtggatggggtggtcgctgccgtgaaggggagggcgatcgggaacaggtcgctggcccgatctctcggccgtctcagggggttgctgtacgacgccgacgatgcggtcgacgagctcgactacttcaggctccagcagcaggtcgagggaggaggtactgtctttgcatatatccgtgccttttaattaagtttgcaagctgcgttgcctgcaacaatggcgtattggcgtcagtttccaatccatgcttgtgctacagttactacacggtttgaggctgaagagacggtcggagatggagcagaggacgaggacgatattccgatggacaatactgatgtaccggaggcagtggcggcaggcagcagcaagaaacggtccaaggcatgggaacactttactaccgtagagttcactgctgacgggaaggattctaaagcacggtgcaagtactgccacaaggacctatgttgcacatctaagaacgggacatcagctttgcgcaaccatctcaatgtttgcaagaggaaacgtgtaacaagtactgaccaaccggtaaatccatcaaggtaatgctaatggagttctgaatttagtgtaaatccgttgaagtgtaaatttggcccgttacatctgcttaagatctcattctgtctctaatcttctaatagccaactcatggtcattttttttcctaatatatagtaccggtgatggtgcaccaaatgtaattagatgcaaggaaacaaaagtgaacaattgtatatatcaaatataattatatctaaaacatgagtagtgtatcaaatccaattctttcaaaaatctactatgcaaaattgagtgacaaaatctgctgccttttttttttacagaaagcaaccaattaatataagtcaaatataaaaacgctttgtagtctccaataaaatagctcattgtttcgtttatacttatgtttataaatttaaatttaaaacttaattttggagttgattttgtggttttcttttcatcctattttattttacaacatttgattttgaatagttaagaatgcgtatataaaaattttacccataagttattttttaaattgttaataaatcgtaaggataatcataagtataagtgaaacgattcgctcttcatctacttaagattgcgttatattgctgacctttctaatcgcctaaccacgatcacatgctcttccagtgccggtgagggtgcatcaaatgcaactggtaattcagttggcagaaaaaggatgagaatggatgggacttcaacacaccacgaggcagttagcacgcacccttggaacaaggctgaactttccaacaggatccaatgcatgactcatcagttagaagaggctgtaaatgaggttatgaggctatgtcgatcctcaagttcaaaccagagtcgacagggtacaccaccggccacaaatgcaacaacatcgtcttatcttccggagcccatagtgtatgggagggctgcagagatggaaaccatcaaacagctgatcatgagcaatagatctaatggcataaccgtcctgccaattgtaggcaatggagggataggaaaaaccactttggcgcaactggtctgcaaagatctggtaattaaaagtcagtttaatgttaagatatgggtgtatgtatctgataaatttgatgtagttaagattacaaggcagattttggatcatgtctccaaccagagccacgaaggaataagcaaccttgatacgcttcagcaggatcttgaggaacaaatgaaatctaagaagttcctcattgtcttagatgatgtgtgggaaatccgtacagatgactggaaaaaactactggctcctttaagacctaaagatcaggtgaattcgtcacaggaagaggcaacaggtaatatgataattttgacaactcgtatacagagtattgccaaaagtcttggaacagtacaatcaattaagttagaagctctgaaagatgacgatatatggtcactatttaaagtgcatgcttttggtaatgataaacatgatagtagtccaggcttacaggttcttgggaagcaaattgctagcgagctaaaaggcaacccactggcagcaaaaactgtgggttcactattaggaacgaatcttaccatcgatcattgggatagcattataaagagtgaagaatggaaatccctgcaacaagcttatggcatcatgcaagcgctgaagttgagctatgatcatctatccaaccccttacagcaatgcgtctcttattgttctcttttccccaagggttattctttcagcaaagcacaactaatacaaatatggattgctcaaggatttgtggaagaatccagtgagaagttggagcagaaaggatggaaatatctagctgagttggtaaattcgggtttccttcagcaagttgaaagcacacggttttcatcagaatattttgttatgcacgatcttatgcatgatttagcgcaaaaggtttcacaaacagaatatgcaactatagatggctcagagtgcacagagttagccccaagtatacgccatttgtcaatagtaactgattctgcataccgcaaggagaaatatagaaacatatctcgtaatgaggtgtttgagaaaaggttgatgaaagttaagtcaaggagtaagttgaggtcactggtattaattgggcaatatgattctcatttttttaaatatttcaaagatgctttcaaggaagcacaacatctgcgactgctgcagatcactgcaacttatgctgattctgattcatttctctccagtttggtaaattctacacatctccggtatctgaaaattgtgaccgaagaatccggcagaactttgccccgatctctaaggaagtattaccatcttcaagtactagatattggctatagatttggaattccccgtatatctaatgatataaataatcttctcagcctgcggcatcttgttgcatatgatgaagtgtgttcttccattgctaacattggtaaaatgacctcacttcaggaactaggcaattttattgttcagaataatttaagtggttttgaggtgacacaattgaaatccatgaacaagcttgtacaacttagtgtgtctcagcttgaaaatgttagaactcaggaggaggcatgtggggcaaaactgaaagacaaacaacacttagaaaagctacatttgtcctggaaggatgcatggaatggatatgacagtgacgaaagctatgaagatgaatacggcagtgatatgaatatagaaacagaaggggaggaactgtcagttggtgatgccaatggtgcccaaagcttacaacatcacagtaatataagctctgaacttgcttcaagtgaggtgctcgaaggtcttgaaccacatcacggcctcaagtatctacggatatctgggtataatggatctacctccccaacttggcttccttcttcacttacctgtctgcaaacacttcatctagaaaaatgtggaaaatggcaaatacttcctttagaaaggctagggttacttgtaaagctcgtgttgatcaaaatgaggaatgcaacagaactctcaatcccttcactggaggagcttgtgttaattgcattgccaagcttgaacacatgctcctgcacttccatcaggaacttgaactccagtttaaaggttctgaaaattaagaattgccctgtactgaaggtatttcccttgtttgagatttcccagaaatttgaaatcgagcggacgtcgtcatggttgccccatcttagcaagcttaccatctataattatcctctttcctgtgtgcacagttctctgccaccttccgcaatcagtggttatggagaatatggaaggtgtacccttccgcaatcacttgaggaactttacatccatgagtattctcaagaaactctgcagccctgcttttcagggaacctcactctcctgagaaaattacatgtactgggaaactcaaatttagtgtctctgcagctccattcctgcacagcactcgaagagttgataattcaaagctgtgagtctcttagttctctggatggcttgcaattgcttggcaatctcaggttgctgcaggcacatagatgcctcagtggtcatggagaagatggaaggtgtatccttccgcaatcacttgaggaactttacatccatgagtattctcaagaaactctgcagccctgcttttcagggaacctcactctcctgagaaaattacatgtactgggaaactcaaatttagtgtctctgcagctccattcctgcacagcactcgaagagttgataattcaaagctgtgagtctcttagttctctggatggcttgcaattgcttggcaatctcaggttgctgcaggcacatagatgcctcagtggtcatggagaagatggaaggtgtatccttccgcaatcacttgaggaactttacatccatgagtattctcaagaaactctgcagccctgcttttcagggaacctcactctcctgagaaaattacatgtactgggaaactcaaatttagtgtctctgcagctccattcctgcacagcactcgaagtgttgataattcaaagctgtgagtctcttagttctctggatggcttgcaattgcttggcaacctcaggttgctgcaggcacatagatgcctcagtggtcatggagaagatggaaggtgtatccttccgcaatcacttgaggaactttacatccatgagtattctcaagaaactctgcagccctgcttttcagggaacctcactctcctgagaaaattacatgtactgggaaactcaaatttagtgtctctgcagctccattcctgcacagcactcgaagtgttgataattcaaagctgtgagtctcttagttctctggatggcttgcaattgcttggcaatctcaggttgctgcaggcacatagatgcctcagtggtcatggagaagatggaaggtgtatccttccgcaatcacttgaggaacttttcatcagtgagtattctctagaaactctgcagccctgcttcctgacgaatctcacctgcttaaaacaattaagggtatcaggcaccacaagtttcaaatctctagaactgcaatcatgcactgcactcgaacatttgaagattcaaggttgtgcgtcgcttgctacattggaggggttgcaattcctccacgccctcaggcatatggaagtattcagatgccctggcttgcctccatatttggggagttcgtcagagcagggctatgagctatgcccacgactggaaaggctcgacatcgatgacccctctatccttaccacgtcgttctgcaagcacctcacctccctccaacgcctagagcttaactattgcggaagtgaagtggcaagactaacggatgagcaagagagagcgcttcagctcctcacgtccctgcaagagctccggtttaagtattgctacaatctcatagatcttcctgcggggctccacagccttccctccctcgagaggttggagatccggagttgcaggagcatcgcgaggctgccggagaagggcctcccaccttcgttcgaagaactggatatcatcgcttgcagtaatgagctagctcagcagtgcagaactctagcaagcactctgaaggtcaaaattaatgggggatatgtgaactgattactcggtggcttgttaggcgcacctttttccacctgcccaactggcgtgggctcgttcaggcgttcaagctgctgtaaattccattgccgcaatgacgaccttcagaaccgttacacaatacaaaggacatatgatggctagatcaactgtcgcagagctagctttggttcacctgaaaacataaggccaaacgcgtggttcttttaatcagaagtatcaaaaattggttttggtttttaacgaaaagatgttagaaattggttttaatgtgccagattctgtaccagaattctgtattttgctccgtaattctgtgctacgactgatgttgtatttaactgatagcaatcgaccggcaaaaccaatccgctccaatgcattgtcacatacaaattctataattctatctactgaaaaggatgattgctgttcattttcgtgattacagaaggaactgtgtatatcgtgctatttttgcattcacattgtgtcccaggttgtgctcggatcagccaatttcggtggttaattcactttgttgtgtcctctgtgcactcaagaattgttcgcacatgcaattcagttgagcatcgcactacgcaagttttttttgttaacaaaggagtggttgacagcattgcaggttgctaaaaccgtgtcaaaaatttgctaacaaaagaattctcttcagaaatagtatgaaaataaatgccacataagtaatctgagtaaaacagacagaatcactagagaagactaacgacaaaatcttctttttcaatttctgtggtgaaaaactcactaactccgcatataatctcatgtatgcattggaggtgcataccatttcgatcatgtatgcatttagctgaacattatcaagaagcaaatttattgcacgggcaaacataagctaaactaattctcaagcaatttaataatcacaaaacagtctgcaataccaagatatataaaacttttgccagcatggagcaacaacaccgaaacactacaatcaagacagctcccagaaaagattatatgttgctacttcaattgccacagttacaatcacccataatgacacatcaaattacataagagtattaagagtatatgacagttgtaacaaaacaactgcattgagaactagaacagacagccacatgaaccatattcacttcttcagatcagaaagcctggtgaactaccagtctaccaattgctaccgtagtctccatttttcacttatatgtacataggacacctgcgctatcagaatagccacaaagccagttcactcgctacaaattaatcttgactaaatccaaacagataccaactcctcttaatcaacttacaaaacacctacacttttggtgtctctacaccaccaatcacacaaaaggaaattaatcatccaccaactcgtatcctactgttagaatggaggccttacaccagagaatgggcattgccagattctgagacactgtcctttgagctccctga

SEQ ID NO: 401 - DNA, 3441 bp, Solanum lycopersicum
  source 1..3441: mol_type = genomic DNA
atggcatcttcttcttcttcttctgcaagtaattcaaagtattatcctcgatggaagtacgttgtttttctaagtttcagaggtgaagacactcgaaaaacatttacaggtcacttatacgaaggtttgagaaatagaggaataaacacatttcaagatgataaaagactagagcatggagattcaattccaaaagaactcttgagagctatagaagattctcaagttgcacttatcattttctcaaagaattatgctacatctaggtggtgcttgaatgaactagtgaagatcatggaatgcaaagaggaagaaaatggacaaacagtcataccgatcttttataatgtggatccatcacatgttcgataccaaactgaaagctttggagcagcatttgccaaacacgaatcaaagtataaggatgatgttgaggggatgcagaaggtgcaaagatggagaactgccctaactgctgccgcaaatctaaaaggatatgatatccgtaacgggattgaatcagagaatattcagcagatcgtagattgcatctcttccaaattttgtacgaatgcttattctttatcttttttgcaagatattgtgggaataaatgctcacttagagaaactaaaatcgaaacttcaaatagaaatcaatgatgttcggattttagggatctggggaataggcggagtcggtaaaacaagaatagcaaaagccatttttgatactctatcttatcaatttgaagcttcttgttttcttgctgatgttaaagaatttgcaaaaaagaataaactgcattctttacaaaatattcttctctctgaactgttaaggaaaaaaaatgattacgtctacaacaagtatgatggaaagtgtatgattccaaacagactttgttctttgaaggttctaattgtgcttgatgatatagatcatggtgatcagatggagtatttagcaggtgatatttgttggtttggtaatggcagcagagttattgtaacaactagaaacaaacatttgatagagaaagatgatgcgatatacgaagtgtctacactgcctgatcatgaagctatgcaattattcaatatgcatgcttttaaaaaagaagttccaaatgaggattttaaggagttggcgttagagatagtaaatcacgctaaaggcctccctttagccctcaaggtgtggggctgtttattgcataaaaaaaatctctctttatggaaaataacagtagagcaaataaagaaagactctaattcagaaattgttgaacaactcaaaataagttatgatgggttggagtccgaagagcaggaaatatttttagatatagcatgtttcttccgcggagagaaaagaaaagaggtcatgcaaattcttaagagttgtgactttggagctgaatacggattggatgttctgattaataaatctcttgtgttcatatctgaaaatgacaggattgaaatgcatgatttgattagagatatgggtagatatgtggtgaaaatgcaaaagcttcagaaaaaacgtagcagaatatgggatgttgaagatttcaaagaagtgatgatagactatacggggaccatgacagtggaagcaatctggtttagttgctttgaagaagtacgttttaataaggaggcaatgaaaaaaatgaaaaggcttaggatattacacatatttgatggttttgtcaaattcttctcttcgcctccctcttccaattccaatgattcagaagaagaagatgattcctacgacttagtcgtagatcaccatgatgactctattgagtacctgtccaataacttgcgttggttagtctggaatcactattcttggaagtcattgccagaaaattttaaaccagaaaagcttgttcatcttgaactccgttggagttcgcttcattatttatggaagaaaacagagcatttgccgtctctacgaaagctagatctcagcttatctaaaagtctggtgcaaacaccagatttcacggggatgccaaatttggagtatttgaatctggagtactgtagtaagcttgaagaggttcactattccctagcatattgcgaaaaactcattgagttaaatttgagttggtgtacaaagcttaggagatttccatatattaacatggaatctcttgaatctctggatctacaatattgctatggtataatggtgtttccagaaatcatcggaacgatgaagccggagttaatgattctctcagcaaacactatgataactgaactaccatcatctcttcagtacccaactcatctcacagagctagatttgagtggcatggaaaaccttgaagctcttccaagcagcattgtcaagttgaaagatttggtgaagctaaatgtgtcgtactgcttaacgcttaaaagcttgcctgaagagattggtgatttagaaaacttggaggaacttgatgcttcgcgtactctaatttcacagcctccatcttccattgtccgcttgaacaagcttaaatccttgaagttaatgaaacgaaacacattaacagatgatgtgtgctttgtgtttcctcctgtgaataacgggttactctcattggaaattctggagctcggttcctccaatttcgaagatggaagaattccggaagatattggatgtttatcctctttgaaagagttacgtctcgagggagataatttcaatcatttgcctcaaagcatagcccaacttggtgcacttcgattcttatacataaaagattgcaggagtcttacaagtctgccagaatttccaccgcaattagatacaatatttgcagattggagcaatgatttgatctgtaagtcactgtttctaaatatctcatcattccaacataacatctctgcttcagattcgttgtcgttaagagtgtttacgagtttggggagtagtatcccaatctggttccaccatcagggaacagatacaagtgtttcagtcaatttgcctgaaaactggtatgtatcagataacttcttgggattcgctgtatgttactatggcaatttaactgagaacacagctgaattgattatgagttctgcagggatgccatgtatcacctggaaacttttgttatcgaatcattcagaatgtacatatattaggattcattttttcttggtaccttttgctggcttatgggatacatctaacgccaatggtaaaacaccaaatgactataagcacattatgttatcttttcctcaagaattgaaggagtgtggagttcgtttgttctatgaagatgaatctgtgcttgagaccaccaatgatgaacttaccattggggtaaggaggatcagatacgacgacgacgatagtgaacattatgaggaggctggttgttcctcttctaagaaacaaagatcataa

SEQ ID NO: 402 - DNA, 2718 bp, Zea mays
  source 1..2718: mol_type = genomic DNA
atggcagagattgctgttcttctcgtcctgaagaagattgccatagctctggcaggagagaccctaagttttgctaaaccattgcttgcaaagaagtctgagtcggtggcagcactcccagatgacatgaaactgattagtaatgagctcgagcttatccgggcgtttctcaaggaaatcggcaggaaaggctggaaaagcgaagtgatagaaacatggatagggcaggtccgaagactggcttatgatatggaagacactgtagaccattttatttacgttgttggtacacacgatcagatgggatcatgctgggattacatgaagaagatagccaagaagcctcggcgtctggtttcactagatgaaattgctagtgagattaagaagataaagcaagagcttaaacaactctcggaaagtagagaccgctggactaaacccttggatggcgggagtggtatacctgcaggaagctatgaaactgaaaaggaaatgtatcttcctggacatgattacacaatcagcgacgaggagcttgcaggaattgatgaaaataagcaaaccttgattagttcattaaaatttgaagatccatcacttcggatcattgctgtctggggtatgggtggcgttggaaaaagcactcttgtaaataatgtgtacaaaaatgaaggatccaactttgactgccgtgcatgggtttctatctctcagtcatatagactagaagatatatggaagaaaatgctgacagatctcatcgggaaagataagatagaatttgatcttggaacaatggatagtgcagaactaagagagcaattgacaaaaactctagacaaaaggcagtacctgatcatactggatgatgtctggatggctaatgttttttttaaaattaaagaagttcttgtagataatggccttggaagcagagtaataatcacaacaagaattgaggaggtagcttcactagctaagggtagttgtaagatcaaagtagaacctctgggtgtcgatgattcctggcatgtattttgtaggaaggcatttctgaaagatgaaaaccatatctgccctccagagttgcgtcagtgtggtataaacattgtggagaaatgtgatggtttgccattagcccttgtggcaataggaagcatattgtcgctgagaccgaagaatgttgacgagtggaagctattttatgaccagcttatctgggagctacacaacaatgagaaccttaatcgcgtggagaaaattatgaatctaagttataaatacttaccagactatttgaagaactgcttcctgtattgtgctatgtttccagaagactatctaatacacagaaagagattgattagattgtggatagctgaaggatttattgaacaaaaaggggcatgcagcttagaagacactgctgaaagttatcttaaagaacttatacgacggagcatgcttcacgttgcagagaggaactgctttggtaggattaaatgtattcgaatgcatgatcttgtgcgtgaacttgccattttccaatctaaaagagagggtttcagtacaacttatggtggaaataatgaagcagtgctagtgggatcatattctcgacgagtggctgtgctccaatgcagcaagggcattccatcaaccattgatccatccaggcttcgcaccttaattacattcgacaccagcagagcattatctgtgtggtattcttctatttcctccaaaccaaagtaccttgcagtattagacttatcaagcttgcctattgagactattccaaattcaattggagagcttttcaaccttaggcttttatgcctcaataaaaccaaagtgaaagagctccctaaatctattacaaaacttcaaaacctacagacaatgagtcttgagaatggggagttagtgaagttcccacaagggttttcaaaactgaagaaattgcgacatcttatggtttcacggttgcaagatgtaactttcagcggtttcaaaagttgggaagctgtggagccatttaagggcttgtggactttgattgaactgcaaactctgtatgccattacagcaagtgaagtattagttgcaaaacttggaaatttatcccagctgaggcggcttataatttgtgatgtaaggagtaacttatgtgcacagttgtgtggctctttgtcaaagttgtgccagctgtcacgattaacgataagagcatgcaatgaagatgaagtgctacagctggatcatttgacatttccaaatcctcttcaaacccttagtttagatggacgactgtcagaaggaactttcaaatctccctttttcttaaatcatggaaatgggcttcttaggctaatgttgttttacagtcagctttcagaaaatccagtaccacacctctctgaattgtcaaacttgactaggttatcccttataaaggcatacaccggccaagaattatacttccaagcaggttggttcctgaatttaaaagaactttacttgaagaatttgtcccggctcaatcaaatagacatacaggagggagctttggccagccttgaacgtataacaatgaaacacctcccggagctacgggaggttccagtcggtttcagatttctcaagtccctaaaaacaatatttttttccgatatgcatcctgagtttgaaagcagctttcaaaaggaaatgtag

SEQ ID NO: 403 - DNA, 1005 bp, Oryza sativa
  source 1..1005: mol_type = genomic DNA
acattggtagtagtgcaatgtcagagcttcaatcactgccagacctcaatagactatcactagtgaaccttgaaaaggtttcagacactgaagatgcaagaatggcaaaacttcaagagaaagaaaagctcgagacattgatgttgaggtggaatatggatgctggaaatgccagtagaatagatcatgaagtacttgaaaccctccaacctagccagtgcctgaaaactttggagattgttgcgtatgaaggatatgtatttccatcttggatgacaagaaccgagccatatcttacatctctggttgagataagactagttaatatgagagcatgtgaaaaggcattacctccacttgggatactaccatgtctgaagattgcagagataagtggagttgataatctcagttctattggtgataatttctatggtcataacggcacattcccttcactggagaagctgattctatcatacatgacaagccttgaagtctgggaacagtcatctaggatgaatctgtttcctcgtcttgcagaacttgtcatcattcagtgcccaaaattgagagcactgcatatggagtttccatcgattgaaaagttgattttgtggatgaataacaagatgttgtacagctcgaaggaaggtatgagaggtgtagagaagagcctcgaaaatctttcaatttctttctgtgaagagttgcatgcttcttcaggctgtgagggtctacaggctcttgatcgcctcaagaagttggagatatgtggttgtcatgaattatcatgcctcccacagggtttgcagcatctttcctctctcaccagcttgaaaattgataactgcaacaaattggagattttgccagaatggttggagaacctaccttttctacagataatgtgtttgtctggctgtccaattctgcactccattcctgaaggcctaacatgtagcgacattattgttgaagattgccccaattttaaagaaccat

SEQ ID NO: 404 - DNA, 3102 bp, Oryza sativa
  source 1..3102: mol_type = genomic DNA
atggcggagacggtgctgagcatggcgaggtcgctggtgggcagtgccatcagcaaggccgcctctgccgctgccaatgagacgagcctcctgctgggcgtcgagaaagacatctggtatatcaaagatgagctaaaaacgatgcaagcattccttagagctgctgaacttatgaaaaagaaagatgaactattaaaggtttgggcagagcaaatacgtgacctgtcatatgacattgaagattcccttgatgaatttaaggtccatattgaaagccaaaccctatttcgtcagttggtgaaactcagagaacgccaccgaattgctatccgtatccacaaccttaaatcaagagttgaagaagtgagtagcaggaacacacgctacagtttagtcaagcctatttcctctggcacagagattgacatggattcctatgcagaagacattcgtaatcagtcagctcgcaatgtggatgaagctgagcttgttgggttttctgactccaagaaaaggctgcttgaaatgatcgataccaatgctaatgatggtccggccaaggtaatctgtgttgttgggatgggtggtttaggcaagacagctctttcgaggaagatctttgaaagcgaagaagacattaggaagaacttcccttgcaatgcttggattacagtgtcacaatcatttcacaggattgagctacttaaagatatgatacgccaacttcttggccccagttctctggatcaactcttgcaagaattgcaagggaaggtggtggtgcaagtacatcatctttctgagtacctgatagaagagctcaaggagaagaggtactttgttgttctagatgatctatggattttacatgattggaattggataaatgaaattgcatttcctaagaacaataagaagggcagtcgaatagtaataaccactcggaatgttgatcttgcggagaagtgtgccacagcctcactggtgtaccaccttgatttcttgcagatgaacgatgccataacattgctactgagaaaaacaaataaaaatcatgaagacatggaatcaaataaaaatatgcaaaagatggttgaacgaattgtaaataaatgtggtcgtctaccattagcaatacttacaataggagctgtgcttgcaactaaacaggtgtcagaatgggagaaattctatgaacaccttccttcagaactagaaataaacccaagcctggaagctttgaggagaatggtgaccctaggttacaaccacctaccatcccatttgaaaccatgctttttgtatctaagtatctttcctgaggattttgaaatcaaaaggaatcgtctagtaggtagatggatagcagaagggtttgttagaccaaaggttgggatgacgactaaggatgtcggagaaagttactttaatgagctaatcaaccgaagtatgattcaacgatcaagagtgggcatagcaggaaaaattaagacttgtcgaattcatgatatcatccgtgatatcacagtttcaatctcgagacaggaaaattttgtattattaccaatgggagatggctctgatttagttcaggaaaacactcgccacatagcattccatgggagtatgtcctgcaaaactggattggattggagcattattcgatcattagctatttttggtgacagacccaagagtctagcacatgcagtttgtccagatcaattgaggatgttacgggtcttggatcttgaagatgtgacattcttaatcactcaaaaagatttcgaccgtattgcattgttgtgccacttgaaatacttgagtattggatattcgtcatccatatattcacttcccagatccattggtaaactacagggcctacaaactttgaacatgccgagcacatacattgcagcactaccaagtgagatcagtaaactccaatgtctgcatactcttcgttgtataggacagtttcattatgacaactttagtctaaaccacccaatgaagtgcataactaacacaatatgcctgcctaaagtattcacacctttagttagtcgcgatgatcgtgcaaaacaaattgctgaattgcacatggccaccaaaagttgctggtctgaatcaatcggtgtgaaggtacccaaaggaatagataagttgcgagacttgcaggttctagagtatgtagatatcaggcggaccagtagtagagcaatcaaagagctggggcagttaagcaagctgaggaaattaggtgtgacaacaaacgggtcgacaaaggaaaaatgtaagatactttatgcagccattgagaagctctcttccctccaatctctccatgtggatgctgtgttattctcaggtattattggaacacttgagtgcctagattctatttcatctcctcctcccctactgaggacactcgtgttggatggaattcttgaggagatgcctaactggattgagcagctcatgcacctgaagaagatctacttattgagcagcaaactaaaggaaggtaaaaccatgctgatacttggggcactgcccaacctcatggtccttcatctttatcggaatgcttaccttggggagaagctagtattcaaaacaggagcattcccaaatcttagaacactttggatttatgaattggatcagctaagagagatcagatttgaggacggcagctcacccctgttggaaaagatagaaataggcgagtgcaggttggaatctgggattactggtatcattcaccttccaaagctcaaggagattccgattagatacggaagtaaagtggctgggcttggtcagctggagggagaagtgaacgcacacccaaatcgccccgtgctgctaatgtacagtgaccgaaggtatcacgacctgggggctgaagccgaaggatcttctatagaagtgcaaacagcagatcctgttcctgatgccgaaggatcagtcactgtagcagtggaatcaacggatccccttcccgagcaggaggagagagctcgcagtcgcaggtgatcacgttgacgacgaatgatagcgaagaagataggcacagctcaagctggctga

SEQ ID NO: 405 - DNA, 4288 bp, Oryza sativa
  source 1..4288: mol_type = genomic DNA
caccgagtgtgagcggcaacggcggtcagggagcaggcgtggctcgtcggcgagcggctacgggcaacggcgccttggcgtcaggcatccgccgtcactcacctcaagcttgcgggctctgcgaccaccctctcatagtcataggccacagaagcacatttgccttgtgcgtgctgttcgtctgttccactcgtgaacatcagacgcgaagattatagattcacccctgttcacagattcaggtctgtcacgaggcgtatgatcatcaactctgccacaaaatccattcaaaaatagaacagagcaatggaggcgacggcgctgagtgtgggcaaatccgtgctgaatggagcgcttggctacgcaaaatctgcatttgctgaggaggtggccttgcagcttggtatccagaaagaccacacatttgttgcagatgagcttgagatgatgaggtctttcatgatggaggcgcacgaggagcaagataacagcaaggtggtcaagacttgggtgaagcaagtccgtgacactgcctatgatgttgaggacagcctccaggatttcgctgttcatcttaagaggccatcctggtggcgatttcctcgtacgctgctcgagcggcaccgtgtggccaagcagatgaaggagcttaggaacaaggtcgaggatgtcagccagaggaatgtgcggtaccacctcatcaagggctctgccaaggccaccatcaattccactgagcaatctagcgttattgctacagccatattcggcattgacgatgcaaggcgtgccgcaaagcaggacaatcagagagtggatcttgtccaactaatcaacagtgaggatcaggacctaaaagtgatcgcggtctggggaacaagtggtgatatgggccaaacaacaataatcaggatggcttatgagaacccagatgtccaaatcagattcccatgccgtgcatgggtaagggtgatgcatcctttcagtccaagagactttgtccagagcttggtgaatcagcttcatgcaacccaaggggttgaagctctgttggagaaagagaagacagaacaagatttagctaagaaattcaatggatgtgtgaatgataggaagtgtctaattgtgcttaatgacctatccaccattgaagagtgggaccagattaagaaatgcttccaaaaatgcaggaaaggaagccgaatcatagtgtcaagcactcaagttgaagttgcaagcttatgtgctgggcaagaaagccaagcctcagagctaaagcaattgtctgctgatcagaccctttacgcattctacgacaagggttcccaaattatagaggattcagtgaagccagtgtctatctcggatgtggccatcacaagtacaaacaatcatacagtggcccatggtgagattatagatgatcaatcaatggatgctgatgagaagaaggtggctagaaagagtcttactcgcattaggacaagtgttggtgcttcggaggaatcacaacttattgggcgagagaaagaaatatctgaaataacacacttaattttaaacaatgatagccagcaggttcaggtgatctctgtgtggggaatgggtggccttggaaaaaccaccctagtaagcggtgtttatcaaagcccaaggctgagtgataagtttgacaagtatgtttttgtcacaatcatgcgtcctttcattcttgtagagctccttaggagtttggctgagcaactacataaaggatcttctaagaaggaagaactgttagaaaatagagtcagcagtaagaaatcactagcatcgatggaggataccgagttgactgggcagttgaaaaggcttttagaaaagaaaagttgcttgattgttctagatgatttctcagatacctcagaatgggaccagataaaaccaacgttattccccctgttggaaaagacaagccgaataattgtgactacaagaaaagagaatattgccaaccattgctcagggaaaaatggaaatgtgcacaaccttaaagttcttaaacataatgatgcattgtgcctcttgagtgagaaggtatttgaggaggctacatatttggatgatcagaacaatccagagttggttaaagaagcaaaacaaatcctaaagaagtgcgatggactgccccttgcaatagttgtcataggtggattcttggcaaaccgaccaaagaccccagaagagtggagaaaattgaacgagaatatcaatgctgagttggaaatgaatccagagcttggaatgataagaaccgtccttgaaaaaagctatgatggtttaccataccatctcaagtcatgttttttatatctgtccattttccctgaagaccagatcattagtcgaaggcgtttggtgcatcgttgggcagcagaaggttactcaactgcagcacatgggaaatctgccattgaaatagctaacggctacttcatggaactcaagaatagaagcatgattttaccattccagcaatcaggtagcagcaggaaatcaattgactcttgcaaagtccatgatctcatgcgtgacatcgccatctcaaagtcaacggaggaaaaccttgtttttagggtggaggaaggctgcagcgcgtacatacatggtgcaattcgtcatcttgctataagtagcaactggaagggagataagagtgaattcgagggcatagtggacctgtcccgaatacgatcgttatctctgtttggggattggaagccattttttgtttatggcaagatgaggtttatacgagtgcttgactttgaagggactagaggtctagaatatcatcaccttgatcagatttggaagcttaatcacctaaaattcctttctctacgaggatgctatcgtattgatctactgccagatttactgggcaacctgaggcaactccagatgctagacatcagaggtacatatgtaaaggctttgccaaaaaccatcatcaagcttcagaagctacagtacattcatgctgggcgcaaaacagactatgtatgggaggaaaagcatagtttaatgcagaggtgtcgtaaggtgggatgtatatgtgcaacatgttgcctccctcttctttgcgaaatgtatggccctctccataaggccctagcccggcgtgatgcgtggactttcgcttgctgcgtgaaattcccatctatcatgacgggagtacatgaagaggaaggcgctatggtgccaagtgggattagaaaactgaaagacttgcacacactaaggaacataaatgtcggaaggggaaatgccatcctacgagatatcggaatgctcacaggattacacaagttaggagtggctggcatcaacaagaagaatggacgagcgtttcgcttggccatttccaacctcaacaagctggaatcactgtctgtgagttcagcagggatgccgggcttgtgtggttgcttggatgatatatcctcgcctccggaaaacctacagagcctcaagctgtacggcagtttgaaaacgttgccggaatggatcaaggagctccagcatctcgtgaagttaaaactagtgagtactaggctattggagcacgacgttgctatggaattccttggggaactaccgaaggtggaaattctagttatttcaccgtttaagagtgaagaaattcatttcaagcctccgcagactgggactgcttttgtaagcctcagggtgctcaagcttgcaggattatggggcatcaaatcagtgaagtttgaggaaggaacaatgcccaaacttgagaggctgcaggtccaagggcgaatagaaaatgaaattggcttttctgggttagagtttctccaaaacatcaacgaagtccagctcagtgtttggtttcccacggatcatgataggataagagccgcgcgcgccgcgggcgctgattatgagactgcctgggaggaagaggtacaggaagcaaggcgcaagggaggtgaactgaagaggaaaatccgagaacagcttgctcggaatccaaaccaacccatcattacctgagctcctttggagttactttgccgtgctccatactatcctacaagtgagatcctctgcagtactgcatgctcactgacatgtggacccgaggggctgtggggcccacatgtcagtgagcagtactgtgcagtactgcagaggacctgcatccactatcctatattataatggattgtactatcgatccaactattcagattaactctatactagtgaacttattttt

SEQ ID NO: 406 - DNA, 11516 bp, Oryza sativa
  source 1..11516: mol_type = genomic DNA
aagcttgaaagtgtgtgaagaaatgaagaaagtgaagtctacttataggacaggtataacggttatgagaagtggaaatgtccgaactgccccgcaaccgccatcagggagtgatctggagcgtccacgccaaaccccaggatcaacggtgatcaccagggttcggctgaacctgggctgggccagatggcttccaaacctagtctgggtctcctcctcgacctgccttatccaattcttgcaattttgggatgtttctttagtagtttaaaagcccattcttgcattgatagatttctccttcacttttagtctggatttcctcccaacttctgggtttatcacctgcataaaaatatacatcaacaattgtggaatatgtgagttttaacacctatcactatgttggatattttattatctggactttatgcagacgttgacggtatagatttggcatttaacagtcgccaacattatacaatcgggtaaatagtattgatgtattccatgaatctgtgtatagaaggtatgccatatccttgacactgacaccatatgtgtttccgtttttgagaaaacatttccatttccaaaaatttctgaccaacactctctatttccgaaaactcatctgaaatccgaaaacttttcaaaccgttttcatcccagtaatgaatggcaggctctacgtgcagacccacaaatgctccacaaagatctcaaaaaatttatcgtataaatttcatacgtagactaaatttcacaaaaattcacttgtgtacccattgaggtatgtattttgttttcaaaaaaaaacacagtttaccttgtggtgctcgggacatcggccggagctcatgatcataatggagtcagtcagggtggctactggagcttatggcggaggaggtcagggtggtgggacgtggggcagagtttagtccggtcggcaaccagagctccgagaggagatctgggcagtagtgagagaagggtcaggaggcgccagagtggccacgacggaggctgggaaagcgatgccgaacagcaaagcatgcgttgaagtaggcggggtggcagcagcctcggggcggagcgggcatggaacaagggtagagctggagtcggtggccggctactgagaccattcacagtgcgtcaccaagttttgatattcttcacatgccacgtagatcagagcggtattagccacatgttacatagtgcaaaactctacaagaccacatatgggttgcttgtagtgggtcccactaataccacttttacacttctctttttacttttcccctctcctctctcccctctcttcctttccccaccggccaccgcagagagccgggcggagacggaggttgcgggggtcgggcggagcggcggctcaagcggaggtcgtggaggcgagcaggagacggcgccgggccgagtggcgacggcggtggggcctagcaccgtgcctcccctcctcctcctcctctagtggtggcgaatcgaggaagccgccgccgccgcgccccacctcttcatctgatgcgggcgggaagctgccgccaccgccgtcgggcagatccagatctccggcctccgtgtcgggcggctacgcggcggcgggcgtcggcgtcggtcagcgccctcctcacctggccagcccaccgactagccctaccgtcgtcatcatccctggtcagcaccctcctcccctggcattcggctgcctcacccctctcctctctctcctctagcggtggtgtgggtcccacctgtgggtccctctgagacgaagaacgcgtagtcaactttggctacgcgcggagctgaggaacgcacacgattggataaagtggcaaaggaatatttgcttttttggttgaggctaaatgctacgtagatctactgtgaatggcctgatggcgcagcggctctcttgcgggacagagtgggacgtgcacgacgagaaatttcctcttgcatgaataacccacggatgtaggcctccttaactaggagctacgaggtgggatttgggaggctttttctatttcaaggcttaaagcctatccaatatgatctctaatcttaaaatttagtgtttatttttgaaaaaaagttggctccaataattttcctaattagcttccaaaaattggaatcttactccctatccttctcgctctccactagtggagaagcgtgctagttcttaacacacgcatgggtggagggatcacatggatattatggaaatatcctcatggactggtgattaacatagtcctactaggagagaattgagtttattctatatcgttatcgacgtttggtatcacgactacgttatttggatggtatggggatcatcggtactagagtatatgcgagattgaggtaaaagagatggagacagatatttttatactggttcgccccttatctaacaggtaatagccctacatcctgttggctaaagccggtattgctcttattcatctgaatcgcacaagtataatatttaggataacctgtctagctgtcatcgacttggcggcatggataaccaactcgtagtcgatgacggggtagtatttctcttcgaatatgaactcgtcgagatcagagatggctctagatctctcttgccggtctcaggaggcaccagatggggtatgcctaggctaatctctaatgtcgatatttagcggcgtattggcttgtgtgtatgttatgtgttgtggctcgtcatctctcctcctagggggcttgtatttatacccatagatgcccccttgtctaagtagaactagggagataaatatggatacgatccgagtagtccttgtcgtttccatatagaactctttttgtcctttcttatccgaaactccttttatatacgaggtatgattccatataagacatggtatatggtgggccctgccgagcttagtcaggaatgtggtatccacaaccctgacaatcatgcagggttcattgtctccgagttctacgcggagactaagacaactcaaggtataaaaggcgcactctctaaggggttcaaaagagcaaatcatagcacgaacacacccaccatagtttacgaagccagaggctgtgaagcctactcgccaggagatcttgtcgactcatctcgacaaggatctcgccggtaacgctggattcatctcttctctttgtactccgtggtttccatatcaatctcatataaactggattatggttattatcttacgaggggtctaaaccagtataatctttgtctctctgattgttttaatatcgtatcatgtagatcctcataccaacttaccctaatacactatttatccgatctacaggtatcccctatcgacaataggtatataagatattataaaaaagatggagacatatgtgagctgatgatttaggctgcattcgttgcagcttctttccaacccatctccctcgttttccgtgcgcatgcttttcaaactgctaaacggtgcgttttttacaaaaagtttatatacgaaagttgcttaaaaaaatcatattgatccattttttaaaaagatagcaaaaaattaagtaatcacacgctaatggactactctgttttccgtgccggaggatagctttcccaacccagggaaacgaacccaaccttaggtgtgttcattgctaggtgttcccaacccctctcccttatattccgtgcgcatgcttttcaaactgttaaacggtgtgtctctttttaaaaaatttctatacgaaagttgctaaaaaaatcatatcaatacatttttgaaaaaaaaagctaatacttaattaatcacgtacgtactaatagaccgcttcgttttctatgcgcagaagatttgttcccaacccccacaacaaacacagccttaacatgcttgcatttaaaaagctataaaatttaataaattataaaattatagataatataacatgcttacttgatgtgacactttacctgttaagttttaggagtcggtgtttagattcaaactttttttttcaaacttccaacttttccatcagatcaaatgtttgggcacatgcattcagcaataaatgtggacaaaaaaaaaccagttgtacagtttgcatgtaaatcacgagatgaatcttttgagcctaattacgtcatgatttgacaatgtggtgctaaagtaaatatttactaatgacagattaattaggtttaatagatttgtctcgcagtttacaggcgaaatatataattttttttgttattagtttatatttaatacttaaaatgtatgtccatatacttaaaaaaattttgtaccacgaactaaacacagccaagtggactctaactctctctctctctatatatatatatatatatatatagtaatgtgttcgtatgtcctggatagaaactcatttcctccgcatagaaaacggagcggtctattaatacgtgattaattaagtattagctatttttttcgaaaataaattaatttaattttttaaataacatttatatagaaactttttaaaaaacacgttgattaaccatttgaaaagcgtgcgtgcacgcggcgtgaaaaatgaggcagagatgttgtgaaaaggagtgccgaacacagtcaaagcctcaggtggtgtttggatccagggacttaacttaaactttagtccctatatttagacactaatttatagtattaaatatagactacttataaaactaattacataaatgaaagctaattcacgagacaatttttttaagcctaattaatccataattaaagaatgtttactgtagcatcacataggctaatcatggattaattagacttaatagattcatctcgtgaattagtccaagattatagatgggctttattaatagtctacgtttaatatttataattaattttcaatccaatatgataggacttaaaatttagtcccatctacagggtcagaggattcggtcggtctcagggcagtcctctccgtataacgcagcgcccgatattttttatgggcataaatagtctgattgctactgtagcattttgttcaactaactccccaatgggcaatggctagtcgtcgagtgtcagtagtcaagagtagactccgcttcgcttcgccgtaccttctctcttctcgttctcctatttcacaaatcacaaccggattgctttcttccttcctccggtctggtccccaacctccgcggcagccatggttggcgccgagatgcttgtggccgcggcggtgagccaggtcgcccggaagatcaacgacatcgtgggggtcgcgcagggcgaggtgaagctgtgctgcaatttcagcgacgatttggagggcatcaaggatacccttgtgtacctggaaaccttgctgaaaaatgcggagaataactccttcggaagcgacagggccaacctgcgccactggcttggccagatcaagtccctggcttacgatatcgaagatatcgttgatgggtactactcttccaaggagcagttcgatgggggcagctatgcacagaaggtaacagaatctcattcctttttcttcatcggtaaaatttcttcaatttcaactcaattttagaatgccccgcaaaaaaaaaatcaattttagaatggatctacattaatgagatgtagaggtgtattactatgggcaggggaagcaccgtgtgtgcatccttagttactgcataggcaataagttatcctttccattgtccaaaaaaattttgaagcaaggaggaaaagcttgaagcttagtcttttagttttttctttttgattattttgttatttatctcagttatgagattaggagtgtatatgcactcgtgtagcttttgtctgtgtgtggatatagaggctggatttctatccattatcttaaataaattgtccaagaaatttatcaggggaaatgcagttagatgcaccattagaattgcttcattgcctgtggaagagtggaacagctctgagaattgtgattatgttttatatatttaaacaatattgattactagtactagatttactctctttttttttccttatgaaattccttgatactggtagtagtgagagataaacctaataattacatgccacatacctgtagattgtactatacttcaacacccttttgcaaatagtgagagataaacctaatacttacttacatgccacatcgtcagagcactcaattcttttttgttttggtaagcaatcagcttttgcctttacatagacaaaaattgatcgacgaatattttgaaaaaaaaaacctttgtatttatatggaaaagaaaatgcaaggtactttaccaaacaattgtgcatctatgatctatctgctatgtaggggttgataccggccttggttccttgctgcaccaactgttatttacctatctccatttttgttcttccagcaacaatagtatcaaaatactaaatgtctttcctgactaaggctaccttcataaatttacaggggtcattattctgctcgctatccaatccaatgcttctgaaaggtagcatggtttataagatgaaatccaagagagagatgctacagcaaagccaacagttgcccaatcagtatcatttcctttcatatatcaattcagctgtgcattattttgaggagaagcaaacaacatcatacagaaatactgacattgcaattgtcgggagggatgctgatttggatcatctcatggatcttttaatgcaaaacagcgctgaagagctttgtattatacccatagttgggcctgtaggttttggaaagacaagccttgcacagttagttttcaatgatacaagaacagaggtattcagctttaggatatgggttcatgtttccatgggtaatatcaaccttgaaaaaattgggagagatatagtttcacaaactacagaaaaaattgagggaaatatgcagctgcagtcaatcaagaatgctgttcagcgtgtgctaaataaatatagttgcttgatcataatagacagcctttggggaaaggatgaagaagtgaatgaattgaagcagatgttgcttacaggtagacacacagaaagcaagatcatagtgaccactcatagcaataaagtagctaagctgatttccaccgttccactgtacaagttggcagctttatctgaggatgattgtttaaaaatattctctcaaagggcaatgacaggtccgggtgacccgttgttcagggaatatggagaagaaatcgttagaaggtgtgaaggcacacccttggtagccaattttctcggttctgtggtgaatgctcaacgacaaaggcgtgagatttggcaagctgcaaaggatgaagaaatgtggaagatagaggaagattatccccaagacaaaatttcaccactatttccatcattcaagataatatattataatatgccccatgagctaagattatgctttgtatattgttcaatcttccctaaaggaactgttatagaaaagaagaaacttattcagcaatggattgcacttgacatgattgagtccaaacatggaaccttgccacttgatgtaactgcggagaaatatattgatgaacttaaagcaatctatttccttcaagttttagagcggtctcaggtaagttcatgggttgctttttaccttctgtacatatcctatgtaactagaatgtggttaaatatctccattaagcatagtagcttataccattgttttatttctaaattctcaataagtttctgtaagaagattgaccatgatagaatggccaatagtgatatctcaacaaacaagtaacactgttttcctccacagaatgatgcagaaagatccagtgcttctgaggaaatgcttcgcatgcataacttggctcatgatcttgctagatcggttgctggtgaagatatccttgttattttagatgccgagaatgagcgcaatgccagatattgcaattaccgttatgcacaggtgtctgcttctagtttagagtcaatcgatcgcaaggcatggccttccaaggcaaggtcactaattttcaagaatagtggtgtggactttgagcatgtcagtgaagttctttcagtgaacaaatacctgcgtgttttggatctcagtggatgttgtgttcaagatattccatctcctatctttcagctgaaacaattgagatacctcgacgtttcatctttatctattacagcactccctctgcaaattagtagctttcataagttacaaatgttggatctttcagaaactgaactaacagagttgccaccctttataagcaacttaaaaggactgaattatttgaatctccaaggttgccagaaacttcaacgattgaatagccttcatttgttgcatgatctacattacctaaacttgtcatgctgccctgaagttactagttttcctgaatctattgaaaatctgaccaaactccgtttcttgaatctttctggatgctctaagctttcaacattacctatcagatttttggaatcatttgctagcctctgttctttggtagatcttaacttaagtggctttgaattccaaatgttgcccgacttttttggcaacatatattcacttcagtatttaaatctgtcaaaatgtttgaaacttgaggtattaccacaatcttttggccaacttgcatatctgaaaagcctaaatctttcatattgttctgatcttaaactgctggaatcctttgaatgccttacctctcttcggtttttgaatctctcgaactgctctaggcttgaatatttgccatcatgctttgacaagcttaataatttagagtctctgaatttatcacaatgtcttggacttaaagcactacctgaatcacttcaaaaccttaaaaatcttcagcttgatgtttctgggtgtcaggattgtatagtacaatccttttctctaagtaccagaagttcccagtcctgccaacggtcggagaaagctgagcaggtcagatcaagaaacagtgaaatttcagagatcacttatgaggaacctgctgagattgaacttttaaagaataatccaagtaaagatttggcctccatctcacacctaaatgaggatagaattgaggagcctgaagttgtcactgaggtaaacttacattttattaaagaaataaaaacaatttgcctagtgtttcctttgaaatttccttatgtcaatacttaatttatctttgatagatttgagttactggtgattgagaaagttgtatgccaatttgaaccagtttctcactaccaactgaaaatgatgacgaacggaaactttattgtagttgtgctcgaattgaagatcccttttctaatgaggtgatctaattgggtaccagaacatgaatcatacttttttcagtagttcttaacatttcgtagagaaaatacatgagtgttccttcaattaaaaaactccctagaggccagcaagttataaatttaaatgggattctccttattacctagatttatgttttcagaaaattttgtaatatcatactaactaattgtccatgtccttgtttcttgatgtagccaagtgcaactagaggtatggtacaacagattccaggaaaccagctctcatcgccttcatctcatctttcttcctttgcatcaagctcagcgccatttgcatcctcctcttcggacacctcaacaagtgagcatccagtgcctaatgaagaggcggcaggtatggtacttcaaataattttctcccgatttaatcatctcaagatgaggttcacttctttatttgaatataccattataaggaaatagatcatgcgccctcttgtttaaaggaatttgatgtttttttatattcgctctctttgagatatacctgtcatccagcagtggtaaaaaggatagtatatagctgacaaatatgttcatataatttccttgtgggtaattttgatattctctttctatcttaatacgtgttatgagcaccggctaatgaccgaatggggtatgaatggaacaccggaggtcgaggcttttggcagcctcttcgacgtctggcccatgatcggcgacgaaagcaaaagcaggggatgagagagtagagaattggagacgagactatagattgaatcttgcttggttcattcatgatttcgtggcccttaattaggcttacgattgaactgaattagctaataaaaaaggataacaaagtcttctctaaatgtaagcaatcggatcactatcgctcgtccggcatgccgcgtcagttttcagctcgcgtgatctccttcgacgccgcttggaccggttgctgcatccgcgtagttgcgtttcttcatgtagacgattccgaccctttacattacaactacttggaattctttgagtgttctaaaataatttggatagtggtacatatgtggttacattttcttaatggtgacatatagccaagttggactaagattaattttaatttgtgtggaatgagaaagagtcaagacagtttgatacgtagaagtttgcatattcagaaccttatactggtttgtcttggtttattttcttgacaatgcagctttgacagttcctcggtccaaagagaaatgcgacaacactcccatgccggtaaaagatggcctgatatctgaagatgatgcaccggtacatctgcatcagaagcccctgcaggcgacagccatggcagccatatgactgacctgtaatcctacaagaaaccaactgaagattcatatgtggactgagtgaaattatgaaagttattggaataaattgttgctctgtatgtgagagcaagcttcagtccgttagcctggttccttttagtagtgttctactattgggagatcttcatcaacattttacatgaaacgtgatgtaatgaacctctgttaattgttaattgtcagagctctagttttttgtggtataaattttgttgcaagggggcaatgcactcaacttttgaatcatttgattggtatggaaatcattgcatttgtgcagagttcaggcagagttcagttcttgcatttgcacatcgtattactattacctggccttgtttggcacatctccagttccagctccacctctcctagagctggagctcagccaaacagtttcagctccaccgaaaatgggagcggagctgggtggagcactctaacaaaatgaactagagaggtggagctaggttaagctgttccacaactccacttcagatctaactcctaaagttaaatttaaaagttgaagctctaccaaacgagaaaacggacgatatgccactgtataggttgggttcgaatgaaatgccactcaatacaatgtatcggataaaatgccactcaatacgttgcctattggatgaaatgccac

SEQ ID NO: 407 - protein, 1388 aa, Malus x robusta
MGGEAFLVAFLQVLVDKLAHREVFKYFGLVKGVDQKLKKWSATLSAIGAVLNDAEERQLTAKNNTLKLWLEDLRDLAFDVEDVLDKYATKMLKRQIQHAHSRTTSKLWNSIPDGVFNFNMNSEIQKISERLQEISEQKDQLNLKIDTGALTTRARRNISPSSSQPDGPVIGRDEDKRKIVELLSKQEHRTVNFDVVAIVGMAGVGKTTLAGQVLNDMVATQTFQPAVWACVSDDFNLERVTKQILESITSRQCTTEDYNKVQDYLHKELAGKKFLIVLDDVWKTCSYGEWMKLQSPFRDGAQGSKIIVTTRDTDVSKMMGAATLVHNLEPMESSVCLQVFEQHAFLNSNDDKPPNYELLKEKIAAKCRGLPLAARTLGGVLLRKDTYEWEDILNNKLWSLSNEHDILPVLRLTYFYLPSHLKRCFAYCSILPNDYEFEEKQMILLWMAEGFILPRPEDKKQIEDLGADYFRDLVSRSLFQKSTKCISKYVMHDLIGDLARWAAGEICFRLEDKQNDDGEQLRCFPKARHSSYIRGLSDGVKRFEVFSELKYLRTFLPLRKDSFWNYLSRQVAFDLLPKLQYLRVLSFNCYKITELPDSIGDLRYLRYLDLSYTDITSLPKSTSTLYNLQTLILEGCSKLKALPIDMSNLVNLRHLNNSNVSLLEDMPPQLGRLVNLQSLTKFVVSGGGGGDRSGIRELEFLMHLRGTLCISRLENVTDVEDAQRANLNCKERLDSLVLEWSHSSDTRETESAVLDMLQPHTKLKELTIKSYAGKEFSSWVGVPLFSNMVLVRLEECNNCLSLPPLGKLPHLKELYIRGMNAVESVGAEFYGECSLPFPLLETLEFVDMQHWKVWLPFQTDHRGSVFPCLKTLLVRKCSKLEGKLPENLDSLASLEIVKCEELLVSIANYKQLRQLNIDGCKGVVHTAAKVEFELLESLYLSNISELTSLQTGELCRNGLNMVRDLKINGCEELTSSLKNEAILLQQLISLGRLEIEDNSLLVEELGKEADELLQLQILGCKLEFLKLKKCKNLLKLPEGLNQLSSLQELRIHECSSLVSFPDVGLPPSLKDIEITECHSLIYFAKSQIPQNLRRIQIRDCRSLRSLVDNEAVGSCSSSSHNCLEYLNIERCQSLTLLSLSDQLVRALRELDIYDCEQLEFLAPDGLFCNNTNYFLENFRIRRCQNLKSLPRLSGGIRGSNLREIRITDCDRLEALPEDMHNFNSLEKLIIDYREGLTCSFPANLTSLMIWKVKSCKSLWELEWGLHRLTSLRYLWIGGEDPDMVSFPPDMVRMETLLPKSLTELSIGGFPNLKKLSSKGFQFLTSLESLELWDCPKLASIPKEGLPLSLTELCIYGCPVLKERCQPGKGRYWHKISHIPYIDIDWKMI

SEQ ID NO: 408 - protein, 16 aa, synthetic construct
MWVLCLFCWPTYTHGS

SEQ ID NO: 409 - protein, 6 aa, synthetic construct
MHMYLK

SEQ ID NO: 410 - protein, 10 aa, synthetic construct
MSYKLHVVPW

SEQ ID NO: 411 - protein, 7 aa, synthetic construct
MSATPQV

SEQ ID NO: 412 - protein, 8 aa, synthetic construct
MRKHNWHI

SEQ ID NO: 413 - protein, 29 aa, synthetic construct
MRKHLQHTYILSFSLSLSLIPAQLCGRRE

SEQ ID NO: 414 - DNA, 66 bp, Dichanthelium oligosanthes
  source 1..66: mol_type = genomic DNA
aatttaactccgcctatgttgtctcaacatagccggtcccaagcccggataaaggaggagggggtt

SEQ ID NO: 415 - DNA, 61 bp, Solanum lycopersicum
  source 1..61: mol_type = genomic DNA
cttgtaactccgcctgtcaagtcacagccggtcccaagcccggaaaaaggaggagggcaag

SEQ ID NO: 416 - DNA, 52 bp, Sorghum bicolor
  source 1..52: mol_type = genomic DNA
tgcttaacactgccaatgccggtcccaagcccggataaaagtggagggggca

SEQ ID NO: 417 - DNA, 52 bp, Sorghum bicolor
  source 1..52: mol_type = genomic DNA
tgcctaacactgccaatgccggtcccaagcccggatagaagtggagggggca

SEQ ID NO: 418 - DNA, 52 bp, Sorghum bicolor
  source 1..52: mol_type = genomic DNA
tgcctaacactgccaatgccggtcccaagcccggataaaagtggagggggca

SEQ ID NO: 419 - DNA, 80 bp, Oryza sativa
  source 1..80: mol_type = genomic DNA
tatgtaactccgcctatgtcatcttaagtttatctaaatgatatagccggtcccaagcccggaaaaaggaggagggtata

SEQ ID NO: 420 - DNA, 43 bp, synthetic construct
  source 1..43: mol_type = other DNA
nnnnnnctgatgagtccgtgaggacgaaacgagtaagctcgtc

SEQ ID NO: 421 - DNA, 59 bp, synthetic construct
  source 1..59: mol_type = other DNA
acttgtccacaatcttttctgatgagtcgctgaaatgcgacgaaactcgatatgttcaa

SEQ ID NO: 422 - DNA, 171 bp, Bacillus subtilis
  source 1..171: mol_type = genomic DNA
cctataattatagcgcccgaactaagcgcccgaaaaaaggcttagttgacgaggatggaggttatcgaattttcggcggatgcctcccggctgattatgcagatcacagccgtaaggatttcttcaaaccaagggggtaactccttgaacaaagagaaatcacatgatctt

SEQ ID NO: 423 - DNA, 68 bp, Hepatitis delta virus
  source 1..68: mol_type = other DNA
ggccggcatggtcccagcctcctcgctggcgccggctgggcaacatgcttcggcatggcgaatgggac

SEQ ID NO: 424 - DNA, 186 bp, Otolemur garnettii
  source 1..186: mol_type = genomic DNA
ggcgctgtgtcgcaatctgcgaagggcgtcgtcggcccaagcggtagtaagcagggaactcacctccaatgaaacacattgtcgtagcagttgactactgttatgtgattggtagaggctaagtgacggtattggcgtaagccaataccgcagcacagcacaagcccgcttgcgagattacagcgc

SEQ ID NO: 425 - DNA, 52 bp, Chicory yellow mottle virus
  source 1..52: mol_type = other DNA
caacagcgaagcgcgccagggaaacacaccatgtgtggtatattatctggca

SEQ ID NO: 426 - DNA, 52 bp, Arabis mosaic virus
  source 1..52: mol_type = other DNA
caacagcgaagcggaacggcgaaacacaccttgtgtggtatattacccgttg

SEQ ID NO: 427 - DNA, 50 bp, Tobacco ringspot virus
  source 1..50: mol_type = other DNA
aaacagagaagtcaaccagagaaacacacgttgtggtatattacctggta

SEQ ID NO: 428 - DNA, 52 bp, Chicory yellow mottle virus; identical to SEQ ID NO: 425
  source 1..52: mol_type = other DNA

SEQ ID NO: 429 - DNA, 52 bp, Chicory yellow mottle virus; identical to SEQ ID NO: 425
  source 1..52: mol_type = other DNA

SEQ ID NO: 430 - DNA, 50 bp, Tobacco ringspot virus; identical to SEQ ID NO: 427
  source 1..50: mol_type = other DNA

SEQ ID NO: 431 - DNA, 68 bp, synthetic construct
  source 1..68: mol_type = other DNA
ggagagagaagtcaaccagagaaacacaccaacccattgcactccgggttggtggtatattacctggt

SEQ ID NO: 432 - DNA, 526 bp, Oryza sativa
  source 1..526: mol_type = genomic DNA
ctacggacttgattgtattgagccttggtatggaaacctgctaagtggcaacttccaaattcagagaaaccctggaattaaaaaaggggcaatcctgagccaaatccatgttttgagaaaacaagcggttctcgaactagaacccaaaggaaaaggataggtgcagagactcaatggaagctgttctaacgaatcgagttaattacgttgtgttgctagcggaactcccttctaaattagggaaagaagggctttcgaaatctaatacacacgtatagatactggcatagcaaacgattaatcacagaactcatatcataatataggttctttaattcttttttaaaatgaaaataggaatgattatgaaatagaaaattcataatttttttagaattgttgtgaatccattccaatcgaatattgagtaatcaaatccttcaattcatagttttcgaaatctttttaaaagcggattaatcggacgaggataaagagagagtcccattctacatgtcaatactga

SEQ ID NO: 433 - DNA, 526 bp, Oryza glaberrima; identical to SEQ ID NO: 432
  source 1..526: mol_type = genomic DNA

SEQ ID NO: 434 - DNA, 74 bp, Nicotiana sylvestris
  source 1..74: mol_type = genomic DNA
gaaagtcgtattcgatgaaagtcgtatgtacggcttggagggagatctttcatatatttcgagatccagcctac

SEQ ID NO: 435 - DNA, 130 bp, Solanum lycopersicum
  source 1..130: mol_type = genomic DNA
gagagccgtgtgatgggtgactatccagcacggttaagagagcacttttagtctgctctggtgaatggaagccccctatcatgcaataaggaagcagctcttctcacagcggagtcaccgttgactttat

SEQ ID NO: 436 - DNA, 77 bp, Hordeum vulgare
  source 1..77: mol_type = genomic DNA
gaaagccgtatgctttggaagaagcttgtacagtttgggaaggggttttttgagagaaaagaagaatctacttcaac

SEQ ID NO: 437 - DNA, 79 bp, Hordeum vulgare
  source 1..79: mol_type = genomic DNA
aggagctggatgagaagaaactctcatgtccagttttcgagtagagatggaactaagaaagagaaccatcgactataac

SEQ ID NO: 438 - DNA, 79 bp, Capsicum annuum
  source 1..79: mol_type = genomic DNA
aggagccgtgtgagatgaaagtctcatgcacggttttgaatgagagaaagaagtgaggaatcctcttttcgactctgac

SEQ ID NO: 439 - RNA, 43 nt, synthetic construct
  source 1..43: mol_type = other RNA
ccaatcgtggcgtgtcggcctgcttcggcaggcactggcgccg

SEQ ID NO: 440 - RNA, 49 nt, synthetic construct
  source 1..49: mol_type = other RNA
gagacggtcgggtccagatattcgtatctgtcgagtagagtgtgggctc

SEQ ID NO: 441 - RNA, 132 nt, synthetic construct
  source 1..132: mol_type = other RNA
gtgctcgcttcggcagcacatatactagtcgaccgccagatgccttgtaaccgaaagggggaagaggaaggaggtctgaggaggtcactttcccgaaaggatggcgtctagagcggacttcggtccgctttt

SEQ ID NO: 442 - RNA, 40 nt, synthetic construct
  source 1..40: mol_type = other RNA
ggcacgtacgaagggacggtgcggagaggagagtacgtgc

SEQ ID NO: 443 - RNA, 41 nt, synthetic construct
  source 1..41: mol_type = other RNA
ggcacgtacgaaggagaggagaggaagaggagagtacgtgc

SEQ ID NO: 444 - RNA, 46 nt, synthetic construct
  source 1..46: mol_type = other RNA
ggcacgtacgaaggaaggattggtatgtggtatattcgtacgtgcc

SEQ ID NO: 445 - RNA, 45 nt, synthetic construct
  source 1..45: mol_type = other RNA
ggcacgtacgaaggaaggtttggtatgtggtatattcgtacgtgc

SEQ ID NO: 446 - RNA, 42 nt, synthetic construct
  source 1..42: mol_type = other RNA
ggcacgtaccgagggagtggtgaggatgaggcgagtacgtgc

SEQ ID NO: 447 - RNA, 83 nt, synthetic construct
  source 1..83: mol_type = other RNA
gggaagatacaaggtgagcccaataatatggtttgggttaggataggaagtagagccttaaactctctaagcggtatcttccc

SEQ ID NO: 448 - RNA, 52 nt, synthetic construct
  source 1..52: mol_type = other RNA
ggctagctggaggggcgccagttcgctggtggttgggtgcggtcggctagcc

SEQ ID NO: 449 - RNA, 98 nt, synthetic construct
  source 1..98: mol_type = other RNA
gacgcaactgaatgaaatggtgaaggacgggtccaggtgtggctgcttcggcagtgcagcttgttgagtagagtgtgagctccgtaactagtcgcgtc

SEQ ID NO: 450 - RNA, 95 nt, synthetic construct
  source 1..95: mol_type = other RNA
gatgtaactgaatgaaatggtgaaggacgggtccagtaggctgcttcggcagcctacttgttgagtagagtgtgagctccgtaactagttacatc

SEQ ID NO: 451 - RNA, 100 nt, synthetic construct
  source 1..100: mol_type = other RNA
ggagacgcaactgaatgaaatggtgaaggagacggtcgggtccaggtgcacaaatgtggcctgttgagtagcgtgtgggctccgtaactagtcgcgtcac

SEQ ID NO: 452 - RNA, 57 nt, synthetic construct
  source 1..57: mol_type = other RNA
ggatgcgccttgaaaagcctgcttcggcagctggtgaatgacagctatggcgcatcc

SEQ ID NO: 453 - DNA, 44 bp, Pea early-browning virus
  source 1..44: mol_type = other DNA
attcaattaattcaatagaattaattctcgtattaatatgacaa

SEQ ID NO: 454 - DNA, 45 bp, Tobacco rattle virus
  source 1..45: mol_type = other DNA
attttatcactcttataagagtgatactcgtattaatatgaccaa

SEQ ID NO: 455 - DNA, 45 bp, Tobacco rattle virus
  source 1..45: mol_type = other DNA
attcaaagattacaatagtaatctctaccgtatttatttgacaaa

SEQ ID NO: 456 - DNA, 45 bp, Tobacco rattle virus; identical to SEQ ID NO: 455
  source 1..45: mol_type = other DNA

SEQ ID NO: 457 - DNA, 45 bp, Tobacco rattle virus
  source 1..45: mol_type = other DNA
attcggtagtgtgaaaacacattacctacgtattaatatgactaa

SEQ ID NO: 458 - DNA, 38 bp, Pea early-browning virus
  source 1..38: mol_type = other DNA
ttatggtctaagataattcttcagaccctcgtaatttt

SEQ ID NO: 459 - DNA, 38 bp, Pea early-browning virus
  source 1..38: mol_type = other DNA
cttaacaagaatcttatcaagattctgttcgtattcta

SEQ ID NO: 460 - DNA, 38 bp, Pea early-browning virus
  source 1..38: mol_type = other DNA
caaggtatatgcgaaacacgcgtaataccttcgtataa

SEQ ID NO: 461 - DNA, 211 bp, Tobacco mosaic virus
  source 1..211: mol_type = other DNA
gaaaaaagagtgatgtccgcaaagggaaaaatagtagtaatgatcggtcagtgccgaacaagaactatagaaatgttaaggattttggaggaatgagttttaaaaagaataatttaatcgatgatgattcggaggctactgtcgccgaatcggattcgttttaaatatgtcttacagtatcactactccatctcagttcgtgttcttgtca

SEQ ID NO: 462 - DNA, 135 bp, Tobacco mosaic virus
  source 1..135: mol_type = other DNA
ctttgtgatgttgctgtttcgttgaacaattgtgcgtattacacacagttggacgacgctgtatgggaggttcataagaccgcccctccaggttcgtttgtttataaaagtctggtgaagtatttgtctgataaa

SEQ ID NO: 463 - DNA, 43 bp, Cucumber mosaic virus
  source 1..43: mol_type = other DNA
ttctcatggatgcttctccgcgagattgcgttattgtctactg

SEQ ID NO: 464 - protein, 10 aa, synthetic construct
  VARIANT 2: note = X is R, G, or F
  VARIANT 3: note = X is Y or G
  VARIANT 4: note = X is A or F
  VARIANT 5: note = X is Y or V
  VARIANT 8: note = X is any amino acid
KXXXXILXFY

SEQ ID NO: 465 - protein, 9 aa, synthetic construct
  VARIANT 3: note = X is L or F
  VARIANT 4: note = X is Y or I
  VARIANT 7: note = X is any amino acid
IVXXVLXNL

SEQ ID NO: 466 - DNA, 266 bp, synthetic construct
  source 1..266: mol_type = other DNA
ggaaaaatgttgaactgtttgtttttatcaaacttaattactttttaacaaccttttcaaatacgaacagtagtattaagataagcaatttaacaggaagaggccggcaaattgaacgcctctcctcaacttattaaaaataagaacaaagaagaatgaatataaactgggaagatcgcatattttgatagaagcaataaagtctaatgtaaaaacagaatctagttgcaaaattattcgacaaatctatttacttggtagtggta

SEQ ID NO: 467 - DNA, 500 bp, Oryza sativa alphaendornavirus
  source 1..500: mol_type = other DNA
tgaaatgtcttgtacgaccatttcaaatttatgtaaattgaacgcagcaacaacagggggggggcggagacgcccccccccttttaaaaataaaaatgatcaaatcaagtacgatcttggtttgatcaaatcaaaaacccctgttataaaagggtttttgaaaagaatggacgatatacaacgtccaaacttaggtacaactgcattagatcctttatttggatggttcagattgcctcgtaatgtccattgtaggatgaacaaaaacaaatttattgataattttgataatttatttgaacattataaaggtaaacaatttcataattgcaaagagatcagtatagtatgtgtagaagctatgaggggagagttacaattgaaagagcgacattatggcattgctcaatctttttctccagatgatgaacgattgagcaaatttagcgttaagaatatgtcatttggcttggtgactagattattatatttgatttatg

SEQ ID NO: 468 - DNA, 500 bp, Vicia faba alphaendornavirus
  source 1..500: mol_type = other DNA
agccaaataagttggcctagacaaactagaaagcaaagcaaatgaaaaaattaacagcaacaactaacaaaaaggaatcgccgccggctccagtcggcgacccttttaaaaaaacaaaagactctgtatcattcacgggcgtgaagacagagttttatggagcgaaaacgccctgcagcactggcatttatcacacaacttgttgtgtgccgtgcgaagacattgatatacacgaggtagtcaaggccgcgtcccgagatgatgcacgccactaccaagaacacccaaactctccaagcaaccccgagctggtcaattcttttaacaaaggtttgacgctcgagagctatacagcgagacagaagggcgagcgtaatctgcaccgatttaacagaaatattaacgctctagttaaaaacttacgcacgcagaagaaacaaactgagagaagcagcatatactgcagccccccaagaaaacatctgggaaggcggccacac

SEQ ID NO: 469 - DNA, 500 bp, Oryza rufipogon alphaendornavirus
  source 1..500: mol_type = other DNA
tgaaatgtctgtgatgaccatttcaaaattatgtaatgtgaatgctgcaaccacagggggggggcggagacgcccccccccttttaaaaataaaaacgatcaaatcaagtacaaacttgatttgataaaaccaaaaaccccaaatacaattgggtttttgaaaagaatggacgacataaaacgtccaaatatgggaactacggctttagatcctctattcgggtggttcagattacctcgcaacgtaaattgtagaatgaacaagaacaagtttatcaccgacttcgacaacttatttgagcattacaaaggaaagaaattccatacatgtaaagaagtcagtgtagtttgcgtagaagctatgaggggagagttacaattaaaagagagacactacggtatcgctcaatcattttcaccacaggatgagagattaagcaaattttgtgttaaaaatatgtcatttggtttaattacacgattactatatttaatttatg

SEQ ID NO: 470 - DNA, 500 bp, Persea americana alphaendornavirus 1
  source 1..500: mol_type = other DNA
gtaatgatggccaacctcgttactaatctactcaaaatatgtaagaaacgtttcaggagggggcctcgaaagaggccccctttaacttataaaaagacgagatcggtaggaagaaatcagtatatagatacaccagacaggctgactgcaattgaacaatgcatgagtgctggctgggttaaactgccacgatgttgtacagtagtacagaaccaaaatccatttgtgacttctttaggcaaattgatggagaaatacaaatctcgttttactaagaataatgagttgccaatgatcccggccattcgtggtgagcggtatgctaaagatctacattatggtttagctgactcaaggccagagggcaaattgatggatgataaaattaacttaggcgagctgagtccgttggatgttgctagattgtattacaatgtactaagacttaaaagatgcatagtcaacgtatcaaagttctcaattgcagaactagaagcttt

SEQ ID NO: 471 - DNA, 500 bp, Lagenaria siceraria alphaendornavirus
  source 1..500: mol_type = other DNA
gtaatggcgttctccattactcgaattaatccatcttatagtctgcaagtaaacggggagagacctccattttggaggtctttcctcaaaaaaataaaatataaggagcaaatgcagtataaaacagatgcaattactccttatagacaaaaatataaagatcggccactacaaactctgaacaaagaggtgtcaagtcacctgcagggttggattagattaccaagaaaccaatccgtcacgataaacaaaaacccttggattagaagttttgaaaaactatttaaacataagcccgatcaaatttttgacaaaaataaaatgaaattggtacctgcaataagaggtgaaaggaaaattagagacacagtcggcacagtcgccacaaatgtaacctatgatgatggactcggtaacgtgatcaatttcaatgaactgcacccattagatgtggtgaagatactttacaacgttaattgtcttggaatcgaattgtggaa

SEQ ID NO: 472 - DNA, 500 bp, Yerba mate alphaendornavirus
  source 1..500: mol_type = other DNA
ttacaattcctaacaaaattaaacaagcaattgtaagagggggcactcgaaagggtgcctcctcatttaaactaaaaccaaagatcaatgattatgcggtggctagatctcttggaagcaagaatagccactgcaaaaatagactcaacatgagaagaggaaaaatattgaacccatccacggagatcaagaacaatctgtatggttggtgtcaattgccaagaaattataaggtaacaattaataataacaaatttatagagaacttagaaggtatttttaagactggccatcaagatgtggatggagacgtactttatatggtaccagcagtaagagggatgctaattccaaaacataaacattatggaatagctagttgtgcaaacacaaaagacgtgatgttcaataagttcgacatggcagatttgagccctttaaacgtgagtaaattatattacaatgtcgtgtgccttggtaatgaattgagaaaattaaac

SEQ ID NO: 473 - DNA, 500 bp, Hot pepper alphaendornavirus
  source 1..500: mol_type = other DNA
gtaaaacaactaaggttttatgactactaagttgtctagaccttttgctttacagttattgggtggctctcgcctcccgaaaactcaaactcttcatgggtgtactggaaacagtatacccatgaagaaaataaataagaaaaacgattgctccgccagaaaagcattcaggcggagtaaatttaaatttaaaataagtaaacaaaagactatatgtcccgcagttatggcacataggttggaagaagagttggaattcgtacaatttggaccagaagagtgtgttcctgatttgaataaagtggacattagaacaattagaaatatgatgttattgttcgaacaagaacattgccacgttgacgtaactgaggaagacgttaaaaagtatttacagcaaagtcaattgcaaagcactgaaccattttatggtggtcccagtaaaatgtattatgcaaattgtaggccaatgctattaccaccctcaaagatagatggta

SEQ ID NO: 474 - DNA, 500 bp, Hordeum vulgare alphaendornavirus
  source 1..500: mol_type = other DNA
gtcaaccaaccatgtacaaccgaacagtacatgagacaggcaattcgtcaccaaaacaaaaagaggtcgagtggcttaaagccactcgacctctaaaaagagacgtgaataaacgatggaaggcaaagctgggaaaaccaaaattgcgacaaaaaccattaagattgaagcgtctcaaagggcaagtggtgaaccgatccaacaacatgaacagccaatacgacaacatgaaaaattattacaatcaaatgacaaaagtacgcatattaggtagaaccatggtaccctgtgcattggctttgcaatttcccatgtccgaaccattggtcaacaattacatggaagcaagttacattgccacatataaactgatgtacaaaaacaaagaaagttacgaagggttgcacccgcatgaactggctgcatttataaaaggtgttagattaaatgtggaagacagtttcaaccatgctggtaacaaattattctatgactctgtc

SEQ ID NO: 475 - DNA, 500 bp, Cucumis melo alphaendornavirus
  source 1..500: mol_type = other DNA
ggtaatggcttcattccccattacgtgtagtaatcctagtactttgtataccgtttcgagggagagacctcctttttggaggtctctccttaagaaactaaaactaaagatgaaatataaagattataaacccattaaaaaggtagtaaagccttctgtagtaaagagagaattttctaacaaactacaggggtggatcaaattacctagaaattgtagaatgggtttaaacaaaaatccgtttcaaaccagttttagaaaagtgtttaaagagaataagtcattaatatttgataaaaataaaattaaattagtaccagcaatccgtggagtcaaaaaatttagagatacttgtgggtcagtggcagccaacatacgcttcgaagaccctcttgctggcgtggttaacttcgaagctatgcacccattagatatagctagaatctattacaacgtgataagtggagggtgtgaaatatggaagccaccacataaaccaa

SEQ ID NO: 476 - DNA, 500 bp, Winged bean alphaendornavirus 1
  source 1..500: mol_type = other DNA
gacatttttaaaaatgcctaaggtctgcagcttgtacaaagcagtacacagcaaactgcaaccaatgggcggttcacgcccacacacacttcgccaagggagaagccttactcccttgtcgaagcaagagaaacacaagactagctattcactgaggaagatctttagaaatagccaagttaaaataaaattaggcgaaaacaaacaaatcgtaccatgcaccatggcctgtagaaaagatgaacacagagaatttatccaatttgggcctgagtgcttggtacctgatttaaatcacatagatactgccacaatgcgaaatttcatcttattatatcaagaaggagtctgtcacatcgcggccaataagttgacgaacaagatggtagccagaaattcccatcttcaaaatgaagaaccgttctggggaccaaatatgagagattattattccaacaaattgccagatgacatttgtccatttaaagaagatgcaaata

SEQ ID NO: 477 - DNA, 500 bp, Lagenaria siceraria alphaendornavirus
  source 1..500: mol_type = other DNA
gtaatggcgttctccattactcgaattacaccatcttatagtctgcaagttaacggggagagacctccattttggaggtctctcctcaaaaaattaaaatataaggagcaaatgcaaatgaatacagatgcaattactccttataaaagaaaatataaagacaaacctcttagacttttaaataaagaattttcaaatcatctgcaagggtggatcaagttgccgagaaatcaatcggtgactattaataagaacccgtggatcaaaagctttcaaaaattatttaaggataaacgtgaacacatatttgataacaacaagttgaaattagttcctgcgattagaggtgaaagaaaaatacgagataccgtaggtactgtggccacaaatgttacttatgatgatggtttaggaaatgttataaatttcaatgaattgcacccgatggatgtggttaaaattttatacaatgtcaattgtctcgggattgaattatggaa

SEQ ID NO: 478 - DNA, 500 bp, Phaseolus vulgaris alphaendornavirus 2
  source 1..500: mol_type = other DNA
ataatttgattgtcgtccaatggctagaaaacttgacaaggtctcgtttttaaagtctttgggtggttcacaccacccgaaaattcaagcttctcatgagcacacgagcaatcgtgtgctcatgagaaaattaaataaaagaaatgaatgctctgcaagaaacgtatacagacagagcaattataaagtaaaactacactcaagcaagaccgttgtgccagcggttatggcagccagacaaggggaagaattagaattcttggaatttggttacgaagaatgtgtgccggacctcaacaaaatagacatacgcacaattcgatctatgatgcaattatttgaacaaggacattgccacatagatatcacaccggaggaagttcaggcaacgttacacaattgtcaactacaaagcacagaaccgtattatggtgcccctggaaaactgtattacaagcattgtcggcctttgttaactccaagatccaaagaagacggaa

SEQ ID NO: 479 - DNA, 500 bp, Bell pepper alphaendornavirus
  source 1..500: mol_type = other DNA
gtaaaacaaacaaggttttatgactactaagttgtctagaccttttgctttacgtttactgggtggctctcgccccccgaaaactcaaattcttcatgggtgtactggtaacagtatacccatgaagaaattaaataagaaaaacgattgctctgctagaaaagcatttaggcagagcaaatttaaatttaaaataagtaaaaataagacgatatgtccggcagtgatggcacacagactcgaagaggaattagagttcatacaatttggacctgaagagtgtgttccagatttaaacaaagtggacatcagaaccatcagaaacatgatgctgttgtttgaccaagaccattgtcatttggacgtgaccactgaggatgttgtcaaatacctacaacaaagtcaattgcaaagcacagaaccgttttacggtggacctagtaaaatgtactatgccaattgcaggccgatgttactaccaccatcaaaacaagacggca

SEQ ID NO: 480 - DNA, 500 bp, Phaseolus vulgaris alphaendornavirus 1
  source 1..500: mol_type = other DNA
attggattaatatattggctgtggtaacctaatttaagtactttgttaactactttgcgtctagcatctccgtatgtaatggctccaaagtttattacatgtcttaactcaaataaccaggcaaaactaacgggacctcgaaagaggtcccaaattttaaaatctagtaatggctccaaagtttattacatgtcttaactcaaataaccaggcaaaactaacgggacctcgaaagaggtcccaaattttaaaatctaaacgaagaaaacatacatacggagatgctagacgcaaagtagttaacaaagtacttaaattaggttaccacagccaatatattaatccaataccacaacccaaacaaaccaagccttctatcaagcaattaggttgggtaggattaagtaaaaatagacagattaaacagaacgcgaacccttacgttagatcaataagaaaattgttcaggtcccataaaagacaattaatagatgagaaca

SEQ ID NO: 481 - DNA, 500 bp, Phaseolus vulgaris alphaendornavirus 3
  source 1..500: mol_type = other DNA
ggggaaatatggcaaatttgcttaattccaaacttaatttttcttcaacaaatatgtttaaacatgcaaaaaaggtactcttagaccttgagtcgggagtaccaagagaaagaaaattaatgaaaggaggtgacaaactgataatagacgcgtctaagagcccagtcacgattgggctggcgcgtcaaatgcttaaaaacaagaaaagaaagggaggaatattaactagtaaggttcctgtcttcaagccttccgagaggaaggagatactgaaagcagtaaccgatatgaacatcattacggtcgatggttgcaaagttatacctctcaccccgtcaataggtatgggtgagttcttatcaatcacgtatgatggattagcatgggattgtgcaaacgctttcggactaaacctatttatgcttggggtgttacagggtggacgcgtgctgggccccaaggggatcaaggcagagtcctttaaatcttcataccgggca

SEQ ID NO: 482 - DNA, 500 bp, Helianthus annuus alphaendornavirus
  source 1..500: mol_type = other DNA
acctattgactaatagggacatggacatattaaagaaagaacccaaaccaaaaggggaaccctcttcaatacaacacgctggggatggtccccccagcgtgttaaacgttggcgagatactcgccaacataaacaaactggtgagcgctagggaccgacgccgccagacattaaggaccaaaacacgacgcttgaccgagaacaacgagttcaacgttaaggtcgacccacatttccaaccaaagtttgtgaaatgtgtggcaggttccaacaaacaaagtatgaagaaatcacctcacaagtggcaacacaatgtgatggtatttaacacaataaacctagggaaaagggatcctcatgagattgccaacaagctactggcctacggtgccccagcgaaagtcaaggactgccagtgtgcgagctgcgtgtcagtagataaccaacggtccaaagtagccatcaacacccaggccactctaggcatgtggagcataacc

SEQ ID NO: 483 - DNA, 500 bp, Cluster bean alphaendornavirus 1
  source 1..500: mol_type = other DNA
ataaagacccgcagcccaatggttttatcagccacgtcgacgacaatctgttcaaatacatgcacccttcaacttaggtgtgtgcgaaagcacacacctaagttatataaaaatgaatatcagaagaaggatcaaaccatgaagaagatggtaaaaaggtgtgacgtcaaagatgagaccaaggtaaaattacatgatgatcttgagacttattttaacacaagcaagcaaataaccaggaatgggatgaaaatggtagtttgctgcaccccaatacagttcgtgtttgatgatcctttgttgtccagcgcgttgcaaccagatttcattgccacttggtggctggccaaggaacaagggatgcaaaattatggattaacccctgaacaattcaagccctttgtggacacggctggtttaagtgtggaagatccagctaacaacttgacacacaagtactattatgaacataagaaagacggtgttgagtgtgtttctgt

SEQ ID NO: 484 - DNA, 500 bp, Basella alba alphaendornavirus 1
  source 1..500: mol_type = other DNA
ggaatatggctaatcggcttattctaatcaaacgcaaaagacttatgacacagaccggacctgaacgaggtgataaaacacctcgttcaggttcaaaacgtagaagattcattcctccgattagaaatacaactacgtctaagcacgatagagatggtatcaagatcggttttagaccacgagaaaatcggcaaatgaaagtacaagttgggtggtttaaattaccaagaacagtaacattcaagaacaacggcaacccgtttgttacctcatttcgtaaattgtttagaagtaacaaagataaattatttaatggtgggaagaacctaagtacagtaccagccagaagtagtgaaatgacagaaatgtttatgttcatgtccacgctagagggccaattgtcaatccaagatctagatccaaaaataatcaataagtctatatacatgatagaggtaatgggttacggggtggtcaagcctgacggagttccattctca

SEQ ID NO: 485 - DNA, 18 bp, Bell pepper alphaendornavirus
  source 1..18: mol_type = other DNA
taaaacaaacaaggtttt

SEQ ID NO: 486 - DNA, 60 bp, Bell pepper alphaendornavirus
  source 1..60: mol_type = other DNA
tgtaatggcttcatcctccattacgtgtagtaatcctagtactttgtataccgtttcgag

SEQ ID NO: 487 - DNA, 18 bp, Bell pepper alphaendornavirus
  source 1..18: mol_type = other DNA
taaaacaaacaaggtttt

SEQ ID NO: 488 - DNA, 19 bp, Bell pepper alphaendornavirus
  source 1..19: mol_type = other DNA
gtaagacaaacaaggtttt

SEQ ID NO: 489 - DNA, 18 bp, Bell pepper alphaendornavirus
  source 1..18: mol_type = other DNA
gtaaaacaaacaaggttt

SEQ ID NO: 490 - DNA, 18 bp, Bell pepper alphaendornavirus
  source 1..18: mol_type = other DNA
taaatcaacccaggtttt

SEQ ID NO: 491 - DNA, 12 bp, Winged bean alphaendornavirus 1
  source 1..12: mol_type = other DNA
gacatttttaaa

SEQ ID NO: 492 - DNA, 18 bp, Cluster bean alphaendornavirus 1
  source 1..18: mol_type = other DNA
ataaagacccgcagccca

SEQ ID NO: 493 - DNA, 95 bp, unidentified
  source 1..95: mol_type = other DNA
gctcccattacgtgtcgtattccaagtactctgtatacagtttcgagggagagacctcctttttggaggtctctccttaagaaactaaaattaaa

SEQ ID NO: 494 - DNA, 18 bp, Bell pepper alphaendornavirus
  source 1..18: mol_type = other DNA
taaaacaaacaaggtttt

SEQ ID NO: 495 - DNA, 154 bp, unidentified
  source 1..154: mol_type = other DNA
aacttaccaatcttaagacataaacacccaacttctcgatctcttacactttctgaggtgaacccctttcacgccgcctggtgccggcccgcaccggacggcgtgaaaacaaaccaaaagagggcagtcctgcgcaagacgacactgcggcacg

SEQ ID NO: 496 - DNA, 18 bp, unidentified
  source 1..18: mol_type = other DNA
gtaaataaaataaaaagg

SEQ ID NO: 497 - DNA, 74 bp, Cucumis melo alphaendornavirus
  source 1..74: mol_type = other DNA
agagatacttgcgggtcagtggcagccaacataagcttcgaagaccctcttgctggcgtggttaacttcgaagc

SEQ ID NO: 498 - DNA, 19 bp, Bell pepper alphaendornavirus
  source 1..19: mol_type = other DNA
gtaaaacaaacaaggtttt

SEQ ID NO: 499 - DNA, 18 bp, unidentified
  source 1..18: mol_type = other DNA
tcaaataaaataaaaagg

SEQ ID NO: 500 - DNA, 11 bp, unidentified
  source 1..11: mol_type = other DNA
aacctactatc

SEQ ID NO: 501 - DNA, 16 bp, Bell pepper alphaendornavirus
  source 1..16: mol_type = other DNA
aaacaaacaaggtttt

SEQ ID NO: 502 - DNA, 18 bp, Bell pepper alphaendornavirus
  source 1..18: mol_type = other DNA
taaaacaaacaaggtttt

SEQ ID NO: 503 - DNA, 106 bp, unidentified
  source 1..106: mol_type = other DNA
tgccaaatactgcaattcccaagataaatggtataaaatgtaatggcttctcacatttaattaaggtgctcccagaactacgttcaggagcaccattaaaaaataa

SEQ ID NO: 504 - DNA, 17 bp, Phaseolus vulgaris alphaendornavirus 2
  source 1..17: mol_type = other DNA
ttccgatctgtcgtcca

SEQ ID NO: 505 - DNA, 27 bp, unidentified
  source 1..27: mol_type = other DNA
ccgcacaccaacagtgctatcattgta

SEQ ID NO: 506 - DNA, 112 bp, Oryza sativa alphaendornavirus
  source 1..112: mol_type = other DNA
gcaggtcctcttcgccagctccccccccttttaaaaataaaaatgatcaaatcaagtacgatcttggtttgatcaaatcaaaaacccctgttataaaagggtttttgaaaag

SEQ ID NO: 507 - DNA, 57 bp, Oryza sativa alphaendornavirus
  source 1..57: mol_type = other DNA
gtacgatcttggtttgatcaaatcaaaaacccctgttataaaagggtttttgaaaag

SEQ ID NO: 508 - DNA, 22 bp, unidentified
  source 1..22: mol_type = other DNA
acttacaaccaccacacccccc

SEQ ID NO: 509 - DNA, 19 bp, Bell pepper alphaendornavirus
  source 1..19: mol_type = other DNA
gtaaaacaaacaaggtttt

SEQ ID NO: 510 - DNA, 23 bp, unidentified
  source 1..23: mol_type = other DNA
gacaatattaaaagcacgcaaca

SEQ ID NO: 511 - DNA, 11 bp, Hordeum vulgare alphaendornavirus
  source 1..11: mol_type = other DNA
gtcaaccaacc

SEQ ID NO: 512 - DNA, 11 bp, Hordeum vulgare alphaendornavirus
  source 1..11: mol_type = other DNA
atcaaccaacc

SEQ ID NO: 513 - DNA, 167 bp, Phaseolus vulgaris alphaendornavirus 1
  source 1..167: mol_type = other DNA
attggattaatatattggctgtggtaacctaatttaagtactttgttaactactttgcgtctagcatttccgtatgtaatggctccaaggtttattacatgtcttaactcaaataaccaggcaaaactaacgggacctcgaaagaggtcccaaattttaaaatctaa

SEQ ID NO: 514 - DNA, 22 bp, Phaseolus vulgaris alphaendornavirus 2
  source 1..22: mol_type = other DNA
aagataatttgattgtcgtcca

SEQ ID NO: 515 - DNA, 20 bp, Bell pepper alphaendornavirus
  source 1..20: mol_type = other DNA
ggtaaaacaaacaaggtttt

SEQ ID NO: 516 - DNA, 19 bp, Bell pepper alphaendornavirus
  source 1..19: mol_type = other DNA
gtaaaacaaacaaggtttt

SEQ ID NO: 517 - DNA, 20 bp, Helianthus annuus alphaendornavirus
  source 1..20: mol_type = other DNA
acctattgactaatagggac

SEQ ID NO: 518 - DNA, 79 bp, Bell pepper alphaendornavirus
  source 1..79: mol_type = other DNA
cttttgctttacgtttactgggtggctctcgccccccgaaaactcaaattcttcatgggtgtactggtaacagtatacc

SEQ ID NO: 519 - DNA, 412 bp, unidentified
  source 1..412: mol_type = other DNA
tttttttttttttttttttttttttttttttttttttttttcattgtacttcgttcagttgcccctcaattctgagtgtttatggatgcatcgccctaccgtgacaagaaagttgtcggtgtctttgtgtttctgttggtgctgatattgctgggggtaaaacaaacaaggttttatgactactaagttgtctagaccttttgctttacgtttactgggtggcaagggaggagggccccccccccctgtgtgtgtgtgtgtgtgtgtgtgtgtgtgtgtgtgtgtgtgtgtgtgtgtgtgtgtaaaaaaaaaaaaaaaaaaaaaaaaaaaaaaaaaaaaaagaaaaaaaagaaaaaaaagaagatagagcgacaggcaagtcaccaaagacaccaatgcttttcatcgcccg

SEQ ID NO: 520 - DNA, 236 bp, Oryza sativa alphaendornavirus
  source 1..236: mol_type = other DNA
agtggtttgagtttatgagagaggatggtgtaggagggatatgtgatgtaaaaatggatatgaagatgaaatggtgggagtaagtagatgggtggggatttgatgtcgtacaagacatttcaaatttatgtattaaacgcagcaacaacagggggggcggacgcccttctaaaataaaaatgatcaaatcaagtacgatcttgatcaaatcaaaccctattgaagggtttgaaaga

SEQ ID NO: 521 - DNA, 159 bp, unidentified
  source 1..159: mol_type = other DNA
ctcgtacaagacatttcaaatttatgtaaattgaacgcagcaacaacagggggggggcggagacgcccccccccttttaaaaataaaaatgatcaaatcaagtacgatcttggtttgatcaaatcaaaaacccccattataaaagggtttttgaaaaga

SEQ ID NO: 522 - DNA, 159 bp, unidentified
  source 1..159: mol_type = other DNA
gtcgttcaagacatttcaaagttatgtaaattgaacgcagcaacaacagggggggggcggagacgcccccccccttttaaaaataaaaatgatcagatcaagtatgatcttggtctgatcaaatcaaaaacccccactataaaggggtttttgaaaaga

SEQ ID NO: 523 - DNA, 51 bp, synthetic construct
  source 1..51: mol_type = other DNA
gaggttctatcaatttttttttgaaggtaaggatcccaccccccccccccc

SEQ ID NO: 524 - DNA, 500 bp, Oryza sativa alphaendornavirus
  source 1..500: mol_type = other DNA
ccaggatatagcttgtaaatttaatatgcaaagtaaagattcttggatgaccaatggagcaacattctgtagcatggtagtttacaaaacgaatgataatgtagtagaattgggcccagatgtagtcaggatgaaatttaggtatgaagtcaccaatggtgtacacgaagcaactaaagagaacttaatgatgcgcaaggcatcttacttgatgatgttagggaaaacacctgaagttgataaattagtaaatgatctccaattacccatcaatcccgtacactggtacaattatcacacgatgttacagggcgttgctgacaaatgggacatgaacatacaacaagttgaggggtattatcataacttgatctacatgatatctaaagacgacatttatcaacataactttagaggattcggtaatagatgaatattataactaactctgttttgtcaatttatttttaaaaggatggggcacccctcccaaaccccgg

SEQ ID NO: 525 - DNA, 500 bp, Vicia faba alphaendornavirus
  source 1..500: mol_type = other DNA
gcagagtggtcaaggttggacggagtgcaggtgcacgatctatctaagattgacacttccggcaacctagccgaggcactagagggcattggagcttcaatgggcatgccaaaccccatgatggcagccggaatgtcctacctacacatgctaggcaaaagtgaggaagcagacaaaattaacaccgagaaagagtttggcttagaattaagaaaatggtacgacgtggcaagctgcaagaatgccacgtgcatcaaatataacatgtcacccatggaactggaagacaatataggagagctactaaaaatgatcagaaaaccaatggcatatcacaaaaggttcttaaccacagcagcctacagcgcgcaaaaaatcagatgacatggttcaatggataaaaagatagttagttgttgcccccaatcatgaattggaggcaaacacaaggcagaattatcgtgtggcaaccaaaagaactgtgagcccataccatcggg

SEQ ID NO: 526 - DNA, 500 bp, Oryza rufipogon alphaendornavirus
  source 1..500: mol_type = other DNA
caaacacacaacatttacgccaggacatagcttgcaaatttaatatgcaaagcaaggactcatgggtactcaatggggctactttttgtagtatggtagtttacaaaacaaatgatgacgtagttgaaattggtcctgatgtagtcaggatgaaattcaggtttgaagttactaatggtgtgcatgaagcaacgaaagaaaacttattaatgcggaaagcttcatatttgatgatgttagggaaaacaccagaagtggatcaactggtgaaggaattacaactacccataactccaatacattggtacaattatcatatgatgttgcaaggcgttgctgataaatggggtatgaatgtgcaacaagtggaagggtattatcacaatctacttcacatgatatcgagagaaaacatatatattcacagcttcagaggctttggcaatcgttgaacatgattaattatttttaaaagggcggggatccctccccaaccccgg

SEQ ID NO: 527 - DNA, 500 bp, Persea americana alphaendornavirus 1
  source 1..500: mol_type = other DNA
gttcagcgagaaaccatcaatcaaaaatttacgtaatgatatagcctgtgaattcaatatgcaaagtaaggatgaatggagctacaacggtgcaactttttgtagcatgatactagctaaaacgtcggacacaacagcagaggtagcggctgacgtggtacgactgaaattcaggtatgaagtaacaaacggagcgcatgaaatgaacaaagaaaatgtagcaatgcgaaaccaatcgtatttgatgatgataggtgacatgccaaagacaagagatataattatgaaacatggttatgttatcaaaccagtacaatggtacggctacgatacaatgttagcagcggtagctgaaaagtataatatgacccatatccaagtggagggttacctacacaatttattggaaatgatagataaatcgagagtgtacagtcataaatttagagtgtttagcaacaaaccgtaattacgaagttaaagaggcccccccccccccc

SEQ ID NO: 528 - DNA, 500 bp, Lagenaria siceraria alphaendornavirus
  source 1..500: mol_type = other DNA
gaacttaaggaaaaatatcgcaactaaattcaacatgcaaagtaaagacgcatggtacagaaacggagcaacgttctgtagtatggtcatgagtcgcacaccaacaggtgcagagctatgccctgatgtggtcagactcaagtttagatatgaagtaaccaacggagtgcatgaggcgaacgcagaaaacatccttatgagaaaggcctcttacataatgatgttaggtgagggtccaaacgtaaaggagacagtcacaaggttaaatttgccaattaaaccattaatttggtacgattttgagtccatgttgcgagcagttggagacaaatatgatatgacgcacgtacaagtgctagatgtatattataatctgttacagatgattaattcggaaaagctgtataggcatacattcagacatttttcgaacatagaagcaaaataatggaaaataaataattttttgaggaaggtgttttaaaacccccccccccccc

SEQ ID NO: 529 - DNA, 500 bp, Yerba mate alphaendornavirus
  source 1..500: mol_type = other DNA
ttaaggaaggatattgcaacgaaattcaatatgcaaagcaaagataattggtgtaataacggggcgacattttgcagcatggtattatgtaaactgccaaatgacagggctgaattagctgcagatgtagtcaggcttaagcataggtatgaagttactaacggggctcatgaaagtacagcagaaaatttattaatgcgaaaggcatcatacttaatgatgctgggtgatataccaggtgtaaaggaagtggtcagtaatttaaacttaccggttaaaccaatagtatggtacgggtatgacactatgctacaagctgtggcagacaaatacgacatgacgaccgtacaagtggagggttattaccacaacttattagacatgatgagaaaagattataagaggagtataaaatacagattgtttgggaatcaatgaatcggaacataaaggagattcaagaaaatttagtttaaatgaggagatttcaatgaaacggc

SEQ ID NO: 530 - DNA, 500 bp, Hot pepper alphaendornavirus
  source 1..500: mol_type = other DNA
taagctaaacaatgaaacgaaaataaaacacaatatgatgtgcaaaccacatgtaagtaacactcacggtacattttgctgtatgatagcttgtattacacaagaaggaaattgctcattgggtccggacgtagtcaggttaagaagaagatttgaatgcccaaatggagtgagcgaaataacatcagacaatgctttggctagggcgatgtcttactacatgatgttgggagctactccagaagtgatgggagagattaaaactcagaatttacctatacagccaatgcggtggtatgatgtggatagtattagatcagctgtggctgataaatacaatatgagtgatgagcaagtgttgaatgaagaacggcaactattaaagatgttaagagagaggatttattataaacatgaagttctgcattggtttgaaggaatgtgaaaggtactaaccaaaattagtttgagttttcgggaggggagggcccccccccccc

SEQ ID NO: 531 - DNA, 500 bp, Hordeum vulgare alphaendornavirus
  source 1..500: mol_type = other DNA
caaacaaggaggtaaaaacccacggaaaattgttgtataacatgataatgaaacccaatacacacaataatgtcggcacattttgctgtttcaacatatacaagttgcccacaaaccgatggaccatgggccccgacattgcaagactgcgaagacggtttgaagtaactaacggggcgtcagaggccacccttgtcaatcatcacgcaaggtgcatgtcatattgttgtatgttaggatcaatattacccattcaacaattaatcaaggagaggggttacaccgtagagccaccaatgtggtatgattggaactccaacgcaagagccacagaggacaagtaccactggctaccagggaaaagtgacacagagctgcgcatgctgctggatatgatgagacaaacaaactacatcgatcataaactgttgcactgggtagaagcaacccgctagtgctcctacccacgttttggtgacgaacaagattgcccccccccc

SEQ ID NO: 532 - DNA, 500 bp, Cucumis melo alphaendornavirus
  source 1..500: mol_type = other DNA
ttcagtgagaagccagatacgtcaaatctcagaaaagatattgcaaccagcttcaacatgcaaagcaaagattcttgggtgataaatggagctactttttgcagtatggtaatgactagaactaactttggagccgaattagcaccagacgttgtgagacttaagttcagatatgaagtaccaaatggagtgcatgaggctacaccaaccaatgtactaatgagaaaagcttcgtatctaatgatgttgggtaaaggtcctaacgttgacgatacggttaggatgttaaacttacctatcaaaccaatagcatggtacaatttcgatcacatggtgaccgctgtggctcataagtataatatgaacgaggagcaggttagaggttattatgatcaattgttagccacaatcagaagtgacaacatttattcacatgtatttagacatttctctaataaatagtttcttaaggagaggaaaaatcctctctcccccccccc

SEQ ID NO: 533 - DNA, 500 bp, Winged bean alphaendornavirus 1
  source 1..500: mol_type = other DNA
tggtgaataccgactcgttgaatcgggagttgaaggttcaccacaatatgatgtgcaagccaaaactaagtagcgtggttggaacattttgttgtatgattgttgggaaaaatcacttaggtggagcaacactgggcccagactttgttcgattgagacgtagatttgaagtcacaaatggagtcagtgaagcaaatgacgacaacttaagagcgagaagtatgagttatttgatgttcttaggcgatatacctgaagtgcgagaaacagttgcaaacaaaaaattcagcatagagccacttaaatggtatgattacgactctgcagtctacgcaacggcatccaaatacgccattagtgagaccgaagtagaaaacaataagttacaattattagcaatgataaacaatccaatcacataccaaacagacgtgttgcattggtatgaaggtaaataagtgtttctcaagtgtgtgtgtggggtaaggaccccccccccc

SEQ ID NO: 534 - DNA, 500 bp, Lagenaria siceraria alphaendornavirus
  source 1..500: mol_type = other DNA
aatctaaggaaaaatatagcaactaagttcaacatgcaaagcaaagatgcatggtatcgaaatggagcaacattttgcagcatggtcatgagtcgcacaccaacaggcgctgagctatgtccagatgtggttagacttaaatttagatacgaagtgaccaatggagtgcatgaggcaaatgctgagaacattcttatgcgaaaagcgtcttacatcatgatgttaggtgaaggcccaaatgtgaaggagacggtcacaaaattgaacttgccgattaaaccattagtctggtatgactttgaatccatgttaagggcggttggagacaaatatgacatgtctcatgtgcaggtgttagatgtgtattataacttactacaaatgctaaattccgagaagttgtataggcacacatttagacatttttccaacatagaaggaaagtaatggaaggaaggataattttttgaggaaggtgtatagaacaccccccccccccc

SEQ ID NO: 535 - DNA, 500 bp, Phaseolus vulgaris alphaendornavirus 2
  source 1..500: mol_type = other DNA
acaacatgggtggataccactaagttgaataacgagctgaaaaccaaccataacatgatgtgcaaaccaagtttaagtcagactcatggtgtgttttgctgcatgatggcagcaataactgatgaaggtaattgcacactgggaccagatgtggtgcgattaagacgcagattcgagtgtccaaatggggtgagtgaaatgactcccgacaatgtacaagcgagatgcatggcgtattacatgatgctcggggctacacctgaagtgacacgagcaatacagcaacaacagttgcccatacaaccaattaaatggtatgatgcggacagtatacgtagtgcaaccatgagtaaatacaacatggatgccaaccaagttttgaacgaagagagattgttgctaggcatgttaagtgaacccaacagctttgcacacaaaatactacattggcacgaaggtcaatagcttgaattttcggggggtgggggcccccccccccc

SEQ ID NO: 536 - DNA, 500 bp, Bell pepper alphaendornavirus
  source 1..500: mol_type = other DNA
gagcatagatctcagtcgactaaacaatgagacaaagatcaaacacaatatgatgtgtaaaccacacgttagcaacacatacggagtgttttgttgcatgatcgcatgcataacacaacaaggtaattgctcactgggtccagatgtagtgcgcttacgacggcggttcgaatgccccaatggggtaagtgaaaccacatctgaaaatgcattagctagagcaatgtcatattacatgatgctgggtgcaactccagaagttatgaatgaagtaaaggttcagaatttgccaattcaaccggtcaaatggtatgacgtggatagcataaggtcagcagtcgctgagaaatataacatgagcgatgaagaggtcataaacgaagagcggcagcttttaaaaatgttaagagaaaggcagtactttaagcacgaagtgcttcactggtttgaaggaatttaaagccaggttaacaacaaaatttgagttttcggggagggag

SEQ ID NO: 537 - DNA, 500 bp, Phaseolus vulgaris alphaendornavirus 1
  source 1..500: mol_type = other DNA
ttaccaccatttgaagaatgacatcgcaaccatgtttaatatgcaaagcaaagaatcatggaatagcaactatgggactttttgtagtatgctatgtactaaattgccacaatgcaaagccgaaatgtgtcccgacttcgtgcgattgaaatttaggtatgaggtgactaatggagtgcatgaatgtaccaataataatatcatcatgaggaaagctagttatctaatgatgttaggtgatttacctgaagtccgaaacttgatcagagagctagaattgcctattaagcctgtcaaatggtataattatcattgtgccctaaccgcagctggacacaaatatgacatgcacccagaccaagttgaaggtaccttacatcaattactgcacttaatcaaagaagggaaattgcacaagtacacgtttagattatttgaaagtgggaagcatcattaacaatgatgcgataacatgaacccgaacggttcccccccccccc

SEQ ID NO: 538 - DNA, 500 bp, Phaseolus vulgaris alphaendornavirus 3
  source 1..500: mol_type = other DNA
tctgaccgactttgcgtagtacccaacgtcccgcgattggcatataagtgggaagtaccgaatggccagcatgagacgactgaggatgcagtcttcaccagacaactaagctactcttgcattttgggttctaacgaatttagtaaaagagtggagaaattgataaaagataaactaggaggggaattgcaagttccttcttattatgacggcagtgaaatgattcaactaaattgcaagtatcacaaattggaagagatggaagtcgtggaatgcttgaatacgctttatcagagaatagaaaaaccgaccacgaggcaagttacggctctgataactagtgagaacataagaaagggcgtcaaatcaatgagcagaatcaaggagctaacaggagattcggaccaatttgaacacaggagactaatagacgactagctaatcgatgcactccaaattaaagtacaccaagaaatcaactttctcgccccccccccccc

SEQ ID NO: 539 - DNA, 500 bp, Helianthus annuus alphaendornavirus
  source 1..500: mol_type = other DNA
taagcagaaaccgaatcgatagctcgaagcagtcaaaaataagcaaagattattacaacatggtcagcaaggccagtcacgatagagaccaaggaacattccttcaattattatgttaccacaacccacaaggagtactggagtttggcccagacgtaatcagactagcacaaaggtacgaggtgacaaatggagtaagtgagtcgaacaatcacaacatgttggctagaacgatgagctactgtatgttgatagggaaaacaatgggaaccaaggctgtggtgaccaagcatgggttaccaatagatttaaaaaccacctgcagcatggcctcagctagaagagcttgtgcgattaaaaggaagatgactcttggagaggtggagagttacgagagttatttatacagaatgatgaaagacctcaaaacacacacctggatttttaaacacctagcgtgagactgcaagtagagaattggagagggatttccccccccc

SEQ ID NO: 540 - DNA, 500 bp, Cluster bean alphaendornavirus 1
  source 1..500: mol_type = other DNA
cggaatattgatgagtgacaggaaattggatgcagaggacctaaagacatatgggaagaagtactgtaacatgattttgaagcctaaagtgtcaaaaaatagtgcaacattttgttgcttcacgatttatcggactagaagaggcaactttgcactagggcccgacccaatacggttgaaacggaggttcgaggtgacgaacggcgtcagccagatgaccaaacaaaacgttgaggcccgtacgatgtcttattgcatgatgttaggagacataaaagagacatccaacgttattaacaagctgtcattgccaatcaaaccagtcaagtggtacgacgttcaggagtgttttaaagcgagcgatgaaaagcacggtgagtacatgggttgcagcgaagattgtgtgtcccagttgtgtaacatgatgattaacccagttttatatgagtacaccatgactcactggagtgagtcacagtgagaagaagggtgcccccccc

SEQ ID NO: 541 - DNA, 500 bp, Basella alba alphaendornavirus 1
  source 1..500: mol_type = other DNA
atttgaagtataatatagctgtaaattataatatgcaatctaaagaatcctggaacgaagcatttggaaatttctgttccatgcttttatcccccttaacaaataaaagatgtgaattatgtcctgacgtggttagactaaaattccgatacgaggtaacaaatggggtacacgagatgaacgatttgaataacttgatgaggaaagcctcctatattatgatgctggggcaaactccttggaccaaggaaatcgtaaaggatttagacctaccaatacaacctgtagagtggtacagttatgaagacatgattaaaaccgtgggagctaagtatgaaatgaacgaataccaagtagaaggatatttgcacaacttgttgaacctgttaaaatctaaagaatattattcacacaagttccgcatgttcagcaataggacaggtacaaaactatactaacgttttgatagaggttataaacccctaccgggcccccccccc

SEQ ID NO: 542 - DNA, 260 bp, Bell pepper alphaendornavirus
  source 1..260: mol_type = other DNA
cagaagttatgaatgaagtaaaggttcagaatttgccaattcaaccggtcaaatggtatgacgtggatagcataaggtcagcagtcgctgagaaatataacatgagtgatgaagaggtcataaatgaagagcggcagcttttaaaaatgttaagagaaaggcagtactttaagcacgaagtgcttcactggtttgaaggaatttaaagccaggttgacaacaaaatttgagttttcggggagggagggcccccccccccc

SEQ ID NO: 543 - DNA, 249 bp, Cucumis melo alphaendornavirus
  source 1..249: mol_type = other DNA
taaaggtcctaacgttgacgatacggttaggatgttaaacttacctatcaaaccaatagcatggtacaatttcgatcacatggtgaccgctgtggctcataagtataatatgaacgaggagcaggttagaggttattatgatcaattgttagccacaatcagaagtgacaacatttattcacatgtatttagacatttctctaataaatagtttcttaaggagaggaaaaatcctctctcccccccccc

SEQ ID NO: 544 - DNA, 671 bp, Bell pepper alphaendornavirus
  source 1..671: mol_type = other DNA
ttaagtcaaatttgtactggggccaaggagaaggtatgcggttgactggacaggctacgactgcacttggcaattgtttgaccaatcttcaagtacaccaaaactttacgaagacaaattttcgtatattgcaactagggttatttttaggggatgatatgtgtatggtgttcagtgagaagccagacacgtcaaacctcagaaaagatattgcaaccagcttcaacatgcaaagcaaagactcttgggtgataaacggagctactttttgcagtatggtaatgactagaaccaactttggagccgaattagcaccagacgttgtgagactcaagttcagatatgaagtaccaaatggagtgcatgaggctacaccaactaatgtactaatgagaaaagcttcatatctaatgatgttgggtaaaggtcctaacgttgacgatacggttaggatgttaaacttacctatcaaaccaatagcatggtacaacttcgatcacatggtgaccgctgtggctcataagtataatatgaatgaggagcaggttagaggttattatgatcaattgttagccacaatcagaagtgacaacatttattcacatgtgtttagacatttctctaataaatagtttcttaaggagaggaaaaatcctctctccccccccccc

SEQ ID NO: 545 - DNA, 259 bp, Bell pepper alphaendornavirus
  source 1..259: mol_type = other DNA
cagaagttatgaatgaagtaaaggttcagaatttgccaattcaaccggtcaaatggtatgacgtggatagcataaggtcagcagtcgctgagaaatataacatgagtgatgaagaggtcataaatgaagagcggcagcttttaaaaatgttaagagaaaggcagtactttaagcatgaagtgcttcactggtttgaaggaatttaaagccaggttaacaacaaaatttgagttttcgggggagggagggcccccccccc

SEQ ID NO: 546 - DNA, 22 bp, Bell pepper alphaendornavirus
  source 1..22: mol_type = other DNA
cagaagttatgagtgaagttaa

SEQ ID NO: 547 - DNA, 246 bp, Bell pepper alphaendornavirus
  source 1..246: mol_type = other DNA
cagaagttatgaatgaagtaaaggttcagaatttgccaattcaaccggtcaaatggtatgacgtggatagcataaggtcagcagtcgctgagaaatataacatgagcgatgaagaggtcataaacgaagagcggcagcttttaaaaatgttaagagaaaggcagtactttaagcacgaagtgcttcactggtttgaaggaatttaaagccaggttaacaacaaaatttgagttttcggggagggag

SEQ ID NO: 548 - DNA, 275 bp, Phaseolus vulgaris alphaendornavirus 3
  source 1..275: mol_type = other DNA
caactaaattgcaagtatcacaaattggaagagatggaagtcgtggaatgcttgaatacgctttatcagagaatagaaaaaccgaccacgaggcaagttacggctctgataactagtgagaacataagaaagggcgtcaaatcaatgagcagaatcaaggagctaacaggagattcggaccaatttgaacacaggagactaatagacgactagctaatcgatgcactccaaattaaagtacaccaagaaatcaactttctcgccccccccccccc

SEQ ID NO: 549 - DNA, 220 bp, Persea americana alphaendornavirus 1
  source 1..220: mol_type = other DNA
attatgaaacatggttatgttatcaaaccagtacaatggtacggctacgatacaatgttagcagcggtagctgaaaagtataatatgacccatatccaagtggagggttacctacacaatttattggaaatgatagataaatcgagagtgtacagtcataaatttagagtgtttagcaacaaaccgtaattacgaagttaaagaggcccccccccccccc

SEQ ID NO: 550 - DNA, 260 bp, Bell pepper alphaendornavirus
  source 1..260: mol_type = other DNA
cagaagttatgaatgaagtaaaggttcagaatttaccaattcaaccggtcaaatggtatgacgtggatagcataaggtcagcagtcgctgagaaatataacatgagtgatgaagaggtcataaatgaagagcggcagcttttgaaaatgttaagagaaaggcagtactttaagcacgaagtgcttcactggtttgaaggaatttaaagccaggttaacaacaaaatttgagttttcggggaggaagggccacccccccac

SEQ ID NO: 551 - DNA, 247 bp, Winged bean alphaendornavirus 1
  source 1..247: mol_type = other DNA
tgaagtgcgagaaacagttgcaaacaaaaaattcagcatagagccacttaaatggtatgattacgactctgcagtctacgcaacggcatccaaatacgccattagtgagaccgaagtagaaaacaataagttacaattattagcaatgataaacaatccaatcacataccaaacagacgtgttgcattggtatgaaggtaaataagtgtttctcaagtgtgtgtgtggggtaaggaccccccccccc

SEQ ID NO: 552 - DNA, 200 bp, Cluster bean alphaendornavirus 1
  source 1..200: mol_type = other DNA
gctgtcattgccaatcaaaccagtcaagtggtacgacgttcaggagtgttttaaagcgagcgatgaaaagcacggtgagtacatgggttgcagcgaagattgtgtgtcccagttgtgtaacatgatgattaacccagttttatatgagtacaccatgactcactggagtgagtcacagtgagaagaagggtgcccccccc

SEQ ID NO: 553 - DNA, 262 bp, Oryza sativa alphaendornavirus
  source 1..262: mol_type = other DNA
gataaattagtaaatgatctccaattacccatcaatcccgtacactggtacaattatcacacgatgttacagggcgttgctgacaaatgggacatgaacatacaacaagttgaggggtattatcataacttgatctacatgatatctaaagacgacatttatcaacataactttagaggattcggtaatagatgaatattataactaactctgttttgtcaatttatttttaaaaggatggggcacccctcccaaaccccgg

SEQ ID NO: 554 - DNA, 243 bp, Oryza rufipogon alphaendornavirus
  source 1..243: mol_type = other DNA
gatcaactggtgaaggaattacaactacccataactccaatacattggtacaattatcatatgatgttgcaaggcgttgctgataaatggggtatgaatgtgcaacaagtggaagggtattatcacaatctacttcacatgatatcgagagaaaacatatatattcacagcttcagaggctttggcaatcgttgaacatgattaattatttttaaaagggcggggatccctccccaaccccgg

SEQ ID NO: 555 - DNA, 250 bp, Cucumber endornavirus
  source 1..250: mol_type = other DNA
aaaaggtccgaatgtcgaggaaacggtaaagctgttgaacttaccgataaaaccaatagcatggtacaactatgattatatggtaacctctgtggcttacaagtacaatatgacagatgaacaggtgaggggttattatgatcaacttctagcattaattagaagtgaccaaatttactcacatgtgtttagacatttttcgaataagtagtttcttaagaagggttattaaaacccccctccccccccc

SEQ ID NO: 556 - DNA, 260 bp, Bell pepper alphaendornavirus
  source 1..260: mol_type = other DNA
cagaagttatgaatgaagtaaaggttcagaatttgccaattcaaccggtcaaatggtatgacgtggatagcataaggtcagcagtcgctgagaaatataacatgagtgatgaagaggtcataaatgaagagcggcagcttttaaaaatgttaagagaaaggcagtactttaagcatgaagtgcttcactggtttgaaggaatttaaagccaggttaacaacaaaatttgagttttcggggagggagggccacccccgcac

SEQ ID NO: 557 - DNA, 245 bp, Fagopyrum esculentum endornavirus
  source 1..245: mol_type = other DNA
cttgatgggtaagacgaaagggacagaaagggtgatcaaaacattaggtctgccaatcagaccaacccacacatgtgacatagctgctgcacggcaggcagtggccacgaagaggaacatgacgatacatgaagtggagggagcagagcatcatctgtacgagatgatggagaaccagcgggtataccactgggaattcctccactacatggacgactgagtattgaaggggttcaccccccccc

SEQ ID NO: 558 - DNA, 248 bp, Capsicum frutescens endornavirus
  source 1..248: mol_type = other DNA
acccgaagtaatgagagatgttgtcagccaaaaattgcccatcaaaccaactaaatggtacgatgtagactccataaggtccgcagtggcagacaagtacaatatgagtgatgaacaagttttgaatgaggaaaggcaattgctgcaaatgttgcgagaacgcaacagctttaaacataacatattgcattggtatgaaggtgtttagtaataaatagtttgagtttttgggaagggagggccccccc

SEQ ID NO: 559 - DNA, 247 bp, Cucumis melo alphaendornavirus
  source 1..247: mol_type = other DNA
ggtcctaacgttgacgatacggttaggatgttaaacttacctatcaaaccaatagcatggtacaacttcgatcacatggtgaccgctgtggctcataagtataatatgaacgaggagcaggttagaggttattatgatcaattgttagccacaatcagaagtgacaacatctactcacatgtgtttagacatttctctaataaatagtttcttaaggagaggatttttcctctctcttaagaaacta

SEQ ID NO: 560 - DNA, 238 bp, Bell pepper alphaendornavirus
  source 1..238: mol_type = other DNA
cagaagttatgaatgaagtaaaggttcagaatttgccaattcaaccggtcaaatggtatgacgtggatagcataaggtcagcagtcgctgagaaatataacatgagcgatgaagaggtcataaacgaagagcggcagcttttaaaaatgttaagagaaaggcagtactttaagcacgaagtgcttcactggtttgaaggaatttaaagccaggttaacaacaaaatttgagttttcgg

SEQ ID NO: 561 - DNA, 252 bp, Capsicum frutescens endornavirus
  source 1..252: mol_type = other DNA
accagaagtggtgagagatgttgtcagccaacaattgcccatcaaaccaactaaatggtatgatgtagactccataaggtccgcggtggcagacaagtacaatatgagtgatgaacaagttttgaatgaggaaaggcaattgctgcaaatgttgcgagaacgcaacagcttcaaacataacatattgcattggtatgaaggtgtttagtaataaatagtttgagtttttgggaggggagggccccccccccc

SEQ ID NO: 562 - DNA, 243 bp, Capsicum frutescens endornavirus
  source 1..243: mol_type = other DNA
accagaagtggtgagagatgttgtcagccaacaattgcccatcaaaccaactaaatggtatgatgtagactccataaggtccgcggtggcagacaagtacaatatgagtgatgaacaagttttgaatgaggaaaggcaattgctgcaaatgttgcgagaacgcaacagcttcaaacataacatattgcattggtatgaaggtgtttagtaataaatagtttgagtttttgggaggggagggcc

SEQ ID NO: 563 - DNA, 216 bp, unidentified
  source 1..216: mol_type = other DNA
aagtggcagcgttaataaagcgtaaagggtggaaaatagaaccaatgcgttggtatgatatggactctatagtgtccgcttgtgcttccaagtataacgtgtcagtggatagtgtttgggacaattatcatgaactgattgatcttatgggacaacaacatgtgtatcagcacaattttttgcattgggtagaaaaactataaagatgagtgtggg

SEQ ID NO: 564 - DNA, 233 bp, unidentified
  source 1..233: mol_type = other DNA
gacgctgccacaatggtaccatcaagacactgcaatagcagcaaattgtgaataccatggtgaaactgaatgggagacacgagcgcacatttcagcactcagggatatgttagagaaacaggtggccaacagaaaacagataatgacctggagtgcggtgtaacgggttgtctagtcatacaatttaatttcattgcgggagcaaatcgtgagcatgtcggtgcgttgtcttt

SEQ ID NO: 565 - DNA, 251 bp, Bell pepper alphaendornavirus
  source 1..251: mol_type = other DNA
cagaagttatgaatgaagtaaaggttcagaatttgccaattcaaccggtcaaatggtatgacgtggatagcataaggtcagcagtcgctgaaaaatataacatgagcgatgaagaggtcataaatgaagagcggcagcttttaaaaatgttaagagaaaggcagtactttaagcacgaagtgcttcactggtttgaaggaatttaaagccaggttaacaacaaaatttgagttttcggggagggagggccc

SEQ ID NO: 566 - DNA, 267 bp, Brown algae endornavirus
  source 1..267: mol_type = other DNA
aaaagaatatgaatggccaatcactactaccacttggtatgaccaactatccaatttgcaagctaatgccgagtataatgaaatatctcaggagcaagtcctcagttacaagcaaaatttaatcgcttacttgaaagaattcaacacctacaaatcggtttattggacagtagacacagaaaaaagataacaaccaaacattggctcatcacctacatcggcacacgttgcaggtgtgagtacaattcagttccgcccccccccccc

SEQ ID NO: 567 - DNA, 238 bp, Brown algae endornavirus
  source 1..238: mol_type = other DNA
caattaaaccagagcagtggtatgaacaaaacactctaatccaggcaactgcaaaaatatataacaccgatgagaactatgtaattgacaactataataaactgatgcaaatgattgacaatcaacaaatatttgaacatgaatttactcagtatgaagctagcagaaaaatgtaatctgccaatcggccaagttgattatatttaatcaacttggaaaatagatgtgtgtgtgtggc

SEQ ID NO: 568 - DNA, 250 bp, Bell pepper alphaendornavirus
  source 1..250: mol_type = other DNA
cagaagttatgaatgaagtaaaggttcagaatttgccaattcaaccggtcaaatggtatgacgtggatagcataaggtcagcagtcgctgagaaatataacatgagtgatgaagaggtcataaatgaagagcggcagcttttaaaaatgttaagagaaaggcagtactttaagcatgaagtgcttcactggtttgaaggaatttaaagccaggttaacaacaaaatttgagttttcggggagggagggtc

SEQ ID NO: 569 - DNA, 855 bp, Lily alphaendornavirus
  source 1..855: mol_type = other DNA
aatgataaagcttaactgtgatttgcacaacatggaggaaatgcagatggtgcaaataatcagcaaattatactcaagcttgcagaaacccaaaacatattcttacactttcctaataacgagcgagaacctcaggaagggaattcgacttaggaaagaaagtgataccctgaacaccaccgaatcccgaattcatcacagactagacgaagaaaatcactaatcatcttattttaattgaacgagcccaatacccggaacgttggaatagccattcctcgtcaagacacatatgccatgcctatgtggcttcacgaagactggtcgttccactttctgtcacctgtaatcgctacgcaagcgccattaatgtgaaccgtggctaattatcagactgctgcgtcatctgtaagtagccattcttcaattactggccgcattgcagtacgagaaacaagcttgacagaaagctggaaacggcaaagtgacgttgagtcactttgtcgcgttacagccgaccagttacgggcatacttattgaacgagcccaatacccggaacgttggaatagccattcctcgtcaagacacatatgccatgcctatgtggcttcacgaagactggtcgttccactttctgtcacctgtaatcgctacgcaagcgccattaatgtgaaccgtggctaattatcagactgctgcgtcatctgtaagtagccattcttcaattactggccgcattgcagtacgagaaacaagcttgacagaaagctggaaacggcaaagtgacgttgagtcactttgtcgcgttacagccgaccagttacgggcatacttattcagtgttataacaggc

SEQ ID NO: 570 - DNA, 208 bp, Phaseolus vulgaris alphaendornavirus 2
  source 1..208: mol_type = other DNA
acctgaagtgacacgagcaatacagcaacaacagttgcccatacaaccaattaaatggtatgatgcggacagtatacgtagtgcaaccatgagtaaatacaacatggatgccaaccaagttttgaatgaagagagattgttgctaggcatgttgcgtgaacccaacagctttgcacacaaaatactacattggcacgaaggtcaatag

SEQ ID NO: 571 - DNA, 235 bp, Basella alba alphaendornavirus 1
  source 1..235: mol_type = other DNA
tttagacataccaattaaacctgtagaatggtacagttatgaagacatgatcaaaaccgtgggagctaagtatgaaatgaacgaatatcaggtggaaggatatttgcacaacttgttgaacctgttaaaatttaaagaatattattcacacaagttccgtatgttcagcaataggacaggtacaaaactatactaacgttttgatagaggtttgaaacctctaccggggcccccc

SEQ ID NO: 572 - DNA, 247 bp, Pumpkin alphaendornavirus
  source 1..247: mol_type = other DNA
gtaaaggtcctaatgttgacgatacggttaagatgttaaacttacctatcaaaccaatagcatggtacaactttgatcacatggtgaccgctgtggctcataagtataatatgaacgaggagcaggttagaggttattatgatcaattgttagccacaattagaagtgataacatttattcacatgtatttagacatttctctaataaatagtttcttaaggagaggaaaaatcctctctccccccc

SEQ ID NO: 573 - DNA, 261 bp, Oryza sativa alphaendornavirus
  source 1..261: mol_type = other DNA
ataaattagtaaatgatctccaattacctatcaatcccgtacactggtacaattatcacacgatgttacagggcgttgctgacaaatgggacatgaacatacaacaagttgaggggtattatcataacttgatctacatgatatctaaagacgacatttatcaacataactttagaggattcggtaatagatgaatattataactaactctgttttgtcaatttatttttaaaaggatggggcacccctcccaaaccccgg

SEQ ID NO: 574 - DNA, 260 bp, Oryza sativa alphaendornavirus
  source 1..260: mol_type = other DNA
ataaattagtaaatgatctccaattacctatcaatcccgtacactggtacaattatcacacgatgttacagggcgttgctgacaaatgggacatgaacatacaacaagttgaggggtattatcataacttgatctacatgatatctaaagacgacatttatcaacataactttagaggattcggtaatagatgaatattataactaactctgttttgtcaatttatttttaaaaggatggggcacccctcccaaaccccg

SEQ ID NO: 575 - DNA, 241 bp, Pterostylis alphaendornavirus
  source 1..241: mol_type = other DNA
cgccagtagcacaaataattaacagcaatggctggcctattgaaccacatgagtggtattcaacggctgagtgttgggctgctgcggaaagattgaacgggttggaatggggtgatgcggaagcacacataaacaaattaatagatatgatggccaattttaatccatttgacagaaaaattctacattggactgaacgctgggagtaagaagggaggagcaggtgaggggcccccccccc

SEQ ID NO: 576 - DNA, 260 bp, Bell pepper alphaendornavirus
  source 1..260: mol_type = other DNA
cagaagttatgagtgaagtcaaagttcaaaacttgccaattcaaccggtcaaatggtatgacgtggacagcataaggtcagcagtcgctgaaaaatataacatgagtgatgaagaagtcataaatgaagagcggcagcttttgaaaatgctaagagaaaggcattattttaagcacgaagtgcttcactggtttgaaggaatttaaagccaggataaaattaaaatttgagttttcggggagggagggcccccccccccc

SEQ ID NO: 577 - DNA, 238 bp, Triticeae associated alphaendornavirus
  source 1..238: mol_type = other DNA
ctccggaagtgatgaacatggtcaccatcaatgggtggcccatagaacccttgagatggtatgacgttgacaccactatacaagcttgtagggacaaatacagcatggaggacaatgaagtgtacaacaattatcatgaattaatacaaatgatgaacactatgcgcacgtatgatcatgacttcttgcattgggaggaaaaatggtaaagattgaatgaggaaggcaaagccccccc

SEQ ID NO: 578 - DNA, 244 bp, Hordeum vulgare alphaendornavirus
  source 1..244: mol_type = other DNA
acaattgatcaaggagaggggttacaccgtagagccaccaatgtggtatgactggaactccaatgcaagagccacagaggacaagtaccactggctaccggggaaaagtgacacagagctgcgcatgctgctggatatgatgagacaaacaaactacatcgatcacaaactgttgcactgggtggaagctacccgctagtgctcctacccacgttttggtgacgaacaagattgccccccccct

SEQ ID NO: 579 - DNA, 244 bp, Hordeum vulgare alphaendornavirus
  source 1..244: mol_type = other DNA
acaattgatcaaggagaggggttacaccgtagagccaccaatgtggtatgactggaactccaatgcaagagccacagaggacaagtaccactggctaccggggaaaagtgacacagagctgcgcatgctgctggatatgatgagacaaacaaactacatcgatcacaaactgttgcactgggtggaagctacccgctagtgctcctacccacgttttggtgacgaacaagattgcccccccctc

SEQ ID NO: 580 - DNA, 252 bp, Cucumis melo alphaendornavirus
  source 1..252: mol_type = other DNA
taaaggtcctaacgttgacgatacggtcaggatgttaaacttacctatcaaaccaatagcatggtacaacttcgatcatatggtgaccgctgtggctcataagtataatatgaacgaggagcaggttagaggttattatgatcaattgttagccacaatcagaagtgacaacatttattcacatgtgtttagacatttctctaataaatagtttcttaaggagaggaaaaatcctctccccccccccagatt

SEQ ID NO: 581 - DNA, 235 bp, Phaseolus vulgaris alphaendornavirus 1
  source 1..235: mol_type = other DNA
tgatcagagagctagaattgcctattaagcctgtcaaatggtataattatcattgtgccctaaccgcagctggacacaaatatgacatgcacccagaccaggttgaaggcaccttacatcaattactgcacttaatcaaagaagggaaattgcacaagtacacgtttagattatttgaaagtgggaagcatcattaacaatgatgtgataacatgaacccgaacggttccccccc

SEQ ID NO: 582 - DNA, 240 bp, Phaseolus vulgaris alphaendornavirus 2
  source 1..240: mol_type = other DNA
acctgaagtgacacgagcaatacagcaacaacaattgcccatacaaccaattaaatggtatgatgcggacagcatacgtagtgcaaccatgagtaaatacaacatggatgccaaccaagttttgaacgaagagagattattgctaggcatgttgcgtgaacccaacagctttgcacacaaaatactacattggcatgagggtcaatagcttgaattttcggggggtgggggccccccccc

SEQ ID NO: 583 - DNA, 259 bp, Bell pepper alphaendornavirus
  source 1..259: mol_type = other DNA
cagaagttatgagtgaagttaaagttcaaaacttaccaattcaaccggtcaaatggtatgacgtggatagcataaggtcagcagtcgctgaaaaatataacatgagtgatgaagaagtcataaacgaagagcggcagcttttgaaaatgctaagagaaaggcaatattataagcacgaagtacttcactggtttgaaggaatttaaagccaggacaaaattaaaatttgagttttcggggagggagggccccccccccc

SEQ ID NO: 584 - DNA, 246 bp, Bell pepper alphaendornavirus
  source 1..246: mol_type = other DNA
cagaagttatgaatgaagtaaaggttcagaatttgccaattcaaccggtcaaatggtatgacgtggatagyataaggtcagcagtcgctgagaaatataacatgagygatgaagaggtcataaaygaagagcggcagcttttaaaaatgttaagagaaaggcagtactttaagcaygaagtgcttcactggtttgaaggaatttaaagccaggttaacaacaaaatttgagttttcggggagggag

SEQ ID NO: 585 - DNA, 246 bp, Bell pepper alphaendornavirus
  source 1..246: mol_type = other DNA
cagaagttatgaatgaagtaaaggttcaraatttgccaattcaaccggtmaaatggtatgacgtggatagcataagrtcagcagtcgctgagaaatataacatgagcgatgaagaagttataaatgaagagcggcagcttttgaaaatgttaagagaaaggcagtactttaagcacgaagtgcttcactggtttgaaggrrtttaaagccagkytaacaacaaaatttgagttttcggggagggag

SEQ ID NO: 586 - DNA, 244 bp, Helianthus annuus alphaendornavirus
  source 1..244: mol_type = other DNA
gaaaacaatgggaaccaaggctgtggtgaccaagcatgggttaccaatagatttaaaaaccacctgcagcatggcctcagctagaagagcttgtgcgattaaaaggaagatgactcttggagaggtggagagttacgagagttatttatacagaatgatgaaagacctcaaaacacacacctggatttttaaacacctagcgtgagactgcaagtagagaattggagagggatttccccccccc

SEQ ID NO: 587 - DNA, 246 bp, Bell pepper alphaendornavirus; identical to SEQ ID NO: 547
  source 1..246: mol_type = other DNA

SEQ ID NO: 588 - DNA, 264 bp, Lagenaria siceraria alphaendornavirus
  source 1..264: mol_type = other DNA
aaatgtgaaggagacggtcacaaaattgaacttgccgattaaaccattagtctggtatgactttgaatccatgttaagggcggttggagacaaatatgacatgtctcatgtgcaggtgttagatgtgtattataacttactacaaatgctaaattccgagaagttgtataggcacacatttagacatttttccaacatagaaggaaagtaatggaaggaaggataattttttgaggaaggtgtatagaacaccccccccccccc

SEQ ID NO: 589 - DNA, 234 bp, unidentified
  source 1..234: mol_type = other DNA
acccgaagtgatgagagatgttgtcagccaacaattgcccatcaaaccaattaagtggtatgatgtagactccataaggtccgcagtggcagacaaatacaacatgagtgatgaacaagttttgaatgaggaaaggcaattattgcaaatgttgcgagaacgtaacagctttaaacatgacatattgcattggtatgaaggtgtttagtaatgaatagtttgagtttttgggag

SEQ ID NO: 590 - DNA, 252 bp, unidentified
  source 1..252: mol_type = other DNA
ctacagcaaacttaaagaaatggaattcacggatctattgaattcgttatacaatagaatacttaaaccggaaactatacaagtaaaattcctaatcacatcggagaatataagaaaaggaatcaagaagatgagccaagtgaaaagcagtgatcatgaaccggagagtaaatgccacgtgagattgacggttgacgctgattaacaggactggaaaataatccgattgcaaaatttctctcgccccccccc

SEQ ID NO: 591 - DNA, 628 bp, unidentified
  source 1..628: mol_type = other DNA
attgtacttcgttcagttgctgaattggtgtttatggtcataaataccgtgacaagaaagttgtcggtgtctttgtgacttgcctgtcgctctgtcttctttttttttttttttattttttttttttttttttttttttttttttttttttttttttttttttttttttttttttttttttttggaggtctaccgagaaccgaacccaggtcgctggattcaaagtccagagtgctaaccactacaccatagaacccccagcaatatcagcaccaacagagcttacaagaacaccgacaactttccttgtccctattgtacttcgttcagttgctgaattggtgtttatggtcataaataccgtgacaagaaagttgtcggtgtctttgtgacttgcctgtcgctctgtcttctttttttttttttttattttttttttttttttttttttttttttttttttttttttttttttttttttttttttttttttttttggaggtctaccgagaaccgaacccaggtcgctggattcaaagtccagagtgctaaccactacaccatagaacccccagcaatatcagcaccaacagagcttacaagaacaccgacaactttccttgtccct

SEQ ID NO: 592 - DNA, 140 bp, Oryza sativa alphaendornavirus
  source 1..140: mol_type = other DNA
atattataactaactctgttcaattaatttattaaaggatggggcaccccctcccaaacccggcaaaatcccatcccatacatcccaccatatcatctatatccatttcacttacatcccatcccccaacccttttaaac

SEQ ID NO: 593 - DNA, 77 bp, unidentified
  source 1..77: mol_type = other DNA
tattataactaactctgttctgttaatttatttttaaaaggatggggcacccctcccaaaccccgagatcggaagag

SEQ ID NO: 594 - DNA, 69 bp, unidentified
  source 1..69: mol_type = other DNA
agttcatgaatagctgatttcaattaatttatttttaaaagggtggggtccccctcctcaaccccggcc

SEQ ID NO: 595 - DNA, 101 bp, Bell pepper alphaendornavirus
  source 1..101: mol_type = other DNA
tgttaagagaaaggcagtactttaagcacgaagtgcttcactggtttgaaggaatttaaagccaggttaacaacaaaatttgagttttcggggagggaggg

SEQ ID NO: 596 - DNA, 540 bp, Oryza sativa alphaendornavirus
  source 1..540: mol_type = other DNA
atagtatggcaaaggaaagcagtttgtagtttatttgccaaattgtttgtaagatgcaaagacagactgaaaactttacttgtggatcatatactttacgtagatggattgagaccagatgaaatatcagccaaattaagacaaatatctgatgtatttggattttttgaaaacgacctgactaagcaagatagacaaactgacaaacccattttagaagtggaaatgttgatgtatcttatgttgggcgttcatcctaacatcatatctagttggcgttcaagtcatgatgattggagattcaaatctacaaattattggggtaagagcacggcaatgagattaacgggacaagctacaaccgcactaggaaattgtatcactaatatgcaagtacactcaaaatttgtaatcaaaaataaatattggttaaagtttgctttatttcttggggatgatatgtgtatgggtttctcacacaagccaaacacacagcacttacgccaggatatagcttgtaaatttaatatgcaaagtaaa

SEQ ID NO: 597 - DNA, 633 bp, Vicia faba alphaendornavirus
  source 1..633: mol_type = other DNA
atcgtgtggcaaccaaaagaactgtgcgccctaatgtcaccagcctttatagccatcaagcgaaggctgaaagaggtgctccgagatgagatcgtctacaccgacggtctgacaccagacatgctgtcggctcgcgctagaaccatccagtacgactacgtgtttgaagatgaccttgtaatacaagacaggcagacggatcaagaactaattgatttagaattccaagtgatgttggatttagggctcgacattaatttagcaaacttatggagactagttcacaacaagtggagattcaaaggtcaacacagctggggccaactagacgctatgaggctcacaggtcaagctacgacagctcttggaaacgcaataaccaacctgtgtgtgcacagcagctttgttattgaacacaggcaggcgataaaactgatgtttgtgctaggcgatgacaacattacattcatgtcagcggagccaaacctcacaaagtacaaaagattgatgagcgaaagatacaacatgcgaagcaagccccaggttagcaggaacgtcggcacattttgcagcttactgtgctaccgaaacagcttcggtcattgtgaggtagggccagactttgtacggtta

SEQ ID NO: 598 - DNA, 648 bp, Oryza rufipogon alphaendornavirus
  source 1..648: mol_type = other DNA
atagtgtggcaaaggaaggcagtttgtggtctgtttgctaaactttttgtgagatgtaaggaaagattgaaaaccctactattggaccacatactctatgtagatggactaagaccagatgaaatatcagccaaactgagacaaatatccaatgtgtttggtttcttcgaaaatgatttaactaaacaagacagacagactgataaaccaatacttgaagtggaaatgttgatgtacttgatgttaggtgttcaccctaatattatcgctagctggcgtgcaagccatgaagattggagatttaaatcaacaaactactggggcaagagtacagccatgagactcactggacaagctaccacagcccttggaaattgtatcacaaacatgcaagttcactcgaagtttgtcattaagaataagtactggttaaaatttgctttatttcttggcgatgacatgtgtatgggtttttcacacaaaccaaacacacaacatttacgccaggacatagcttgcaaatttaatatgcaaagcaaggactcatgggtactcaatggggctactttttgtagtatggtagtttacaaaacaaatgatgacgtagttgaaattggtcctgatgtagtcaggatgaaattcaggttt

SEQ ID NO: 599 - DNA, 906 bp, Persea americana alphaendornavirus 1
  source 1..906: mol_type = other DNA
ttttgtgacacctacttcaacccaaactggagaagccaagccgccatgtaccaagagaacaacttgattatcgaagagagtgatgtgagggcatggatagaagatagcaaagatagcaacaaaatagtaaaagaattaaaggaactgttagccggggagatgttgataaagcccatgaatgatgtcaacgtccacttaaaactagagagcttgctgaaagctaatccaattaatgtgactaaagaacagcaggcaagagtgatagtgtggcaaaggaagtgtgtatgcgccctgtatgctagattattccttaagatcaaatcacggctaaaagagatattgcatgagaaaattgtgtacgcggatggtctaacaccagatgacatatcagcaagagtcaggttgtgtaacaacgttaatggattcttcgagaatgatctgacaaagcaagacagacaaactgaccgagatatcatcaacatggaaatgcttgtgtatattgtgttgggagccaatccaagcattatatcttcatggagggagatgcacgaagtatggagattcaaatcggccaattactggggtgaaggaaaagagatgcgactatcaggccaagccacaacagcactcggaaacgtgataacgaatttacaggtgcattgcaaatttgtaaagaagaattcaatatccatgcagttgggactatttctaggtgatgacatgtgtatgttgttcagcgagaaaccatcaatcaaaaatttacgtaatgatatagcctgtgaattcaatatgcaaagtaaggatgaatggagctacaacggtgcaactttttgtagcatgatactagctaaaacgtcggacacaacagcagaggtagcggctgacgtggtacgactgaaattcagg

SEQ ID NO: 600 - DNA, 642 bp, Lagenaria siceraria alphaendornavirus
  source 1..642: mol_type = other DNA
atagtttggcaaaggaaagctgtatgtgctatatactcaaatttgttcgtcaaagtgaaggatagattgaaatctatattacatgataaaataatttacgctgacgggttaagaccagatgaaatctcagcaagagtgaggctgtgcaaagatatagctggtttctttgaaaatgacttaactaaacaagataggcaaactgacgcgccaattataactacagaaatgtacatgtatgacttattgggagtacaccctaatgtgatagcttcttggagggaaatgcatgaagtttggagattcaaatcgaatcactactgggggcaaggtcaaggcatgagattgactggacaagcaactacagccattggtaattgcataaccaatttacaggtgcaccaagaatttgtcaagaaaaatttttctattttagaattagctttatttctaggagatgacatgtgcatggttttcagagagaaaccagacacaaagaacttaaggaaaaatatcgcaactaaattcaacatgcaaagtaaagacgcatggtacagaaacggagcaacgttctgtagtatggtcatgagtcgcacaccaacaggtgcagagctatgccctgatgtggtcagactcaagtttaga

SEQ ID NO: 601 - DNA, 636 bp, Yerba mate alphaendornavirus
  source 1..636: mol_type = other DNA
attgtgtggcaaaggaaatctatatgtgcaatatattcgaaattatttgtaaaagtcaaaaatcggttaaaggatgtattaaacgaaaaaattttgtacacagatggattaaggccggatgaaatatcagcaagaattagattgtgtaataatgtaaaaggtttctttgagaatgacctgaccaaacaagataggcaaacagacaagccaattatagatgtagaaatggcaatgtatgacatactgggggttcacacagacgtaataagatcatggagagagatgcatgagacatggaggttcaagtcaaaaaattattggggccaaggggaatcaatgagattaactggccaagccacgactgctataggtaattgcttaacaaacatgcaagtgcatcaaagtttcgttaagaaaaatttttacaatcttaaattggcattattcttaggagatgatatgtgcatgttatttgatgcaacaccgaatataaaaagcttaaggaaggatattgcaacgaaattcaatatgcaaagcaaagataattggtgtaataacggggcgacattttgcagcatggtattatgtaaactgccaaatgacagggctgaattagctgcagatgtagtcaggctt

SEQ ID NO: 602 - DNA, 1017 bp, Hot pepper alphaendornavirus
  source 1..1017: mol_type = other DNA
tatagcagaccagtcttaacaaaagcggcaaaccaggagtttaatgccataacaggaagattgcacaacattacaacttatagaagacagaattacaatgtggcgaaagagttgcaaaagtttgttttcacttactttgatgcaagtaaagcagacatattggcatctttcacacaaaataaattaacttatagtgatgcaaaagtgttagattggttgcgggacaggccagacagtaacaaagttgcagccgagttggaggtaattttgcaagagggaatgcaattgcatgctattaacagattaaatgttcacctgaaattggaatcactgttgaaatctgaaccagccaatagtttaaaacaggtaaaagcaagagcattgctatggcagtgcaaagggtattgtgcaatatttagtcacatattcaaagaggcaaaggttagactaaaacaagtgctcaaacccaacatagtttattctgatgggttgagagcggatgagttgtcagccagggtgaggctaacaacaggagtgaaatatctcttggaaaacgacttggctcaacaagacaaacaaaccgatcatgaaatcatcagatttgaaatggcattgtacaaactattgggcgtgcatgaagacgttataactctgtggcacaatagtcattttaattggaaatacaaatcaaaatcggttagaggagaaggagatgctatgcggttaacaggtcaagcgacaactgctttaggaaatgcaatcacgaacatgttggtgcacagaaaattggtgaatagcttagggaacaatttaagattgtttttagtgctaggtgatgacggattgatgttcagcaatgcaaatgtggatgtgagtaagctaaacaatgaaacgaaaataaaacacaatatgatgtgcaaaccacatgtaagtaacactcacggtacattttgctgtatgatagcttgtattacacaagaaggaaattgctcattgggtccggacgtagtcaggtta

SEQ ID NO: 603 - DNA, 621 bp, Hordeum vulgare alphaendornavirus
  source 1..621: mol_type = other DNA
ttgaaatcacaaccagttgtggatcataggcaaacaaaggccaggatcttagtatggcaagcaaaaggcatgtgtgccatatacagccccgtgttcaaaatggcaaaagacaggttaaaatcactgctaaacacaaaaactgtatatgcagacggattgcgtccggaccaattagcactgagagtgatgcaagcggatcctgccaattacatcatggagaatgacctggaacaacaagataggcaaaccgatgacaaactgttggatgtggaaatggcaatttaccacatgttgggtgtgcaggaagaactgttgtcgctatggaggcagtgccataacaactggaattttaagggaaggtcatgtcgcggagaacgaaattggatgaggctaacaggccaggccaccactgcactaggcaacgcaataaccaatttgtgcgtgcattggcggctgtgcagcaaattgggcaacgattggaaactgtttgtgttattaggagatgatggagcgttattgaccaacaggacattgtcaaacaaggaggtaaaaacccacggaaaattgttgtataacatgataatgaaacccaatacacacaataatgtcggcacattttgc

SEQ ID NO: 604 - DNA, 642 bp, Cucumis melo alphaendornavirus
  source 1..642: mol_type = other DNA
atcgtttggcagagaaaagccgtttgtgctatctactcaaacctctttgtagaagttaaacgtagattgaaagaagtgttgcacagaaaaattgtatatgcagatggactacgaccagatgaaatatcagccagggtaaggctagtcaagaatgtagctggattctttgaaaatgatttaactaaacaagatagacaaactgataaacctattattgaagtagaattgatgatatatgatttattgggagttcatccaaacgtaatagcatcttggaaagaaatgcatgaggtgtggagatttaagtcaaatttgtactggggtcaaggagaaggtatgcggttgactggacaggcaacgactgcacttggcaattgtttgaccaatcttcaagtacaccaaaactttacaaagacaaatttctgtatattgcaactagggttatttttaggggatgatatgtgtatggtgttcagtgagaagccagatacgtcaaatctcagaaaagatattgcaaccagcttcaacatgcaaagcaaagattcttgggtgataaatggagctactttttgcagtatggtaatgactagaactaactttggagccgaattagcaccagacgttgtgagacttaagttcaga

SEQ ID NO: 605 - DNA, 957 bp, Winged bean alphaendornavirus 1
  source 1..957: mol_type = other DNA
aagtatgctagaccagtactgaccaaagccgccaaccaagaatttaatgctataacggggagattgtgcaaagttgaaacttacaggaagtataattacgacattaaagaacaaatcaacttatttgtaactacatacgtggatcctaataagttgcatctattgagtgaatttaagcaaaacgagttgactatgaacgacgggaaagtgctagactggttacgtgacagaccagatgccaacaaaatagcagaagaactggaaatgattttggcagaagggttagaagtgcacccgatcaatgacattaaggtgcacctgaaattagaatctttattgaaagaggaaccagcaactcatctaaaacaggtcaaggctagagctctgatgtggcaatgtaaggggtattgtagtattttttcacacatatttaaagaaattaagacccgacttaaaagtgtacttaagcccaacatagtgtacaccgatggtttaagggctgacgaactatcgtcaatagtgagaaatgtgaaggatttcagccacttcttggaaaatgacctagtgcagcaagatcgacaaacggatcatgaagtcattaaattcgaaatgcagatttacaaactgctgggtgctaatgcggacgtgataaatttgtggcacaattgtcattttcattggaaatacaaagcagcctccgctatgggtatcagggatgccatgagactaacaggtcaagcaaccacggctataggaaattgtctcacaaatctacttgttcacatgaagttggtcaagagacttgggagtcagctaaaactatttttagttctaggtgacgatgggttgatgttaatagacggaatggtgaataccgactcgttgaatcgggagttgaaggttcaccacaatatgatgtgcaagccaaaactaagtagcgtggttggaacattttgt

SEQ ID NO: 606 - DNA, 642 bp, Lagenaria siceraria alphaendornavirus
  source 1..642: mol_type = other DNA
attgtttggcaacgaaaagctgtatgcgcaatatattccaatttatttgtgaaggtgaaagataggttaaaatctattttgcatgacaaaataatttacgcagatggattgagaccagatgaaatttcagctagagtaagattatgcaaagacatagctggtttctttgaaaatgacttgacaaaacaagatagacaaaccgacgcaccgattataaccactgaaatgtacatgtacgacttgttaggagttcaccctaatgtgatagcctcctggagagagatgcatgaggtttggagatttaaatcaaaccattactggggacaaggtcaaggtatgaggctaactggacaagcaactacagctattggtaattgcataaccaatttgcaagtgcatcaggaattcgtcaagaaaaatttctcaatcttagagttagctttgtttttaggagatgatatgtgtatggtttttagagaaaaaccggacacaaaaaatctaaggaaaaatatagcaactaagttcaacatgcaaagcaaagatgcatggtatcgaaatggagcaacattttgcagcatggtcatgagtcgcacaccaacaggcgctgagctatgtccagatgtggttagacttaaatttaga

SEQ ID NO: 607 - DNA, 906 bp, Phaseolus vulgaris alphaendornavirus 2
  source 1..906: mol_type = other DNA
gtgcgcaaatttgtagacatgtactttgatagttcaaaacgtgacaagttgaaggtttatcaaactcagcaattaacatttaatgacgcaaaagtgctagattggttaagggatcgtccggatagtaataaaatagcagaagaactgaacaatattttagctgagggtatgcaactgcacccaatcaacaaattaaacgtgcacttgaaattggagtcgctgttgaaatcagagccagcgtcaaatttgaaacaagttaaggctagagctttagtttggcagtgtaaaggatattgcgccatatttagtcacgtgttcaaagaagttaaagttagactcaaagatttgttgcgaccagaaattgtgtattcagatggcttaagagcggatgaattggctgcaagagtaaggttgaccacaaatgtcaaatttttgctggaaaatgacttggcccaacaagacaaacaaaccgatcatgagataatcaaggttgaaatggaaatttataaattgttaggcgtgtgtcctcacctagtagatttatggaaaaattgtcaccatagttgggcctacaagtctaggactgtagcaggtgtaggtgacgctatgcgactcactggccaagccaccactgctatagggaacgccatcactaatatgctggtgcataggcggttggttaaaacgttgggccacaacctaagattgtttttggtgttgggtgatgatggattaatgttcacaacaacatgggtggataccactaagttgaataacgagctgaaaaccaaccataacatgatgtgcaaaccaagtttaagtcagactcatggtgtgttttgctgcatgatggcagcaataactgatgaaggtaattgcacactgggaccagatgtggtgcgatta

SEQ ID NO: 608 - DNA, 1017 bp, Bell pepper alphaendornavirus
  source 1..1017: mol_type = other DNA
tacagcagaccagtattaaccaaagcagcaaatcaagaattcaatgccatcactggtagattgcacaacattacaacctataggagacaaaactacaacgtggataaagagctgcaaaaatttgtggcaacttattttgatgcagacaaagcagacatattgacttcatttgcgcaaaacaagctgacttacaatgatgcaaaagtgttggattggttgagagacagacctgatagtaataaggtagcagtagaactagaagtgatattggaagagggaatgcaactacatgccattaacaggctaaatgtgcacctaaaattggaatcattgttaaaagctgaaccagcaagtagtttaaaacaagtgaaagctagagcgttgttatggcagtgtaaaggttactgtgcaatttttagtcacattttcaaagaggcgaaagtgagactcaagcaaatgttaaaaccaaacattgtttatgctgacggattgagagcagatgagttgtccgcaagagtaagactaaccacaggtgtaaaatatttattagaaaatgacttagcacagcaagacaaacaaactgaccatgaaataattaaatttgaaatggcactgtacaaactgttaggggtgcatgacgatgttataaccttgtggcacaacagtcatttcaattggaaatacaaatccaggacagtaagaggagagggagatgccatgagattgactggtcaagcaactacagctctgggaaatgctataaccaatatgttggtgcatagacgattagttaaccggctcggacataatctaagattgtttttaattttaggagatgatggtctcatgtttaccaatacgagcatagatctcagtcgactaaacaatgagacaaagatcaaacacaatatgatgtgtaaaccacacgttagcaacacatacggagtgttttgttgcatgatcgcatgcataacacaacaaggtaattgctcactgggtccagatgtagtgcgctta

SEQ ID NO: 609 - DNA, 576 bp, Phaseolus vulgaris alphaendornavirus 1
  source 1..576: mol_type = other DNA
attgtttggcaacgtaaggctgtgtgcgcagtgtacactagtgtattcgtggaggcaaaaagacggttgaaagctattttgcatgacaaaattgtatatgccgatggcttgcggccagatgagttatcagcacgattaagactatgcaattctgtagctgggttctttgagaatgatttaaccaaacaagaccgacaaacggacaaaccaattatagacgctgagatgataatttatgatatgttaggagtacacgcaaatgtaatcgcttcatggagagaaatgcatgaaacatggatgttcaaatcagataactattggggcacaggccaagccatgcgattaacaggacaagcaacaactgccattgggaatgtattaactaacatgcaagtgcacgctaaattcatacacaaacactggaatactttggaagttggtctgttcttgggagatgatatgtgtctagtgttcaaacataaaccttcttaccaccatttgaagaatgacatcgcaaccatgtttaatatgcaaagcaaagaatcatggaatagcaactatgggactttttgtagt

SEQ ID NO: 610 - DNA, 909 bp, Phaseolus vulgaris alphaendornavirus 3
  source 1..909: mol_type = other DNA
catgaggtgatcgataaaatagcactttacttcttcgacctacgttggaaggagcttaccaacacctttcagtctaatcccataatgtacaatgaaaaagattttctagattgggtttcaaagcacaaaaatccaggcaaagttatcaaggaattagagaaaatgtcggctgaaggtatactgctgaatcctttcaatcaatttagaagtcatgttaaacttgagagtattaacaaaaataatcccgtaatggattttagacagtcggctccgagagccatagtttggctgccttacttcatgccagcgatatttagttacatgttcaaaatggcaagtgacaggttcaaattgttgcttagaaataacgttcactacacctcgggcgtcgacgtcattgatttgtcgaaaatagttaacgaagttgataccggcttttacttgttcgacaatgacattagcaagatggactcgcagattgacgaggacatggtacgagttgaatgggaagttctcagactcctgggaatagatgccgaggtcatggaggtttacaaactattaaagaacaactggaggattagcaataaattcctgagcgttaggggggattggcttagacatagtggagaaccaacgacagcgttgggaaatggaataatcaatttagccataacgagtttggtacttgaaaacacgtgtagatccaacattaaactatgcctctttgtcggtgatgacctaataatagcaaatgaagtgtctgaagatttgcaaatgattaaaaggaaaggtagagaattagcaaacgctatattaaaacctaatcaaagcaggaccaatgggcctttctgtagtttcataataggtgccagcgaaacttctgaccgactttgcgtagtacccaac

SEQ ID NO: 611 - DNA, 486 bp, Helianthus annuus alphaendornavirus
  source 1..486: mol_type = other DNA
atagtgtggcaacggaaagcctggtgcgcgatattctcaccggtattcctacaagccaaagcaagattaaaagccatactaagcaggaaagtcctgtatgcagacggactaacacaagaggagttatcttcaagggttaatcttatacatggcgactgttggtttatggaggatgacctgagcaaacaagatagacaaacggacattaatctgatacaatgtgaaatgtatatatactcacaactaggggtagcagatgacgtgctgaacttatggagacgaacacacgaaaactggaaattcagaggaacaaatgtgtcggggatattgaccggcatgagactcaccggacaagccactacagcagtaggcaacgccatagtcaacttgttagtacacagcaggattttcgaaaccaacaagaatcatattgagttaatgctattactaggggacgacaatcttgttataagcagaaaccgaatc

SEQ ID NO: 612 - DNA, 621 bp, Cluster bean alphaendornavirus 1
  source 1..621: mol_type = other DNA
aaaggactatgcgcaatcttttcgcctgttttcaaggaagccaagcagcgactcaaatccgtgttgggcgttaaaaccctgtacgcggatggcctacggccagatcaattggctagtagagtggcacaagtcccaacaaccagctatttgattgaaaatgacatgcaacagcaggacagacaaacggatgagactttactgaacatcgaaatgcagttgtacttgatcctaggtgtggaccaggctttggttggtttgtggcgttcttgtcatgacaactggtattttaggggtaaatcatgttctggttacaaacacgccatgcgactaaccgggcaagctacgacagcgctaggaaatgctatcaccaatttggcagtgcattggaggatctgtcaaagcttaggacgagattggaagtggttttgtgtgttaggagatgacggaatattgatgagtgacaggaaattggatgcagaggacctaaagacatatgggaagaagtactgtaacatgattttgaagcctaaagtgtcaaaaaatagtgcaacattttgttgcttcacgatttatcggactagaagaggcaactttgcactagggcccgacccaatacggttg

SEQ ID NO: 613 - protein, 180 aa, Oryza sativa alphaendornavirus
IVWQRKAVCSLFAKLFVRCKDRLKTLLVDHILYVDGLRPDEISAKLRQISDVFGFFENDLTKQDRQTDKPILEVEMLMYLMLGVHPNIISSWRSSHDDWRFKSTNYWGKSTAMRLTGQATTALGNCITNMQVHSKFVIKNKYWLKFALFLGDDMCMGFSHKPNTQHLRQDIACKFNMQSK

SEQ ID NO: 614 - protein, 211 aa, Vicia faba alphaendornavirus
IVWQPKELCALMSPAFIAIKRRLKEVLRDEIVYTDGLTPDMLSARARTIQYDYVFEDDLVIQDRQTDQELIDLEFQVMLDLGLDINLANLWRLVHNKWRFKGQHSWGQLDAMRLTGQATTALGNAITNLCVHSSFVIEHRQAIKLMFVLGDDNITFMSAEPNLTKYKRLMSERYNMRSKPQVSRNVGTFCSLLCYRNSFGHCEVGPDFVRL

SEQ ID NO: 615 - protein, 216 aa, Oryza rufipogon alphaendornavirus
IVWQRKAVCGLFAKLFVRCKERLKTLLLDHILYVDGLRPDEISAKLRQISNVFGFFENDLTKQDRQTDKPILEVEMLMYLMLGVHPNIIASWRASHEDWRFKSTNYWGKSTAMRLTGQATTALGNCITNMQVHSKFVIKNKYWLKFALFLGDDMCMGFSHKPNTQHLRQDIACKFNMQSKDSWVLNGATFCSMVVYKTNDDVVEIGPDVVRMKFRF

SEQ ID NO: 616 - protein, 302 aa, Persea americana alphaendornavirus 1
FCDTYFNPNWRSQAAMYQENNLIIEESDVRAWIEDSKDSNKIVKELKELLAGEMLIKPMNDVNVHLKLESLLKANPINVTKEQQARVIVWQRKCVCALYARLFLKIKSRLKEILHEKIVYADGLTPDDISARVRLCNNVNGFFENDLTKQDRQTDRDIINMEMLVYIVLGANPSIISSWREMHEVWRFKSANYWGEGKEMRLSGQATTALGNVITNLQVHCKFVKKNSISMQLGLFLGDDMCMLFSEKPSIKNLRNDIACEFNMQSKDEWSYNGATFCSMILAKTSDTTAEVAADVVRLKFR

SEQ ID NO: 617 - protein, 214 aa, Lagenaria siceraria alphaendornavirus
IVWQRKAVCAIYSNLFVKVKDRLKSILHDKIIYADGLRPDEISARVRLCKDIAGFFENDLTKQDRQTDAPIITTEMYMYDLLGVHPNVIASWREMHEVWRFKSNHYWGQGQGMRLTGQATTAIGNCITNLQVHQEFVKKNFSILELALFLGDDMCMVFREKPDTKNLRKNIATKFNMQSKDAWYRNGATFCSMVMSRTPTGAELCPDVVRLKFR

SEQ ID NO: 618 - protein, 212 aa, Yerba mate alphaendornavirus
IVWQRKSICAIYSKLFVKVKNRLKDVLNEKILYTDGLRPDEISARIRLCNNVKGFFENDLTKQDRQTDKPIIDVEMAMYDILGVHTDVIRSWREMHETWRFKSKNYWGQGESMRLTGQATTAIGNCLTNMQVHQSFVKKNFYNLKLALFLGDDMCMLFDATPNIKSLRKDIATKFNMQSKDNWCNNGATFCSMVLCKLPNDRAELAADVVRL

SEQ ID NO: 619 - protein, 339 aa, Hot pepper alphaendornavirus
YSRPVLTKAANQEFNAITGRLHNITTYRRQNYNVAKELQKFVFTYFDASKADILASFTQNKLTYSDAKVLDWLRDRPDSNKVAAELEVILQEGMQLHAINRLNVHLKLESLLKSEPANSLKQVKARALLWQCKGYCAIFSHIFKEAKVRLKQVLKPNIVYSDGLRADELSARVRLTTGVKYLLENDLAQQDKQTDHEIIRFEMALYKLLGVHEDVITLWHNSHFNWKYKSKSVRGEGDAMRLTGQATTALGNAITNMLVHRKLVNSLGNNLRLFLVLGDDGLMFSNANVDVSKLNNETKIKHNMMCKPHVSNTHGTFCCMIACITQEGNCSLGPDVVRL

SEQ ID NO: 620 - protein, 207 aa, Hordeum vulgare alphaendornavirus
LKSQPVVDHRQTKARILVWQAKGMCAIYSPVFKMAKDRLKSLLNTKTVYADGLRPDQLALRVMQADPANYIMENDLEQQDRQTDDKLLDVEMAIYHMLGVQEELLSLWRQCHNNWNFKGRSCRGERNWMRLTGQATTALGNAITNLCVHWRLCSKLGNDWKLFVLLGDDGALLTNRTLSNKEVKTHGKLLYNMIMKPNTHNNVGTFC

SEQ ID NO: 621 - protein, 214 aa, Cucumis melo alphaendornavirus
IVWQRKAVCAIYSNLFVEVKRRLKEVLHRKIVYADGLRPDEISARVRLVKNVAGFFENDLTKQDRQTDKPIIEVELMIYDLLGVHPNVIASWKEMHEVWRFKSNLYWGQGEGMRLTGQATTALGNCLTNLQVHQNFTKTNFCILQLGLFLGDDMCMVFSEKPDTSNLRKDIATSFNMQSKDSWVINGATFCSMVMTRTNFGAELAPDVVRLKFR

SEQ ID NO: 622 - protein, 319 aa, Winged bean alphaendornavirus 1
KYARPVLTKAANQEFNAITGRLCKVETYRKYNYDIKEQINLFVTTYVDPNKLHLLSEFKQNELTMNDGKVLDWLRDRPDANKIAEELEMILAEGLEVHPINDIKVHLKLESLLKEEPATHLKQVKARALMWQCKGYCSIFSHIFKEIKTRLKSVLKPNIVYTDGLRADELSSIVRNVKDFSHFLENDLVQQDRQTDHEVIKFEMQIYKLLGANADVINLWHNCHFHWKYKAASAMGIRDAMRLTGQATTAIGNCLTNLLVHMKLVKRLGSQLKLFLVLGDDGLMLIDGMVNTDSLNRELKVHHNMMCKPKLSSVVGTFC

SEQ ID NO: 623 - protein, 214 aa, Lagenaria siceraria alphaendornavirus; identical to SEQ ID NO: 617

SEQ ID NO: 624 - protein, 302 aa, Phaseolus vulgaris alphaendornavirus 2
VRKFVDMYFDSSKRDKLKVYQTQQLTFNDAKVLDWLRDRPDSNKIAEELNNILAEGMQLHPINKLNVHLKLESLLKSEPASNLKQVKARALVWQCKGYCAIFSHVFKEVKVRLKDLLRPEIVYSDGLRADELAARVRLTTNVKFLLENDLAQQDKQTDHEIIKVEMEIYKLLGVCPHLVDLWKNCHHSWAYKSRTVAGVGDAMRLTGQATTAIGNAITNMLVHRRLVKTLGHNLRLFLVLGDDGLMFTTTWVDTTKLNNELKTNHNMMCKPSLSQTHGVFCCMMAAITDEGNCTLGPDVVRL

SEQ ID NO: 625 - protein, 339 aa, Bell pepper alphaendornavirus
YSRPVLTKAANQEFNAITGRLHNITTYRRQNYNVDKELQKFVATYFDADKADILTSFAQNKLTYNDAKVLDWLRDRPDSNKVAVELEVILEEGMQLHAINRLNVHLKLESLLKAEPASSLKQVKARALLWQCKGYCAIFSHIFKEAKVRLKQMLKPNIVYADGLRADELSARVRLTTGVKYLLENDLAQQDKQTDHEIIKFEMALYKLLGVHDDVITLWHNSHFNWKYKSRTVRGEGDAMRLTGQATTALGNAITNMLVHRRLVNRLGHNLRLFLILGDDGLMFTNTSIDLSRLNNETKIKHNMMCKPHVSNTYGVFCCMIACITQQGNCSLGPDVVRL

SEQ ID NO: 626 - protein, 192 aa, Phaseolus vulgaris alphaendornavirus 1
IVWQRKAVCAVYTSVFVEAKRRLKAILHDKIVYADGLRPDELSARLRLCNSVAGFFENDLTKQDRQTDKPIIDAEMIIYDMLGVHANVIASWREMHETWMFKSDNYWGTGQAMRLTGQATTAIGNVLTNMQVHAKFIHKHWNTLEVGLFLGDDMCLVFKHKPSYHHLKNDIATMFNMQSKESWNSNYGTFCS

SEQ ID NO: 627 - protein, 303 aa, Phaseolus vulgaris alphaendornavirus 3
HEVIDKIALYFFDLRWKELTNTFQSNPIMYNEKDFLDWVSKHKNPGKVIKELEKMSAEGILLNPFNQFRSHVKLESINKNNPVMDFRQSAPRAIVWLPYFMPAIFSYMFKMASDRFKLLLRNNVHYTSGVDVIDLSKIVNEVDTGFYLFDNDISKMDSQIDEDMVRVEWEVLRLLGIDAEVMEVYKLLKNNWRISNKFLSVRGDWLRHSGEPTTALGNGIINLAITSLVLENTCRSNIKLCLFVGDDLIIANEVSEDLQMIKRKGRELANAILKPNQSRTNGPFCSFIIGASETSDRLCVVPN

SEQ ID NO: 628 - protein, 162 aa, Helianthus annuus alphaendornavirus
IVWQRKAWCAIFSPVFLQAKARLKAILSRKVLYADGLTQEELSSRVNLIHGDCWFMEDDLSKQDRQTDINLIQCEMYIYSQLGVADDVLNLWRRTHENWKFRGTNVSGILTGMRLTGQATTAVGNAIVNLLVHSRIFETNKNHIELMLLLGDDNLVISRNRI

SEQ ID NO: 629 - protein, 207 aa, Cluster bean alphaendornavirus 1
KGLCAIFSPVFKEAKQRLKSVLGVKTLYADGLRPDQLASRVAQVPTTSYLIENDMQQQDRQTDETLLNIEMQLYLILGVDQALVGLWRSCHDNWYFRGKSCSGYKHAMRLTGQATTALGNAITNLAVHWRICQSLGRDWKWFCVLGDDGILMSDRKLDAEDLKTYGKKYCNMILKPKVSKNSATFCCFTIYRTRRGNFALGPDPIRL

SEQ ID NO: 630 - DNA, 2566 bp, synthetic construct
  source 1..2566: mol_type = other DNA
gtaaaacaaacaaggttttatgactactaagttgtctagaccttttgctttacgtttactgggtggctctcgccccccgaaaactcaaattcttcatgggtgtactggtaacagtatacccatgaagaaattaaataagaaaaacgattgctctgctagaaaagcatttaggcagagcaaatttaaatttaaaataagtaaaaataagacgatatgtccggcagtggtatttttacaacaattaccaacaacaacaaacaacaaacaacattacaattactatttacaattacacacaaacacgtttttattccggctgtgtagtctttcaacgttgtcttccgatgcccgtgtttccaaacttcagccaagaaatcgtctaagcctaaccttttccaaatctcatactcgactgcacaatgaaattcgttctgtgatttgtcatacttggaaatgtctagctctaatatgtccataggaacattagagtccagatctgagaaaaattcttcgatctgtgtaggcgttttccttgtataaaacatgaatcttgaactgtcaattgtctctagcagctgtcttgttaattctgaaaatacaggaccaaaaagcgcattgattttcttgctatgatacacaatagtttgcaaagccgggtattcagtttgaatactaagatccaaacgctgtttcggctgctgcttgatcatgtgcctgtattgatcaacggctggtaaatcaataaagtcaaaatcagccaactggccaattgttgacttctcttgcttttcgatccatctttccaaactcgcccttgaaagcagaggtatattttttggttttttcttttctttaattaagtatgcatcaaaaaacttatctactactagagaagcggtgtcttcgatgtcaacaacccctactaattcgggagagttgaaatttcttttgatcatcgcgaccaaattttccaacaatccaggttttcgaggtttttcagcagcagtcctgatcacaggtttcaatgtcgtctcagattctctcggaagaggcaccgatttcgacatatccaacacacaatccttgacattcaaactattctctcgtatttgcatagttacagcatcatactcattgagtatagtactgtttcccggcaaacacttgtcgtaataatattgcatgtcagaaacatctcctgtttttggtgctgcgacgaaaaggttaacacctttgtacaccgattctatctgtaattgctattgagtcgacggtagtcaagatgcataataaataacggattgtgtccgtaatcacacgtggtgcgtacgataacgcatagtgtttttccctccacttaaatcgaagggttgtgtcttggatcgcgcgggtcaaatgtatatggttcatatacatccgcaggcacgtaataaagcgaggggttcgaatccccccgttacccccggtaggggcccaagcacaacatttcaaccagaaacactagccgaagcaaatccattccacaagcacctggtgggatcatctcatcatcagaaaccaagagagagattccgtgtccgcttgttgtagtagattgtgaggactgaggaccgagaagcagccatggctctagttgttaaaggaaaagtgaatatcaatgagtttatcgacctgacaaaaatggagaagatcttaccgtcgatgtttacccctgtaaagagtgttatgtgttccaaagttgataaaataatggttcatgagaatgagtcattgtcagaggtgaaccttcttaaaggagttaagcttattgatagtggatacgtctgtttagccggtttggtcgtcacgggcgagtggaacttgcctgacaattgcagaggaggtgtgagcgtgtgtctggtggacaaaaggatggaaagagccgacgaggccactctcggatcttactacacagcagctgcaaagaaaagatttcagttcaaggtcgttcccaattatgctataaccacccaggacgcgatgaaaaacgtctggcaagttttagttaatattagaaatgtgaagatgtcagcgggtttctgtccgctttctctggagtttgtgtcggtgtgtattgtttatagaaataatataaaattaggtttgagagagaagattacaaacgtgagagacggagggcccatggaacttacagaagaagtcgttgatgagttcatggaagatgtccctatgtcgatcaggcttgcaaagtttcgatctcgaaccggaaaaaagagtgatgtccgcaaagggaaaaatagtagtaatgatcggtcagtgccgaacaagaactatagaaatgttaaggattttggaggaatgagttttaaaaagaataatttaatcgatgatgattcggaggctactgtcgccgaatcggattcgttttaaagacgcatccatggctgaatggttaaagcgcccaactcataattggcgaattcgtaggttcaattcctactggatgcaaagaagccaggttaacaacaaaatttgagttttcggggagggagggcccccccccccc

SEQ ID NO: 631 - DNA, 5219 bp, synthetic construct
  source 1..5219: mol_type = other DNA
gtaaaacaaacaaggttttatgactactaagttgtctagaccttttgctttacgtttactgggtggctctcgccccccgaaaactcaaattcttcatgggtgtactggtaacagtatacccatgaagaaattaaataagaaaaacgattgctctgctagaaaagcatttaggcagagcaaatttaaatttaaaataagtaaaaataagacgatatgtccggcagtggtatttttacaacaattaccaacaacaacaaacaacaaacaacattacaattactatttacaattacaaagctgactatgtgatcttattaaaattaggttaaatttcgaggttaaaaatagttttaatattgctatagtcttagaggtcttgtatatttatacttaccacacaagatggaccggagcagccctccaatatctagtgtaccctcgtgctcgctcaaacattaagtggtgttgtgcgaaaagaatctcacttcaaatggcatcttcttcttcttcttctagatggagctatgatgttttcttaagttttagaggcgaagatactcgaaaaacgtttacaagtcacttatacgaagtcttgaatgataagggaataaaaacctttcaagatgataaaaggctagagtacggcgcaaccatcccaggtgaactctgtaaagctatagaagagtctcaatttgccattgttgttttctcagagaattatgcaacatcaaggtggtgtttgaatgaactagtgaagatcatggaatgcaaaactcgatttaagcaaactgttataccgatattctatgatgtggatccatcacatgttcggaaccaaaaggagagctttgcaaaagcctttgaagaacatgaaacaaagtataaggatgatgttgagggaatacaaagatggaggattgctttaaatgaagcggccaatctcaaaggctcctgtgataatcgtgacaagactgatgcagactgtattcgacagattgttgaccaaatctcatccaaattatgcaagatttctttatcttatttgcaaaacattgttggaatagatactcatttagagaaaatagaatccttactagagataggaatcaatggtgttcggattatggggatctggggaatggggggagtcggtaaaacaacaatagcaagagctatatttgatactcttttaggaagaatggatagttcctatcaatttgatggtgcttgtttccttaaggatattaaagaaaacaaacgtggaatgcattctttgcaaaatgcccttctctctgaacttttaagggaaaaagctaattacaataatgaggaggatggaaagcaccaaatggctagtagacttcgttcgaagaaggtcctaattgtgcttgatgatatagataataaagatcattatttggagtatttagcaggtgatcttgattggtttggtaatggtagtagaattattataacaactagagacaagcatttgatagagaagaatgatataatatatgaggtgactgcactacccgatcatgaatccattcaattgttcaaacaacatgctttcggaaaagaagttccaaatgagaattttgagaagctttcattagaggtagtaaattatgctaaaggccttcctttagccctcaaagtgtggggttctttgctgcataacctacgattaactgaatggaaaagtgctatagagcacatgaaaaataactcttattctggaattattgataagctcaaaataagttatgatggattagagcccaaacaacaagagatgtttttagatatagcatgcttcttgcgaggggaagaaaaagattacatcctacaaatccttgagagttgtcatattggagctgaatacgggttacgtattttaattgacaaatctcttgtgttcatctctgaatataatcaggttcaaatgcatgacttaatacaggatatgggtaaatatatagtgaattttcaaaaagatcccggagaacgtagcagattatggctcgccaaggaagtcgaagaagtgatgagcaacaacacagggaccatggcaatggaagcaatttgggtttcttcttattctagtactctacgctttagcaatcaggccgtgaaaaatatgaaaaggcttagggtatttaacatggggaggtcgtcgacacattatgccatcgattatctgcccaacaacttgcgttgttttgtttgcactaactatccttgggagtcatttccatctacatttgaactcaaaatgcttgttcacctccaactccgacacaattctctgcgtcatttatggacagaaacaaagcatttgccgtctctacggaggatagatctcagctggtctaaaagattgacgcgaacaccagatttcacggggatgccaaatttggagtatgtgaatttgtatcaatgtagtaatcttgaagaagttcaccattccctgggatgttgcagcaaagtcattggtttatatttgaatgattgtaaaagccttaagaggtttccatgtgttaacgtggaatctcttgaatatctgggtctaagaagttgcgatagtttagagaaattgccagaaatctacgggagaatgaagccggagatacagattcacatgcaaggctctgggataagggaactaccatcatctatttttcagtacaaaactcatgttaccaagctattgttgtggaatatgaaaaaccttgtagctcttccaagcagcatatgtaggttgaaaagtttggttagtctgagtgtgtcgggttgctcaaaacttgaaagcttgccagaagagataggggatttagacaacttacgggtgtttgatgccagtgatactctaattttacgacctccgtcttccatcatacgcttgaacaaacttataatcttgatgtttcgaggcttcaaagatggagtgcactttgagttccctcctgtggctgaaggattacactcattggaatatctgaatctcagttactgcaatctaatagatggaggacttccggaagagattggatccttatcctctttgaaaaagttggatctcagtagaaataattttgagcatttgccttcaagtatagcccaacttggtgctcttcaatccttagacttaaaagattgccagaggcttacacagctaccagaacttcccccagaattaaatgaattgcatgtagattgtcatatggctctgaaatttatccattatttagtaacaaagagaaagaaactacatagagtgaaacttgatgatgcacacaatgatactatgtacaatttgtttgcatataccatgtttcagaatatctcttccatgaggcatgacatctctgcttcagattccttgtcactaacagtatttaccggtcaaccgtatcctgaaaagatcccgagttggttccaccatcagggttgggatagtagtgtatcagtcaatttgcctgaaaattggtatatacctgataaattcttgggatttgctgtatgttactctcgtagcttaattgacacaacagctcacttgattcccgtatgtgatgacaagatgtcgcgcatgacccagaaacttgccttatcagaatgtgatacagaatcatccaactattcagaatgggatatacattttttctttgtaccttttgctggcttatgggatacatctaaggcaaatggaaaaacaccaaatgattatgggattattaggctatctttttctggagaagagaagatgtatggacttcgtttgttgtataaagaaggaccagaggttaatgccttgttacaaatgagggaaaatagcaatgaaccaacagaacattccactgggataaggaggactcaatataacaacagaacttccttttatgagctcatcaatgggtgaggtagtcaagatgcataataaataacggattgtgtccgtaatcacacgtggtgcgtacgataacgcatagtgtttttccctccacttaaatcgaagggttgtgtcttggatcgcgcgggtcaaatgtatatggttcatatacatccgcaggcacgtaataaagcgaggggttcgaatccccccgttacccccggtaggggcccaagcacaacatttcaaccagaaacactagccgaagcaaatccattccacaagcacctggtgggatcatctcatcatcagaaaccaagagagagattccgtgtccgcttgttgtagtagattgtgaggactgaggaccgagaagcagccatggctctagttgttaaaggaaaagtgaatatcaatgagtttatcgacctgacaaaaatggagaagatcttaccgtcgatgtttacccctgtaaagagtgttatgtgttccaaagttgataaaataatggttcatgagaatgagtcattgtcagaggtgaaccttcttaaaggagttaagcttattgatagtggatacgtctgtttagccggtttggtcgtcacgggcgagtggaacttgcctgacaattgcagaggaggtgtgagcgtgtgtctggtggacaaaaggatggaaagagccgacgaggccactctcggatcttactacacagcagctgcaaagaaaagatttcagttcaaggtcgttcccaattatgctataaccacccaggacgcgatgaaaaacgtctggcaagttttagttaatattagaaatgtgaagatgtcagcgggtttctgtccgctttctctggagtttgtgtcggtgtgtattgtttatagaaataatataaaattaggtttgagagagaagattacaaacgtgagagacggagggcccatggaacttacagaagaagtcgttgatgagttcatggaagatgtccctatgtcgatcaggcttgcaaagtttcgatctcgaaccggaaaaaagagtgatgtccgcaaagggaaaaatagtagtaatgatcggtcagtgccgaacaagaactatagaaatgttaaggattttggaggaatgagttttaaaaagaataatttaatcgatgatgattcggaggctactgtcgccgaatcggattcgttttaaagacgcatccatggctgaatggttaaagcgcccaactcataattggcgaattcgtaggttcaattcctactggatgcaaagaagccaggttaacaacaaaatttgagttttcggggagggagggcccccccccccc

SEQ ID NO: 632 - DNA, 711 bp, Bell pepper alphaendornavirus
  source 1..711: mol_type = other DNA
aaagtgttggattggttgagagacaggccagatagtaataaggtagcagcagaactagaagtgatattggaagagggaatgcaactacatgccattaacaggctaaatgtgcacctaaaattggaatcattgttaaaagctgaaccagcaagtagtttaaaacaagtgaaagctagagcgttgttatggcagtgtaaaggttactgtgcaatttttagtcacattttcaaagaggcgaaagtgagactcaaacaaatgttaaaaccaaacattgtttatgctgacggattgagagcagatgagttgtccgcaagagtaagactaaccacaggtgtaaaatatttattagaaaatgacttagcacagcaagacaaacaaactgaccatgaaataattaaatttgaaatggcactgtacaaactgttaggggtgcatgacgatgttataaccttgtggcacaacagtcatttcaattggaaatacaaatccaggacagtaagaggagagggagatgccatgagattgactggtcaagcaaccacagctctgggaaatgctataaccaatatgttggtgcatagacgattagttaaccggctcggacacaatctaagattgtttttaattttaggagatgatggtctcatgtttaccaatacgagcatagatctcagtcgactaaacaatgagacaaagatcaaacacaatatg

SEQ ID NO: 633 - DNA, 711 bp, Cucumis melo alphaendornavirus
  source 1..711: mol_type = other DNA
gatgtgaagaaatggattgaagagaataaagattgcgagaaaattgaacgagagttaattgacctattgtgtggagaattgatatcgaaaccaatcaatgatgttaatgtacatcttaaattagagagtttgctaaaagaaaattttacaataatgaccatgcaacaacaagcaagaatcatcgtttggcagagaaaagccgtttgtgctatctactcaaacctctttgtagaagttaaacgtagattgaaagaagtgttgcacagaaaaattgtatatgcagatggactacgaccagatgaaatatcagccagggtaaggctagtcaagaatgtagctggattctttgaaaatgatttaactaaacaagatagacaaactgataaacctattattgaagtagaattgatgatatatgatttattgggagttcatccaaacgtaatagcatcttggaaagaaatgcatgaggtgtggagatttaagtcaaatttgtactggggtcaaggagaaggtatgcggttgactggacaggcaacgactgcacttggcaattgtttgaccaatcttcaagtacaccaaaactttacaaagacaaatttctgtatattgcaactagggttatttttaggggatgatatgtgtatggtgttcagtgagaagccagatacgtcaaatctcagaaaagatattgcaaccagcttcaacatg

SEQ ID NO: 634 - DNA, 711 bp, Bell pepper alphaendornavirus
  source 1..711: mol_type = other DNA
aaagtgttggattggttgagagacaggcctgatagtaataaggtagcagtagaactagaagtgatattggaagagggaatgcaactacatgccattaacaggctaaatgtgcacctaaaattggaatcattgttaaaagctgaaccagcaagtagtttaaaacaagtgaaagctagagcgttgttatggcagtgtaaaggttactgtgcaatttttagtcacattttcaaagaggcgaaagtgagactcaaacaaatgttaaaaccaaacattgtttatgctgacggattgagagcagatgagttgtccgcaagagtaagactaaccacaggtgtaaaatatttattagaaaatgacttagcacagcaagacaaacaaactgaccatgaaataattaaatttgaaatggcactgtacaaactgttaggggtgcatgacgatgttataaccttgtggcacaacagtcatttcaattggaaatacaaatccaggacagtaagaggagagggagatgccatgagattgactggtcaagcaaccacagctctgggaaatgctataaccaatatgttggtgcatagacgattagttaaccggctcggacataatctaagattgtttttaattttaggagatgatggtctcatgtttaccaatacgagcatagatctcagtcgactaaacaatgagacaaagatcaaacacaatatg

SEQ ID NO: 635 - DNA, 711 bp, Bell pepper alphaendornavirus
  source 1..711: mol_type = other DNA
aaagtgttggattggttgagagacaggcctgatagtaataaggtagcagcagaactagaagtgatattggaagagggaatgcaactacatgccattaacaggctaaatgtgcacctaaaattggaatcattgttaaaagctgaaccagcaagtagtttaaaacaagtgaaagctagagcgttgttatggcagtgtaaaggttactgtgcaatttttagtcacattttcaaagaggcgaaagtgagactcaaacaaatgttaaaaccaaacattgtttatgctgatggattgagagcagatgagttgtccgcaagagtaagactaaccacaggtgtaaaatatttattagaaaatgacttagcacagcaagacaaacaaactgaccatgaaataattaaatttgaaatggcactgtacaaactgttaggggtgcatgacgatgttataaccttgtggcacaacagtcatttcaattggaaatacaaatccaggacagtaagaggagagggagatgccatgagattgactggtcaagcaaccacagctctgggaaatgctataaccaatatgttggtgcatagacgattagttaaccggctcggacataatctaagattgtttttaattttaggagatgatggtctcatgtttaccaatacgagcatagatctcagtcgactaaacaatgagacaaagatcaaacacaatatg

SEQ ID NO: 636 - DNA, 711 bp, Bell pepper alphaendornavirus
  source 1..711: mol_type = other DNA
aaagtgttggactggttgagagataggcctgacagtaacaaagtggcagcagaactagaagtgatactggaagagggaatgcaactacatgccattaacaagctaaatgtgcacctgaaattggaatcattattaaagtctgagccagcaagtagtttgaaacaagtaaaagctagagcgttgttatggcaatgcaaaggttactgtgcaatatttagtcacatttttaaagaggcaaaagtgagacttaagcaaatgttaaaacccaatatagtttatgctgacgggctgagggcagacgagctatccgcacgagtgagactgaccacaggtgtaaaatatttattagaaaatgacttggcacaacaagacaaacaaactgaccatgaaataatcaaatttgaaatggcactgtataaagtgctaggggtgcatgatgatgtgataaccttgtggcacaacagtcattttaactggaaatacaagtccaggacagtgagaggagagggagatgccatgagattgactggtcaagcaactacagctctggggaatgccataaccaacatgttggtgcatagaagattagttaatcgactcgggcacaatttgagattgtttctgattttgggagatgacggtctcatgtttaccaacacaagtatagatcttagtcgattaaacaatgaaacaaaaatcaaacacaacatg

SEQ ID NO: 637 - DNA, 711 bp, Bell pepper alphaendornavirus
  source 1..711: mol_type = other DNA
aaagtgttggattggttgagagacagacctgatagtaataaggtagcagtagaactagaagtgatattggaagagggaatgcaactacatgccattaacaggctaaatgtgcacctaaaattggaatcattgttaaaagctgaaccagcaagtagtttaaaacaagtgaaagctagagcgttgttatggcagtgtaaaggttactgtgcaatttttagtcacattttcaaagaggcgaaagtgagactcaagcaaatgttaaaaccaaacattgtttatgctgacggattgagagcagatgagttgtccgcaagagtaagactaaccacaggtgtaaaatatttattagaaaatgacttagcacagcaagacaaacaaactgaccatgaaataattaaatttgaaatggcactgtacaaactgttaggggtgcatgacgatgttataaccttgtggcacaacagtcatttcaattggaaatacaaatccaggacagtaagaggagagggagatgccatgagattgactggtcaagcaactacagctctgggaaatgctataaccaatatgttggtgcatagacgattagttaaccggctcggacataatctaagattgtttttaattttaggagatgatggtctcatgtttaccaatacgagcatagatctcagtcgactaaacaatgagacaaagatcaaacacaatatg

SEQ ID NO: 638 - DNA, 711 bp, Persea americana alphaendornavirus 1
  source 1..711: mol_type = other DNA
gatgtgagggcatggatagaagatagcaaagatagcaacaaaatagtaaaagaattaaaggaactgttagccggggagatgttgataaagcccatgaatgatgtcaacgtccacttaaaactagagagcttgctgaaagctaatccaattaatgtgactaaagaacagcaggcaagagtgatagtgtggcaaaggaagtgtgtatgcgccctgtatgctagattattccttaagatcaaatcacggctaaaagagatattgcatgagaaaattgtgtacgcggatggtctaacaccagatgacatatcagcaagagtcaggttgtgtaacaacgttaatggattcttcgagaatgatctgacaaagcaagacagacaaactgaccgagatatcatcaacatggaaatgcttgtgtatattgtgttgggagccaatccaagcattatatcttcatggagggagatgcacgaagtatggagattcaaatcggccaattactggggtgaaggaaaagagatgcgactatcaggccaagccacaacagcactcggaaacgtgataacgaatttacaggtgcattgcaaatttgtaaagaagaattcaatatccatgcagttgggactatttctaggtgatgacatgtgtatgttgttcagcgagaaaccatcaatcaaaaatttacgtaatgatatagcctgtgaattcaatatg

SEQ ID NO: 639 - DNA, 711 bp, Bell pepper alphaendornavirus
  source 1..711: mol_type = other DNA
aaagtgttggattggttgagagacaggcctgatagtaataaggtagcagtagaactagaagtgatattggaagagggaatgcaactacatgccattaacaggctaaatgtacacctgaaattggagtcattgttaaaggctgaaccagcaagtagtttaaaacaagtgaaagctagagcgttgttatggcaatgtaaaggttactgtgcaatttttagtcatattttcaaagaggcgaaagtgagactcaagcaaatgttaaaaccaaatatagtttatgctgacggattgagagcagatgagttgtccgcaagagtaagactaaccacaggtgtaaaatatttattagagaatgacttagcacagcaagacaaacaaactgaccatgaaataattaaatttgaaatggcactgtacaaactgttaggggtgcatgacgacgttataaccttgtggcacaacagtcatttcaattggaaatacaaatccaggacagtaggaggagagggagatgccatgagattgactggtcaagcaaccacagctctgggaaatgctataaccaatatgttggtgcatagacgattagttaaccggctcggacataatttaagattgtttttaattttaggagatgatggtctcatgtttaccaatacgagcatagatctcagtcgactaaacaatgagacaaagatcaaacacaatatg

SEQ ID NO: 640 - DNA, 711 bp, Oryza sativa alphaendornavirus
  source 1..711: mol_type = other DNA
gatgttaaaaattggattgaagaaaataaagattgttttggtgttgaaaaagagctaaatgatttactagcaggcgaattattaatcaaaccattgaatgatgttaatgtgcatttgaaattggagtctttactaaaggacaagcatatctccattatgaaggaacagcaagctagaataatagtatggcaaaggaaagcagtttgtagtttatttgccaaattgtttgtaagatgcaaagacagactgaaaactttacttgtggatcatatactttacgtagatggattgagaccagatgaaatatcagccaaattaagacaaatatctgatgtatttggattttttgaaaacgacctgactaagcaagatagacaaactgacaaacccattttagaagtggaaatgttgatgtatcttatgttgggcgttcatcctaacatcatatctagttggcgttcaagtcatgatgattggagattcaaatctacaaattattggggtaagagcacggcaatgagattaacgggacaagctacaaccgcactaggaaattgtatcactaatatgcaagtacactcaaaatttgtaatcaaaaataaatattggttaaagtttgctttatttcttggggatgatatgtgtatgggtttctcacacaagccaaacacacagcacttacgccaggatatagcttgtaaatttaatatg

SEQ ID NO: 641 - DNA, 711 bp, Oryza rufipogon alphaendornavirus
  source 1..711: mol_type = other DNA
gacgttaaaaactgggtggaagagaataaggattgttttggcgtggaaaaagagttaaatgatctattagctggggaattgttaataaaacctataaacgatgtgaacgtacatttaaaattagaatcattattgaaagaaaaacacatatctttgatgaaagagcaacaggccagaataatagtgtggcaaaggaaggcagtttgtggtctgtttgctaaactttttgtgagatgtaaggaaagattgaaaaccctactattggaccacatactctatgtagatggactaagaccagatgaaatatcagccaaactgagacaaatatccaatgtgtttggtttcttcgaaaatgatttaactaaacaagacagacagactgataaaccaatacttgaagtggaaatgttgatgtacttgatgttaggtgttcaccctaatattatcgctagctggcgtgcaagccatgaagattggagatttaaatcaacaaactactggggcaagagtacagccatgagactcactggacaagctaccacagcccttggaaattgtatcacaaacatgcaagttcactcgaagtttgtcattaagaataagtactggttaaaatttgctttatttcttggcgatgacatgtgtatgggtttttcacacaaaccaaacacacaacatttacgccaggacatagcttgcaaatttaatatg

SEQ ID NO: 642 - DNA, 711 bp, unidentified
  source 1..711: mol_type = other DNA
gatgtgaaaaattggatagaacagaataaagattgtgagaaaatagagaaagaattaattgatttgttatgtggagaattaatcactaaaccaattaatgatgtcaatgtacatctgaaactggagagtttgttaaaggaaaattttacaataatgacaatgcaacaacaagctagaatcatagtgtggcagcgtaaagctgtgtgtgcaatctactctaatttgttcgtagaggtcaaaagacgattgaaggaagtattgcacagaaaaatagtatatgcggatggtttacgaccggatgaaatatctgccagagtccgattggttaaaaacgtagccggatttttcgaaaatgatttgactaaacaagatagacaaactgataaacctattatagaagtggaattgatgctttatgatttgttaggggtgcatccaaatgtcattgcatcctggaaagaaatgcatgaagtgtggagattcaaatccaacctttattggggacaaggtgaaggtatgcgattgaccggtcaagccaccactgcattaggcaattgtataacaaacttacaggtccatcagaagttcacaaagactaactttcaaacattgcaattgggtttgtttttgggggatgacatgtgcatgatattcagtgaaaaacctgatacttctaatttgcgaaaagacatcgctgcagaatttaatatg

SEQ ID NO: 643 - DNA, 711 bp, Bell pepper alphaendornavirus
  source 1..711: mol_type = other DNA
aaagtgttggattggttgagagacaggccagatagtaataaggtagcagtagaactagaagtgatattggaagagggaatgcaactacatgccattaacaggctaaatgtgcacctaaaattggaatcattgttaaaagctgaaccagcaagtagtttaaaacaagtgaaagctagagcgttgttatggcagtgtaaaggttactgtgcaatttttagtcacattttcaaagaggcgaaagtgagactcaaacaaatgttaaaaccaaacattgtctatgctgacggattgagagcagatgagttgtccgcaagagtaagactaaccacaggtgtaaaatatttattagaaaatgacttagcacagcaagacaaacaaactgaccatgaaatcattaaatttgaaatggcactgtacaaactgttaggggtgcatgacgatgttataaccttgtggcacaacagtcatttcaattggaaatacaaatccaggacagtaagaggagagggagatgccatgagattgactggtcaagcaaccacagctctgggaaatgctataaccaatatgttggtgcatagacgattagttaaccggctcggacacaatctaagattgtttttaattttaggaggtgatggtctcatgtttaccaatacgagcatagatctcagtcgactaaacaatgagacaaagatcaaacacaatatg

SEQ ID NO: 644 - DNA, 714 bp, unidentified
  source 1..714: mol_type = other DNA
gaaatcagaacatggttggcagcaagacctgacgggctgcaagttgctgccgagctggaagccataatggccgaagggtttgaggtgaaccccatcaacagggctaaggtgcacgtgaagctagagtcactactaaaagacgggtacgacagtgtaggcaacagggaggtggaggcgaggatcatcgtttggcaaaggaaaggattctgtgcaatattctcccccatattcctgcaagcaaagtccagattgaagtcactgttaaatgataaaaccttatacgctgacggtctgaccgcaggagaactatccgcaagagccaggctattgccaggtggactgtggatgatggaagatgacctgagtaagcaagacaggcagacggaccgcaacttgatagagtgtgagatggaatgctacaaacaactgggcgtggatgagcgagtactcaggttctgggaaaggacacatcaaaactggaaattcaagggatcaagcgtctcggggatactggatgcccagagattaactggacaagcaaccaccgccttaggaaacgccttagtaaacatgatggtgcacagtagattggtagaggagaacaagagacacgtgagattggtctgcatacttggagatgacaacttgatcctgtcagagcacaaaatcagctcttggagacaggtgaaagacagcaaagactactataacatg

SEQ ID NO: 645 - DNA, 711 bp, unidentified
  source 1..711: mol_type = other DNA
aaggtacttgattggttgcgagaccggccagacagtaataaagtagcagaagaagtagaaaccatcctgcaagagggaatgcagttgcattcaataaacagattgaacgtacacctaaaactggagtcattgcttaaggctgaacctgcttcaagtttaaagcaggtaaaggccagggcactactgtggcaatgcaaaggttactgtgcaatatttagtcacatattcaaagaggcaaaggccagactaaagcaattgctaaaaccgaccattgtgtatgcagacggattgcgtgccgacgagttgtctgcccgtgtgcggctcacaactaatgtgcattacttgatggaaaatgatttagcacagcaagacaaacagacagatcacgacattataaagtttgaaatggagttatatagattattgggagtgcatgatgatgtgataaatttgtggcacagtagccatttccattggaagtacaaatcaagaacagtgaaaggggctggggacgcaatgcgtttaacagggcaagccaccacagcactaggaaatgccatcactaatttgctagtgcacaggaaagtggttgacaggctgggcagcagcttgaggctgtttttagtgctgggcgacgatggactgatgtttacaagtgaaaaaatagatttgagcaaactaaacaatgaaaccaaaataaagcacaacatg

SEQ ID NO: 646 - DNA, 711 bp, Cucumis melo alphaendornavirus
  source 1..711: mol_type = other DNA
gatgtgaagaaatggattgaagagaataaagattgcgagaaaattgaacgagagttaattgacctattgtgtggagaattgatatcgaaaccaatcaatgatgttaatgtacatcttaaattagagagtttgttaaaagaaaattttacaataatgaccatgcaacaacaagcaagaatcatcgtttggcagagaaaagctgtttgtgctatctactcaaacctctttgtagaagttaaacgtagattgaaagaagtgttgcacagaaaaattgtatatgcagacggactacgaccagatgaaatatcagccagggtaaggttagtcaagaatgtagctggattttttgaaaatgatttaactaaacaagatagacaaactgataaacctatcattgaagtagaattgatgatatatgatttattgggagttcatccaaacgtaatagcatcgtggaaagaaatgcatgaggtgtggagatttaagtcaaatttgtactggggtcaaggagaaggtatgcggttgactggacaggcaacgactgcacttggcaattgtttgaccaatcttcaagtacaccaaaactttacaaagacaaatttctgtatattgcaactagggttatttttaggggatgatatgtgtatggtgttcagtgagaagccagatacgtcaaacctcagaaaagatattgcaaccagcttcaacatg

SEQ ID NO: 647 - DNA, 711 bp, Bell pepper alphaendornavirus; identical to SEQ ID NO: 637
  source 1..711: mol_type = other DNA

SEQ ID NO: 648 - DNA, 711 bp, unidentified
  source 1..711: mol_type = other DNA
aaggtactcgattggttgcgagaccggccagacagtaacaaagtagcagaagaagtagaaactatcctgcaagagggaatgcagttgcattcaataaacagattgaacgtacacctcaagctggagtcattgctcaaggctgaaccggcttcaagtttaaagcaggtaaaggccagggcactactgtggcagtgcaaaggttactgtgcaatatttagtcacatatttaaagaagcaaaggccagactaaagcaattgctaaaaccgaccattgtgtatgcggacggattgcgtgccgacgagttgtctgcccgtgtgcgactcacaactaacgtgcgttacttgatggaaaatgatttggcacagcaagacaaacagacagatcacgacattataaagtttgaaatggagttatatagattattgggagtgcatgatgacgtgataaatttgtggcacaatagccattttcattggaaatacaaatcaagaacagtaaagggggctggtgacgcaatgcgtttaacagggcaagccaccacagcactaggaaatgccatcactaatttgctagtgcacagaaaagtagttgacaaactgggcagcagcttgaggctgtttttggtgctgggcgacgatggactaatgtttacaagtgaaaaaatagatttgagcaaactaaacaatgaaaccaaaataaagcacaacatg

SEQ ID NO: 649 - DNA, 711 bp, unidentified
  source 1..711: mol_type = other DNA
aaggtactcgattggttgcgagaccggccagacagtaacaaagtagcagaagaagtagaaactatcctgcaagagggaatgcagttgcattcaataaacagattgaacgtacacctcaagctggagtcattgcttaaggctgaaccggcttcaagtttaaagcaggtaaaggccagggcactactgtggcagtgcaaaggttactgtgcaatatttagtcacatatttaaagaagcaaaggccagactaaagcaattgctaaaaccgaccattgtgtatgcggacggattgcgtgccgacgagttgtctgcccgtgtgcgactcacaactaacgtgcgttacttgatggaaaatgatttggcacagcaagacaaacagacagatcacgacattataaagtttgaaatggagttatatagattattgggagtgcatgatgatgtgataaatttgtggcacaatagccattttcattggaaatacaaatcaagaacagtaaagggggctggggacgcaatgcgtttaacagggcaagccaccacagcactaggaaatgccatcactaatttgctagtgcacagaaaagtagttgacaaactgggcagcagcttgaggctgtttttggtgctgggcgacgatggactaatgtttacaagtgaaaaaatagatttgagcaaactaaacaatgaaaccaaaataaagcacaacatg

SEQ ID NO: 650 - DNA, 711 bp, unidentified
  source 1..711: mol_type = other DNA
aaagtactggactggctgagtcaacgccctgacggcaacaagatagctgcagaattggaagggattctcagctccggcatggaagttaacccgatcaacaacatcaacgtgcacctcaagttggagtctttgctgaaagaagaacctgccaaatctatcaagcaggtcaaagcacggccattgatgtggcagtgtaaggggtactgtgcagtcttctctcactgcttcaaagaggttaaacaacgactcaaacaattacttaagcacaacatagtgtacactgacgggctgagggcggatgagctggcagcccgcgtcagggccgcaggtgatttcaaatatatatttgagaatgatttggcacagcaagacaagcaaaccgacatggaaataatagaatttgagatgtatttgtacaagaaacttggtatgaacccaggaatggtgaacttgtggaaaaattgccaccgacattggaagtacaaatcaaggacggtcatgggagtgagagatgctatgagactgactggtcaggctacaacagcattgggtaatgtaataacaaacatgcttgtgcacagacgaataacccagcagttgcaagattctcttcgattgtttttgttactaggtgacgacggactaatgttgcttgattcttggattaatgttgatcatctgaacacggaacttaaacatcatcacaacatg

SEQ ID NO: 651 - DNA, 705 bp, unidentified
  source 1..705: mol_type = other DNA
caagcatggattgataaacacaacatgcctgcatctgtgaaaagagatataagagaaatgctggagatggggtgggaacaaagaccaatcaactctatggaagtgcatgggaagacagaacaaacaacaaaattaaaaaatgcaaggtggttcaatgaggtggtcacacgtagcattgttgctgcaccttatgcagtatcagcgctttttgcagaggtgttcatggaaatgaagcaaagatttaagtctgtgttgcgatcggatgtgttttattcagatggtagcacgccagcagaattggcagctctggtgcgccaatgcggcgaatttaaatactgtacagaagacgacttgacacagcaagatggtcaaactgatagacaaatcataaacattgagatggaaatatacaaaatgcttggtcttagtgggaacgtgcttgcattctacagacaatgccacgacaattggaaatggaaaggtcacggtatatcaggggtgtgggatgcaatgcgattaagtggtcaggtgacgacagctcttgggaatgctataactaatttgatagttcacaacaggttcatgttacgcaacagaaactcgataaagaaagtactatttttaggagatgatatcatattcttgtccaataccaaattaaaagtggcaaatcacggtactgaaaccaaagagttgtacaatatg

SEQ ID NO: 652 - DNA, 711 bp, Bell pepper alphaendornavirus
  source 1..711: mol_type = other DNA
aaagtgttggattggttgagagacagacctgatagtaataaggtagcagtagaactagaagtgatattggaagagggaatgcaactacatgccattaacaggctaaatgtgcacctaaaattggaatcattgttaaaagctgaaccagcaagtagtttaaaacaagtgaaagctagagcgttgttatggcagtgtaaaggttactgtgcaatttttagtcacattttcaaagaggcgaaagtgagactcaagcaaatgttaaaaccaaacattgtttatgctgacggattgagagcagatgagttgtccgcaagagtaagactaaccacaggtgtaaaatatttattagaaaatgacttagcacagcaagacaaacaaactgaccatgaaataattaaatttgaaatggcactgtacaaactgttaggggtgcatgacgatgttataaccttgtggcacaacagtcatttcaattggaaatacaaatccaggacagtgagaggagagggagatgccatgagattgactggtcaagcaactacagctctgggaaatgctataaccaatatgttggtgcatagacgattagttaaccggctaggacataatctaagattgtttttaattttaggagatgatggtctcatgtttaccaatacgagcatagatctcagtcgactaaacaatgagacaaagatcaaacacaatatg

SEQ ID NO: 653 - DNA, 717 bp, unidentified
  source 1..717: mol_type = other DNA
gccatcaaagcatggttaacctctcgaccagatgccgtgaaaattgcggccgaagtagacgcaataatggtagagggatttgaaactaatcagttaaatacaatcaaagtacatttgaaactggagtctttgttaaaagaaaatccagttaaatatatgaaacaattgcaaccacgtatcatagcatggcaatctaaaggaatttgtgctctatatagtcattgctttaaaaacataaaacaaagattcaaatctatgttaaaacaaaatgtcatttacaccgatggtatgacacctgacaatttaggtgaacggtgtcgaaatgtacaaattaagccaacatacaactttgtagagaatgatttgacaaagcaagacaggcaaaccgatcacaatttgattgactttgaaatggccatttacattaaattaggtgcagataaaaatttgatagaatcttggttacgagtacacaaaaattggagagccaggggcacatatattgtaatgcacggagatgccatgagattgaccggtcaagctaccacagccttgggtaatgccattgttaatttgatatgtcacatggatttagttgaaagactgtcaacaaggttaatattaatgttaattttgggagatgacaacgcctttttggtggacggggaaatagataccgtgacactaagacgttggatcgcagacaaatgcaacatg

SEQ ID NO: 654 - DNA, 711 bp, unidentified
  source 1..711: mol_type = other DNA
aaaactaaacaatggatagctaaacaccacaacgcctcaaaagttttaaaagatcttgagacgtttttggtagaaggtaaccaaataaggtccatagcagatataaatatacatttaaaattggaatcattgttaaaggacccagctatacaatcattcaaacaacaacagccaaggtcaattatgtggcaacattattacgttgcggcaatatacagcccgatatttatggaagttaaaaaaagattaaaatttttacttaaagagcatataatatatgcagatggttataaagccagtgatttaagtaaagtattatctactatcagggctggtaaatactattacgaaagcgatttaaaaaaacaagacagacagacagataaacccttattggatgtggaaatggagatttacagactattgggagtggatgacaaagtactaaattcatggagaacagtacacgaaaagtggcggttcaagggcacttacagcaaaggattatgccaagaaatgcgcactaccggacaagctactactgcaataggcaacgtcataactaacatgcaagcaaatttaccagtgattgaaaaatacggtgctactattaaattaatgatgatgttgggggacgacaacttaatgaatatggaggttttagtaaacactaaagaagcggagaaaaatatagctgtcacatgtaatatg

SEQ ID NO: 655 - DNA, 711 bp, Bell pepper alphaendornavirus
  source 1..711: mol_type = other DNA
aaagtgttggattggttgagggacaggcctgatagtaataaggtagcagcagaactagaagtgatattggaagagggaatgcaactacatgccattaacaggctaaatgtgcacctaaaattggaatcattgttaaaagctgaaccagcaagtagtttaaaacaagtgaaagctagagcgttgttatggcagtgtaaaggttactgtgcaatttttagtcacattttcaaagaggcgaaagtgagactcaaacaaatgttaaaaccaaacattgtttatgctgatggattgagagcagatgagttgtccgcaagagtaagactaaccacaggtgtaaaatatttattagaaaatgacttagcacagcaagacaaacaaactgaccatgaaataattaaatttgaaatggcactgtacaaactgttaggggtgcatgacgatgttataaccttgtggcacaacagtcatttcaattggaaatacaaatccaggacagtaagaggagagggagatgccatgagattgactggtcaagcaaccacagctctgggaaatgctataaccaatatgttggtgcatagacgattagttaaccggctcggatataatctaagattgtttttaattttaggagatgatggtctaatgtttaccaatacgagcatagatctcagtcgactaaacaatgagacaaagatcaaacacaatatg

SEQ ID NO: 656 - DNA, 714 bp, unidentified
  source 1..714: mol_type = other DNA
gactttagaaactggatatatggacacaagaacgctcacaaggtaataacagagctagaatcattaagcgcggaagggcctctagtgaaccctttcaatttctttcgcagtcatgtcaaactagaaagcattaataaagaaaatcctataatggatttcaggcaagctgcaccacgagctatcgtgtggttgccgtactgcatgccagccttgtttagctacatgtttaaaatggcgagcaacaggttcaagcttatactaaggaaagaagtgcactatgcctcagggctggacgtaaacgatatcgaacaaatagtacgaaacacagacgacagtgatgttttcttttttgataacgacattagcaaaatggactctcagatagacaaagacttgatagaggttgagtgggaagtgctaagtctaatgggaatttcaccggacgtactcgaatcatataagaccctgaaacgaaactggcggatttctaacaaatatattagcgtgaccgggaaatggctaaggcattccggtgaaccaaccactgccctaggaaacgggataataaatctggcgataacggcattgtcaacgaccgaaacaaggagacaggaccttaaactatgtttattcatgggggacgacatggtaatgctaaccaagaaaaaggaagacgtattgcaggtgaagaagaaaggtaaacacctagctaac

SEQ ID NO: 657 - DNA, 711 bp, Phaseolus vulgaris alphaendornavirus 2
  source 1..711: mol_type = other DNA
aaagtgctagattggttaagggaccgtccggacagtaataaaatagcagaagaactgaacaatattttagctgagggtatgcaactgcacccaatcaacaaattaaacgtgcacttgaaattggaatcattgttgaaatcagagccagcgtcaaatttaaaacaagtcaaagctagagctttagtttggcagtgtaaaggatattgcgccatattcagtcacgtgttcaaagaagttaaagtcagactcaaagatttgttgcgaccagaaattgtgtattcagatggcttaagagcggatgaattggctgcaagagtgaggttgaccacaaatgtcaaatttttgctggaaaatgacttggcccaacaagacaaacaaaccgatcatgagataatcaaggttgaaatggaaatttataaattgttaggcgtgtgtcctcacctagtagatttatggaaaaattgtcaccacagttgggcctacaagtctagaactgtagcaggtgtaggtgacgctatgcgactcactggccaagccaccactgccatagggaacgccatcaccaatatgctggtgcataggcggttggttaaaacattgggtcacaacctaagattgtttttggtgttgggtgatgatggattaatgttcacaacaacatgggtggataccactaagttgaataacgagctgaaaaccaatcataacatg

SEQ ID NO: 658 - DNA, 711 bp, Basella alba alphaendornavirus 1
  source 1..711: mol_type = other DNA
gatgtcgaaaattggattaaggcaaataaagattgtccaaaaatagtgacggaaatgttagagaccctttctggaggcttccttaataaacacatcaatgacgtaaacgttcatttaaagttggagagtctttataagccagacccaatcaatgtatggagacaacaacaagcaaggataatagtttggcaaaggaaaagcatttgtgccatttatagctccgcttttaaagcaattaagaataaccttaaagcttgtcttgattataaagtggtatatgcagacggactaagaccagacgagctgtcagcaagggccagactttgcaataatgtggccgggttctttgaaaacgatttgacaaaacaagatagacaaacagatagaccattactggaagtagaaatgatgttgtatgatattctagggctacatccaaaagttatatcttcatggaaagagatgcatgaggagtggagattcaaatctgaacactattggggtactggaaccagcatgaggttaactggacaagcaaccactgctatagggaattgtatcactaacctacaagtgcaccaacaattcgtcaaagacaattgggataacttagagttagcgctgtttttgggagacgatatgtgcatggtattctctcaacaacccagcatcaaggatttgaagtatgacatagctgtaaattacaatatg

SEQ ID NO: 659 - DNA, 711 bp, unidentified
  source 1..711: mol_type = other DNA
gatgtgaagaaatggattgaagagaataaagattgtgagaaaattgaacgagagttaattgacctattgtgtggagaattgatatcgaaaccaatcaatgatgttaatgtacatcttaaattagagagtttgttaaaagaaaattttacgattatgaccatgcaacaacaagcaagaatcatcgtttggcagagaaaagcagtttgtgctatctactcaaacctctttgtagaagttaaacgtagactgaaagaagtgttgcacagaaaaattgtatatgcagatggactacgaccagatgaaatatcagccagggtaaggttagtcaagaatgtagctggtttttttgaaaatgatttaactaaacaagatagacaaactgataaacctatcattgaagtagaattgatgatatatgatttattaggagttcatccaaatgtaatagcatcttggaaagaaatgcatgaggtgtggagatttaagtcaaatttgtactggggtcaaggagaaggtatgcggttgactggacaggcaacgactgcacttggcaattgtttgaccaatctgcaagtacaccaaaactttacaaagacaaatttccgtatattgcaactagggttatttttaggtgatgatatgtgcatggtgttcagtgagaagccagacacgtcaaatctcaggaaagatattgcaaccaacttcaatatg

SEQ ID NO: 660 - DNA, 711 bp, Oryza sativa alphaendornavirus
  source 1..711: mol_type = other DNA
gatgttaaaaattggattgaagaaaataaagattgttttggtgttgaaaaagagctaaatgatttactagcaggcgaattattaatcaaaccattgaatgatgttaatgtgcatttgaaattggagtctttactaaaggacaagcatatctccattatgaaggaacagcaagctaggataatagtatggcaaaggaaagcagtttgtagtttatttgccaaattgtttgtaagatgcaaagacagactgaaaactttacttgtggatcatatactttatgtagatggattgagaccagatgaaatatcagccaaattaagacaaatatctgatgtatttggattttttgaaaacgacctgactaagcaagatagacaaactgacaaacccattttagaagtggaaatgttgatgtatcttatgttgggcgttcatcctaacatcatatctagttggcgttcaagtcatgatgattggagattcaaatctacaaattattggggtaagagcacggcaatgagattaacgggacaagctacaaccgcactaggaaattgtatcactaatatgcaagtacactcaaaatttgtaatcaaaaataaatattggttaaagtttgctttatttcttggggatgatatgtgtatgggtttctcacacaagccaaacacacagcacttacgccaggatatagcttgtaaatttaatatg

SEQ ID NO: 661 - DNA, 711 bp, Oryza sativa alphaendornavirus
  source 1..711: mol_type = other DNA
gatgttaaaaattggattgaagaaaataaagattgttttggtgttgaaaaagagctaaatgatttactagcaggcgaattattaatcaaaccattgaatgatgttaatgtgcatttgaaattggagtctttactaaaggacaagcatatctccattatgaaggaacagcaagctaggataatagtatggcaaaggaaagcagtttgtagtttatttgccaaattgtttgtaagatgcaaagacagactgaaaactttacttgtggatcatatactttacgtagatggattgagaccagatgaaatatcagccaaattaagacaaatatctgatgtatttggattttttgaaaacgacctgactaagcaagatagacaaactgacaaacccattttagaagtggaaatgttgatgtatcttatgttgggcgtgcatcctaacatcatatctagttggcgttcaagtcatgatgattggagattcaaatctacaaattattggggtaagagcacggcaatgagattaacgggacaagctacaaccgcactaggaaattgtatcactaatatgcaagtacactcaaaatttgtaatcaaaaataaatattggttaaagtttgctttatttcttggggatgatatgtgtatgggtttctcacacaagccaaacacacagcacttacgccaggatatagcttgtaaatttaatatg

SEQ ID NO: 662 - DNA, 711 bp, unidentified
  source 1..711: mol_type = other DNA
gcagtgttagactggattaaatcaaggcctgataataatgcgatagcagaagaaactgagcgcatcttgatggaaggaatgcacgttaatccaattaacatggtgaatgtacacttaaaattggaatccctgcttaaagaagagccagccacaaacttgaaacaggtgaaacctagagcactagtttggcaatgcaaagggtactgtgcaatgttttctcacgcgtttaaacaaatcaaaaacagattgaagatggtattaaacgaaaaagtggtctacgctgatggactgcaggcagatgaggtgtcaaacagactgagactagtggtaggtgatttgtgggtgttagaaaatgatctggcacaacaagatagacagacagatcacgaaatactgaattttgagatggagttgtacttgaaattgggcatgctgcctctgatggttagaatatggagaaatgtgcacaacaactggagatacaaaagcaaaacagtgagtggcatgcgcgacggaatgagattaactggccaggcaacgactgcgttgggaaatgtcatcaccaacttgttagtgcaccgacagttagtacaaaaattaggaaatgcagtcaaattgtttcttgtgttgggtgacgacggaattatgttaacgtcagttaagccagatactgacagactacgtcaatattgtaaacattatcacaacatg

SEQ ID NO: 663 - DNA, 711 bp, Bell pepper alphaendornavirus
  source 1..711: mol_type = other DNA
aaagtgttggactggttgagagataggcctgacagtaacaaagtggcagcagaactagaagtaatactggaagagggaatgcaattacatgccattaacaggctaaatgtgcacctgaaattggaatcattattaaagtctgagccagcaagtagtttgaaacaagtaaaagctagagcattgttatggcaatgtaaaggttattgtgcaatatttagtcacatttttaaagaggcaaaagtgagacttaagcaaatgttaaaacccaatatagtttatgctgacgggttgagggcagacgagctatccgcaagagtgagactgaccacaggtgtaaaatatttattagaaaatgatttagcacaacaagacaaacaaaccgatcatgaaataattaaatttgaaatggcactgtacaaagtgttaggggtgcatgacgatgtaataactttgtggcacaacagtcattttaactggaaatacaagtccaggacagtgcgaggagagggagatgccatgagattgactggtcaagcaactacagctctggggaatgccataaccaacatgttggtgcatagaagattagttaatcgactcgggcacaatttgcgattgtttctgattttgggagatgacggtctcatgtttactaacacaagtatagatcttagtcgattaaacaatgaaaccaaaatcaaacacaacatg

SEQ ID NO: 664 - DNA, 711 bp, unidentified
  source 1..711: mol_type = other DNA
aaagtattggactggttacgagaacgacccgatagcaacaagatagctgatgagctggagatgatattgtcgtcagggttggaggtgaacccaataaacaacattaaggtacacctgaaattggaatcattgctgaaagaggtgccggcagagtctataaaacaggtcaaagccagaccattgatgtggcaaaccaaaggttactgtgctttgttttcccacatcttcaaagaggtgaaaatcaggttgaagaacatgctcaaagcaaatattgtatacagtgacggattacgagcggatgagctagcagccagggtaagacaagttagtgatgccaattggctactagaaaacgatttggcccaacaagacaagcaaactgatcaccaaataattgcatttgaaatggcgttgtataaagagttaggagtggacgctggtgtggttaacctgtggcatagatgccattttcactggaaatacaaggcagcaaccgttatggggatccgtgacgcaatgcggctcactggacaagctaccacagcaattggaaatgccatcactaacatgttggtacacagaaaattggcacaacaagctggaaacaatcttaagttattccttatcttgggtgacgatgggttaatgtttacagaagagatggtggacgtgcataaattgaacgcagaaatgaaaacaaagcataacatg

SEQ ID NO: 665 - DNA, 711 bp, Hordeum vulgare alphaendornavirus
  source 1..711: mol_type = other DNA
aaagtaaaagaatggttgcaaggcagacctaatgtagaaagtatagttggggaggttaacaacattctgacggaagggtttatgaaacacccaatcaacaagcttaacgttcacctcaaactggaatctttgttaaaatcacaaccagttgtggaccataggcaaacaaaggccaggattttagtatggcaagcaaaaggcatgtgtgccatatacagcccagtgtttaaaatggcaaaagataggttaaaatcactgctaaatacaaaaactgtgtacgcagatggattgcgtccggaccaattagcactgagagtgacgcaagcggatcctgccaattacatcatggagaacgacctggaacaacaggaccgacaaaccgatgacaaactgttggacgtggaaatggcaatttatcacatgctgggtgtgcaggaagaactgttgtcgttatggaggcagtgccataacaactggaactttaagggaaggtcatgtcgcggagaacgaaactggatgaggctaacaggccaggctaccactgcactaggcaacgcaataaccaatttgtgcgtgcattggcggctgtgcagcaaattgggtaatgattggaaactgtttgtgttattaggagacgatggggcgttgttgaccaacaggacattgtcaaacaaagaagtgaaaacccatggtaaattgttgtacaatatg

SEQ ID NO: 666 - DNA, 711 bp, Hordeum vulgare alphaendornavirus
  source 1..711: mol_type = other DNA
aaagtaaaagaatggttgcaaggcagacctaatgtagaaagtatagttggggaggttaacaacattctgacggaagggtttatgaaacacccaatcaacaagcttaacgttcacctcaaactggaatctttgttaaaatcacaaccagttgtggaccataggcaaacaaaggccaggattttagtatggcaagcaaaaggcatgtgtgccatatacagcccagtgtttaaaatggcaaaagataggttaaaatcactgctaaatacaaaaactgtgtacgcagatggattgcgtccggaccaattagcactgagagtgacgcaagcggatcctgccaattacatcatggagaacgacctggaacaacaggaccgacaaaccgatgacaaactgttggacgtggaaatggcaatttatcacatgctgggtgtgcaggaagaactgttgtcgttatggaggcagtgccataacaactggaactttaagggaaggtcatgtcgcggagaacgaaactggatgaggctaacaggccaggctaccactgcactaggcaacgcaataaccaatttgtgcgtgcattggcggctgtgcagcaaattgggtaatgattggaaactatttgtgttattaggagacgatggggcgttgttgaccaacaggacattgtcaaacaaagaagtgaaaacgcatggtaaattgttgtacaatatg

SEQ ID NO: 667 - DNA, 711 bp, Cucumis melo alphaendornavirus
  source 1..711: mol_type = other DNA
gatgtgaagaaatggattgaagagaataaagattgcgagaaaattgaacgggagctaattgacctattgtgtggagaattgatatcgaaaccaatcaatgatgttaatgtacatcttaaattagagagtttgctgaaagaaaattttacaataatgaccatgcaacaacaagcaagaatcatcgtttggcagagaaaagctgtttgtgctatctactcaaacctctttgtagaagttaaacgtagattgaaagaagtgttgcacagaaaaattgtatatgcagatggactacgaccagatgaaatatcagctagggtaaggttagtcaagaatgtagctggattctttgaaaatgatttaactaaacaagatagacaaactgataaacctatcattgaagtagaattgatgatatatgatttattgggagttcatccaaacgtaatagcatcttggaaagaaatgcatgaggtgtggagatttaagtcgaatttgtactggggtcaaggagaaggtatgcggttgactggacaggcaacgactgcacttggcaattgtttgaccaatcttcaagtacaccaaaactttacaaagacaaatttccgtatattgcaactagggttatttttaggggatgatatgtgtatggtgttcagtgagaagccagatacgtcaaacctcagaaaagatattgcaaccagcttcaacatg

SEQ ID NO: 668 - DNA, 711 bp, Phaseolus vulgaris alphaendornavirus 1
  source 1..711: mol_type = other DNA
gatgttgaacaatggattgatgataacaaggactgcccaaagattgttaaggaactgttacagttgttatctggtgagttgtgtgtcaagcacataagtaatgtcaatgtacatcttaagttggaatcattgttgaaagataatcccatagattattggagacaacagcaggcacgtataattgtctggcaacgtaaggctgtatgcgcagtgtatactagcgtattcgtggaggcaaaaagacggttgaaagctattttgcatgacaaaattgtgtatgctgatggcttgcggccagatgagttatcagcacgattaagattatgcaattctgtagctgggttctttgagaatgatttaaccaaacaagaccgacaaacggacaaaccaattatagacgctgagatgataatttatgatatgttaggagtacacgcaaatgtaatcgcttcatggagagaaatgcatgaaacatggatgttcaaatcagataactattggggcacaggccaagccatgcgattaacgggacaagcaacaactgccattgggaatgtattgactaacatgcaagtgcacgccaagttcatacacaaacactggaatattttggaagttggtctattcttgggagatgatatgtgtctagtgttcaaacataaaccttcttaccaccatttgaagaacgacatcgcaaccatgtttaatatg

SEQ ID NO: 669 - DNA, 711 bp, Phaseolus vulgaris alphaendornavirus 2
  source 1..711: mol_type = other DNA
aaagtgctagattggttaagagaccgtccggacagtaataaaatagcagaagaactgaacaatattttagctgagggtatgcaactgcacccaatcaacaaattaaacgtgcacttgaaattggagtcgttgttgaaatcagagccagcgtcaaatttaaaacaagtcaaggctagagctttggtttggcagtgtaaaggatattgcgccatatttagtcacgtgttcaaagaagttaaagttagactcaaagatttgttgcgaccagaaattgtgtattcagatggcttaagggcggatgaattggctgcaagagtgaggttgaccacaaatgtcaaatttttgctggaaaatgacttggcccaacaagacaaacaaaccgatcatgagataatcaaggttgaaatggaaatttataaattgttaggcgtgtgccctcacctagtggatttatggaaaaattgtcaccacagttgggtatacaagtctagaactgtagcaggtgtaggtgacgctatgcgactcactggccaagccaccactgctatagggaacgccatcaccaatatgctggtacataggcggttggttaaaacattgggtcacaacctaagattgtttttggtgttgggtgatgatggattaatgttcacaacaacatgggtggataccactaagttgaataacgagctgaaaaccaatcataacatg

SEQ ID NO: 670 - DNA, 711 bp, Bell pepper alphaendornavirus
  source 1..711: mol_type = other DNA
aaagtgctggactggttgagagataggcctgacagtaacaaagtggcagcagaattagaagtgatactagaagagggaatgcaattacatgccattaacaagctaaacgtgcacctgaaattggaatcgttattaaagtctgagccagcaagtagtttgaaacaagtaaaagctagagcgttgttgtggcaatgcaaagggtattgtgcaatatttagtcacatttttaaagaggcaaaagtgagacttaagcaaatgttaaaacccaatatagtttatgctgacgggttgagggcagacgagctatccgcaagagtgagactgactacaggtgtaaaatatttattagaaaacgatttggcacaacaagacaaacaaactgaccatgaaataattaaatttgaaatggcactgtacaaagtgctaggggtgcatgacgatgtgataaccttgtggcacaacagtcattttaactggaaatacaagtccaggacagtgcgaggagagggagatgccatgagattgactggtcaagcaactacagctctggggaatgccataaccaacatgttggtgcatagaagattagttaatcgactcgggcacaatttgcgattgtttctgattttaggagatgacggtctcatgtttactaacacaagtatagatcttagccgattaaacaatgaaaccaaaatcaaacacaacatg

SEQ ID NO: 671 - DNA, 711 bp, Bell pepper alphaendornavirus
  source 1..711: mol_type = other DNA
aaagtgttggattggttgagagacagacctgatagtaataaggtagcagtagaactagaagtgatattggaagagggaatgcaactacatgccattaacaggctaaatgtgcacctaaaattggaatcattgttaaaagctgaaccagcaagtagtttaaaacaagtgaaagctagagcgttgttatggcagtgtaaaggttactgtgcaatttttagtcacattttcaaagaggcgaaagtgagactcaarcaaatgttaaaaccaaacattgtttatgctgacggattgagagcagatgagttgtccgcaagagtaagactaaccacaggtgtaaaatatttattagaaaatgacttagcacagcaagacaaacaaactgaccatgaaataattaaatttgaaatggcactgtacaaactgttaggggtgcatgacgatgttataaccttgtggcacaacagtcatttcaattggaaatacaaatccaggacagtaagaggagagggagatgccatgagattgactggtcaagcaactacagctctgggaaatgctataaccaatatgttggtgcatagacgattagttaaccggctcggacataatctaagattgtttttaattttaggagatgatggtctcatgtttaccaatacgagcatagatctcagtcgactaaacaatgagacaaagatcaaacacaatatg

SEQ ID NO: 672 - DNA, 711 bp, Bell pepper alphaendornavirus
  source 1..711: mol_type = other DNA
aaagtgttggattggttgagagacagacctgatagtaataaggtagcagyagaactagaagtgatattggaagagggaatgcaaytacaygcyattaacaggctaaatgtgcacctraaattrgaatcattgttaaargctgaaccagcaagtagtttaaaacaagtgaaagcwagagcgttgttatggcagtgtaaaggttactgtgcaatttttagtcacattttyaaagaggcgaaagtragactcaagcaaatgttaaraccaaayatwgtytatgctgacggattgagagcagatgagttgtccgcaagagtaagactaaccacaggtgtraaatatttrttagaaaatgayttagcacagcaagacaaacaaactgaccatgaaataattaaatttgaaatggcactgtacaaactgttaggggtgcatgacgatgtwataaccttgtggcacaacagtcatttcaattggaaatacaaatcyagracrgtaagaggwgarggagatgccatgagattgactggkcargcaactacagctytgggraatgcyataacyaatatgttggtgcatagacgattrgttaaycggctcggacayaatytaagattgtttttaattttaggagatgatggtctcatgtttaccaatacgagcatagayctcagccgactaaayaatgagacaaagatcaaacacaayatg

SEQ ID NO: 673 - DNA, 711 bp, Bell pepper alphaendornavirus; identical to SEQ ID NO: 637
  source 1..711: mol_type = other DNA

SEQ ID NO: 674 - DNA, 813 bp, Oryza sativa alphaendornavirus
  source 1..813: mol_type = other DNA
gatgtcaaaattggatcgaagaaaataaagattgtttggtgctgaaaagagttaaatgatttactagcaggcgaattattaatcaatcttaaatgatgttaatgttcatttaaagttggagtttctaaaggacaaacatatctccattatgaaggaacagcaagctagaataatagtatagcaaaggaaagcagttgtagtctatttgccaaattgtttaagatgcaaagacagactgaaaactttactgatagatatcgttactctacgtggatggatcagaccagatgaaatatcagccaattaagacaaatatctgatgtatttggattttgaaaacgacctgactaagcaagatagacaaactgacaaaccaattttggaagtggaaatgttgatgtatctcatgttgagttcatcctaacatcatatcagttggtgctctcaagtcatgatgattggagattcaaatcgatcacaaattattgggtaagagcacactcaacagcaatgagattatagggacaagccacaactgcactaggggaaattgtattactaatatgcaagtacacatcaaaatttgtaatcaaaataattggttagttttcttgctttatctaggacgatatgtgtatgggtttttcaccaagccaatgcacatcatcacgccaggatatagcttgtaaatttaatgcaaaagcaaagattttcttggatgactaatggagcaacgttctctgtagcatggtggtttacaaaacgaatgataacgtaagaattgggccagatgtagtcaggatgaaatttagg

SEQ ID NO: 675 - DNA, 906 bp, unidentified
  source 1..906: mol_type = other DNA
gtgtgcaatgcatactttaaacccggatgggagcacaatataccgcattttaaaaatgatttattaatcataactcccgaagatgtcaaaaattggatcgaagaaaataaagattgttttggtgttgaaaaagagttaaatgatttactagcaggcgaattattaatcaaaccattaaatgatgttaatgttcatttaaagttggagtctttactaaaggacaaacatatctccattatgaaggaacagcaagctagaataatagtatggcaaaggaaagcagtttgtagtttatttgccaaattgtttgtaagatgcaaagacagactgaaaactttactgatagatcatatactttacgtggatggattgagaccagatgaaatatcagccaaattaagacaaatatctgatgtatttggattctttgaaaacgacctgactaagcaagatagacaaactgacaaaccaattttggaagtggaaatgttgatgtatcttatgttgggagttcaccctaacatcatatccagttggcgttcaagtcatgatgattggagattcaaatctacaaattattggggtaagagcacagcaatgagattaacgggacaagccacaactgcactaggaaattgtattactaatatgcaagtacactcaaaatttgtaatcaaaaataaatattggttaaagtttgctttatttcttggggacgatatgtgtatgggtttttcacacaagccaaatacacaacacttacgccaggatatagcttgtaaatttaatatgcaaagtaaagattcttggatgactaatggagcaacgttctgtagcatggtagtttacaaaacgaatgataacgtagtagaattgggcccagatgtagtcaggatgaaatttagg

SEQ ID NO: 676 - DNA, 993 bp, unidentified
  source 1..993: mol_type = other DNA
accggtagactgttttcagttgtcaaccttcgtacagttacgcctgaccctgagagaatactttgggatgtgtgcaatgcatatttcaaacctggttgggagctaaatataccgcattttaaaaatgatttattgattataactcctaaagatgtcaaagattggatcgaagagaataaagattgctttggtgttgaaaaagagctaaatgatttgctagcaggtgaattattgattaaaccgttaaatgatgtaaatgttcatctgaaattagagtccttactaaaagacaaacatatctccatgatgaaggaacaacaagctaggataatagtatggcaaagaaaagctgtttgtagtttatttgccaaattgtttgtgaaatgtaaagatagactaaaatctttacttatggatcatatactttacgtcgatggactgagaccagacgaaatctccgctaaattaaggcagatatctgatgtattcggattctttgaaaacgacttgacaaagcaagatagacaaactgataagcccattttagaagtggaaatgttgatgtatctaatgctaggagttcatcccaacgttatatccagttggcgttcaagtcatgatgattggagatttaaatccacaaactattggggtaaaagtactgcaatgagattaactggacaagctacaactgccctaggaaattgtatcacaaacatgcaagtgcactcaaaatttgtaatcaaaaataaatattggttaaaatttgctttgttccttggagatgatatgtgtatgggcttctcacacaaaccaaatacacaacacttacgtcaggatatagcttgtaaatttaacatgcagagcaaagattcttggatgaccaatggggcaacgttttgtagtatggtggtttacaaaacaaatgataatgtagtggaattaggtccagatgtggtcaggatgaaatttagatatgaagttaccaatggt

SEQ ID NO: 677 - DNA, 310 bp, Oryza sativa alphaendornavirus
  source 1..310: mol_type = other DNA
gacagactgaaaactttactgatagatcatatactttacgtggatggattgagaccagatgaaatatcagccaaattaagacaaatatctgatgtatttggattctttgaaaacgacctgactaagcaagatagacaaactgacaaaccaattttggaagtggaaatgttgatgtatctyatgttgggagttcaycctaacatcatatctagttggcgttcaagtcatgatgattggagattcaaatctacaaattattggggtaagagcacagcaatgagattaacgggacaagccacaactgcactag

SEQ ID NO: 678 - DNA, 473 bp, Oryza sativa alphaendornavirus
  source 1..473: mol_type = other DNA
tggcaaataaactacaaactgctttcctttgccaaattgtttgtaanatgcaangacagactgaaaactttactgatagatcatatactttacgtggatggattgagaccagatgaaatatcagccaaattaagacaaatatctgatgtatttggattctttgaaaacgacctgactaagcaagatagacaaactgacaaaccaattttggaagtggaaatgttgatgtatcttatgttgggagttcaccctaacatcatatctagttggcgttcaagtcatgatgattggagattcaaatctacaaattattggggtaagagcacagcaatgagattaacgggacaagccacaactgcactaggaaattgtattactaatatgcaagtacactcaaaatttgtaatcaaaaataaatattggttaaagttkgctttatttcttggggacgatatgtgtatgggtttctcaca

SEQ ID NO: 679 - DNA, 473 bp, Oryza sativa alphaendornavirus
  source 1..473: mol_type = other DNA
tggcaaataaaccacaaactgctttcctttgccaaattgtttgkaagatgcaangacagactgaaaactttactgatagatcatatactttacgtggatggattgagaccagatgaaatatcagccaaattaagacaaatatctgatgtatttggattctttgaaaacgacctgactaagcaagatagacaaactgacaaaccaattttggaagtggaaatgttgatgtatctcatgttgggagttcatcctaacatcatatcyagttggcgttcaagtcatgatgattggagattcaaatctacaaattattggggtaagagcacagcaatgagattaacgggacaagccacaactgcactaggaaattgtattactaatatgcaagtacactcaaaatttgtaatcaaaaataaatattggttaaagtttgctttatttcttggggacgatatgtgtatgggtttctcaca

SEQ ID NO: 680 - DNA, 373 bp, unidentified
  source 1..373: mol_type = other DNA
acgaagtgataagaaaaaacccgggagcacgcccaggggtcctcgttgacttagcacagcaagacaaacaaactgaccatgaaataatcaaatttgaaatggcactgtacaaactgttaggggtgcatgatgacgttataaccttgtggcacaacagtcatttcaattggaaatacaaatccaggacagtaagaggagagggagatgccatgagattgactggtcaagcaaccacagctctgggaaatgctataaccaatatgttggtgcacagacgattagttaaccggctcggacataatttaagattgtttttaattttaggagatgatggtctcatgtttaccaatacgagcatagatctcagtcgaaa

SEQ ID NO: 681 - DNA, 373 bp, unidentified; identical to SEQ ID NO: 680
  source 1..373: mol_type = other DNA

SEQ ID NO: 682 - protein, 237 aa, Bell pepper alphaendornavirus
KVLDWLRDRPDSNKVAAELEVILEEGMQLHAINRLNVHLKLESLLKAEPASSLKQVKARALLWQCKGYCAIFSHIFKEAKVRLKQMLKPNIVYADGLRADELSARVRLTTGVKYLLENDLAQQDKQTDHEIIKFEMALYKLLGVHDDVITLWHNSHFNWKYKSRTVRGEGDAMRLTGQATTALGNAITNMLVHRRLVNRLGHNLRLFLILGDDGLMFTNTSIDLSRLNNETKIKHNM

SEQ ID NO: 683 - protein, 237 aa, Cucumis melo alphaendornavirus
DVKKWIEENKDCEKIERELIDLLCGELISKPINDVNVHLKLESLLKENFTIMTMQQQARIIVWQRKAVCAIYSNLFVEVKRRLKEVLHRKIVYADGLRPDEISARVRLVKNVAGFFENDLTKQDRQTDKPIIEVELMIYDLLGVHPNVIASWKEMHEVWRFKSNLYWGQGEGMRLTGQATTALGNCLTNLQVHQNFTKTNFCILQLGLFLGDDMCMVFSEKPDTSNLRKDIATSFNM

SEQ ID NO: 684 - protein, 237 aa, Bell pepper alphaendornavirus
KVLDWLRDRPDSNKVAVELEVILEEGMQLHAINRLNVHLKLESLLKAEPASSLKQVKARALLWQCKGYCAIFSHIFKEAKVRLKQMLKPNIVYADGLRADELSARVRLTTGVKYLLENDLAQQDKQTDHEIIKFEMALYKLLGVHDDVITLWHNSHFNWKYKSRTVRGEGDAMRLTGQATTALGNAITNMLVHRRLVNRLGHNLRLFLILGDDGLMFTNTSIDLSRLNNETKIKHNM

SEQ ID NO: 685 - protein, 237 aa, Bell pepper alphaendornavirus; identical to SEQ ID NO: 682

SEQ ID NO: 686 - protein, 237 aa, Bell pepper alphaendornavirus
KVLDWLRDRPDSNKVAAELEVILEEGMQLHAINKLNVHLKLESLLKSEPASSLKQVKARALLWQCKGYCAIFSHIFKEAKVRLKQMLKPNIVYADGLRADELSARVRLTTGVKYLLENDLAQQDKQTDHEIIKFEMALYKVLGVHDDVITLWHNSHFNWKYKSRTVRGEGDAMRLTGQATTALGNAITNMLVHRRLVNRLGHNLRLFLILGDDGLMFTNTSIDLSRLNNETKIKHNM

SEQ ID NO: 687 - protein, 237 aa, Bell pepper alphaendornavirus; identical to SEQ ID NO: 684

SEQ ID NO: 688 - protein, 237 aa, Persea americana alphaendornavirus 1
DVRAWIEDSKDSNKIVKELKELLAGEMLIKPMNDVNVHLKLESLLKANPINVTKEQQARVIVWQRKCVCALYARLFLKIKSRLKEILHEKIVYADGLTPDDISARVRLCNNVNGFFENDLTKQDRQTDRDIINMEMLVYIVLGANPSIISSWREMHEVWRFKSANYWGEGKEMRLSGQATTALGNVITNLQVHCKFVKKNSISMQLGLFLGDDMCMLFSEKPSIKNLRNDIACEFNM

SEQ ID NO: 689 - protein, 237 aa, Bell pepper alphaendornavirus
KVLDWLRDRPDSNKVAVELEVILEEGMQLHAINRLNVHLKLESLLKAEPASSLKQVKARALLWQCKGYCAIFSHIFKEAKVRLKQMLKPNIVYADGLRADELSARVRLTTGVKYLLENDLAQQDKQTDHEIIKFEMALYKLLGVHDDVITLWHNSHFNWKYKSRTVGGEGDAMRLTGQATTALGNAITNMLVHRRLVNRLGHNLRLFLILGDDGLMFTNTSIDLSRLNNETKIKHNM

SEQ ID NO: 690 - protein, 237 aa, Oryza sativa alphaendornavirus
DVKNWIEENKDCFGVEKELNDLLAGELLIKPLNDVNVHLKLESLLKDKHISIMKEQQARIIVWQRKAVCSLFAKLFVRCKDRLKTLLVDHILYVDGLRPDEISAKLRQISDVFGFFENDLTKQDRQTDKPILEVEMLMYLMLGVHPNIISSWRSSHDDWRFKSTNYWGKSTAMRLTGQATTALGNCITNMQVHSKFVIKNKYWLKFALFLGDDMCMGFSHKPNTQHLRQDIACKFNM

SEQ ID NO: 691 - protein, 237 aa, Oryza rufipogon alphaendornavirus
DVKNWVEENKDCFGVEKELNDLLAGELLIKPINDVNVHLKLESLLKEKHISLMKEQQARIIVWQRKAVCGLFAKLFVRCKERLKTLLLDHILYVDGLRPDEISAKLRQISNVFGFFENDLTKQDRQTDKPILEVEMLMYLMLGVHPNIIASWRASHEDWRFKSTNYWGKSTAMRLTGQATTALGNCITNMQVHSKFVIKNKYWLKFALFLGDDMCMGFSHKPNTQHLRQDIACKFNM

SEQ ID NO: 692 - protein, 237 aa, unidentified
DVKNWIEQNKDCEKIEKELIDLLCGELITKPINDVNVHLKLESLLKENFTIMTMQQQARIIVWQRKAVCAIYSNLFVEVKRRLKEVLHRKIVYADGLRPDEISARVRLVKNVAGFFENDLTKQDRQTDKPIIEVELMLYDLLGVHPNVIASWKEMHEVWRFKSNLYWGQGEGMRLTGQATTALGNCITNLQVHQKFTKTNFQTLQLGLFLGDDMCMIFSEKPDTSNLRKDIAAEFNM

SEQ ID NO: 693 - protein, 237 aa, Bell pepper alphaendornavirus
KVLDWLRDRPDSNKVAVELEVILEEGMQLHAINRLNVHLKLESLLKAEPASSLKQVKARALLWQCKGYCAIFSHIFKEAKVRLKQMLKPNIVYADGLRADELSARVRLTTGVKYLLENDLAQQDKQTDHEIIKFEMALYKLLGVHDDVITLWHNSHFNWKYKSRTVRGEGDAMRLTGQATTALGNAITNMLVHRRLVNRLGHNLRLFLILGGDGLMFTNTSIDLSRLNNETKIKHNM

SEQ ID NO: 694 - protein, 238 aa, unidentified
EIRTWLAARPDGLQVAAELEAIMAEGFEVNPINRAKVHVKLESLLKDGYDSVGNREVEARIIVWQRKGFCAIFSPIFLQAKSRLKSLLNDKTLYADGLTAGELSARARLLPGGLWMMEDDLSKQDRQTDRNLIECEMECYKQLGVDERVLRFWERTHQNWKFKGSSVSGILDAQRLTGQATTALGNALVNMMVHSRLVEENKRHVRLVCILGDDNLILSEHKISSWRQVKDSKDYYNM

SEQ ID NO: 695 - protein, 237 aa, unidentified
KVLDWLRDRPDSNKVAEEVETILQEGMQLHSINRLNVHLKLESLLKAEPASSLKQVKARALLWQCKGYCAIFSHIFKEAKARLKQLLKPTIVYADGLRADELSARVRLTTNVHYLMENDLAQQDKQTDHDIIKFEMELYRLLGVHDDVINLWHSSHFHWKYKSRTVKGAGDAMRLTGQATTALGNAITNLLVHRKVVDRLGSSLRLFLVLGDDGLMFTSEKIDLSKLNNETKIKHNM

SEQ ID NO: 696 - protein, 237 aa, Cucumis melo alphaendornavirus; identical to SEQ ID NO: 683

SEQ ID NO: 697 - protein, 237 aa, Bell pepper alphaendornavirus; identical to SEQ ID NO: 684

SEQ ID NO: 698 - protein, 237 aa, unidentified
KVLDWLRDRPDSNKVAEEVETILQEGMQLHSINRLNVHLKLESLLKAEPASSLKQVKARALLWQCKGYCAIFSHIFKEAKARLKQLLKPTIVYADGLRADELSARVRLTTNVRYLMENDLAQQDKQTDHDIIKFEMELYRLLGVHDDVINLWHNSHFHWKYKSRTVKGAGDAMRLTGQATTALGNAITNLLVHRKVVDKLGSSLRLFLVLGDDGLMFTSEKIDLSKLNNETKIKHNM

SEQ ID NO: 699 - protein, 237 aa, unidentified; identical to SEQ ID NO: 698

SEQ ID NO: 700 - protein, 237 aa, unidentified
KVLDWLSQRPDGNKIAAELEGILSSGMEVNPINNINVHLKLESLLKEEPAKSIKQVKARPLMWQCKGYCAVFSHCFKEVKQRLKQLLKHNIVYTDGLRADELAARVRAAGDFKYIFENDLAQQDKQTDMEIIEFEMYLYKKLGMNPGMVNLWKNCHRHWKYKSRTVMGVRDAMRLTGQATTALGNVITNMLVHRRITQQLQDSLRLFLLLGDDGLMLLDSWINVDHLNTELKHHHNM

SEQ ID NO: 701 - protein, 235 aa, unidentified
QAWIDKHNMPASVKRDIREMLEMGWEQRPINSMEVHGKTEQTTKLKNARWFNEVVTRSIVAAPYAVSALFAEVFMEMKQRFKSVLRSDVFYSDGSTPAELAALVRQCGEFKYCTEDDLTQQDGQTDRQIINIEMEIYKMLGLSGNVLAFYRQCHDNWKWKGHGISGVWDAMRLSGQVTTALGNAITNLIVHNRFMLRNRNSIKKVLFLGDDIIFLSNTKLKVANHGTETKELYNM

SEQ ID NO: 702 - protein, 237 aa, Bell pepper alphaendornavirus; identical to SEQ ID NO: 684

SEQ ID NO: 703 - protein, 239 aa, unidentified
AIKAWLTSRPDAVKIAAEVDAIMVEGFETNQLNTIKVHLKLESLLKENPVKYMKQLQPRIIAWQSKGICALYSHCFKNIKQRFKSMLKQNVIYTDGMTPDNLGERCRNVQIKPTYNFVENDLTKQDRQTDHNLIDFEMAIYIKLGADKNLIESWLRVHKNWRARGTYIVMHGDAMRLTGQATTALGNAIVNLICHMDLVERLSTRLILMLILGDDNAFLVDGEIDTVTLRRWIADKCNM

SEQ ID NO: 704 - protein, 237 aa, unidentified
KTKQWIAKHHNASKVLKDLETFLVEGNQIRSIADINIHLKLESLLKDPAIQSFKQQQPRSIMWQHYYVAAIYSPIFMEVKKRLKFLLKEHIIYADGYKASDLSKVLSTIRAGKYYYESDLKKQDRQTDKPLLDVEMEIYRLLGVDDKVLNSWRTVHEKWRFKGTYSKGLCQEMRTTGQATTAIGNVITNMQANLPVIEKYGATIKLMMMLGDDNLMNMEVLVNTKEAEKNIAVTCNM

SEQ ID NO: 705 - protein, 237 aa, Bell pepper alphaendornavirus
KVLDWLRDRPDSNKVAAELEVILEEGMQLHAINRLNVHLKLESLLKAEPASSLKQVKARALLWQCKGYCAIFSHIFKEAKVRLKQMLKPNIVYADGLRADELSARVRLTTGVKYLLENDLAQQDKQTDHEIIKFEMALYKLLGVHDDVITLWHNSHFNWKYKSRTVRGEGDAMRLTGQATTALGNAITNMLVHRRLVNRLGYNLRLFLILGDDGLMFTNTSIDLSRLNNETKIKHNM

SEQ ID NO: 706 - protein, 238 aa, unidentified
DFRNWIYGHKNAHKVITELESLSAEGPLVNPFNFFRSHVKLESINKENPIMDFRQAAPRAIVWLPYCMPALFSYMFKMASNRFKLILRKEVHYASGLDVNDIEQIVRNTDDSDVFFFDNDISKMDSQIDKDLIEVEWEVLSLMGISPDVLESYKTLKRNWRISNKYISVTGKWLRHSGEPTTALGNGIINLAITALSTTETRRQDLKLCLFMGDDMVMLTKKKEDVLQVKKKGKHLAN

SEQ ID NO: 707 - protein, 237 aa, Phaseolus vulgaris alphaendornavirus 2
KVLDWLRDRPDSNKIAEELNNILAEGMQLHPINKLNVHLKLESLLKSEPASNLKQVKARALVWQCKGYCAIFSHVFKEVKVRLKDLLRPEIVYSDGLRADELAARVRLTTNVKFLLENDLAQQDKQTDHEIIKVEMEIYKLLGVCPHLVDLWKNCHHSWAYKSRTVAGVGDAMRLTGQATTAIGNAITNMLVHRRLVKTLGHNLRLFLVLGDDGLMFTTTWVDTTKLNNELKTNHNM

SEQ ID NO: 708 - protein, 237 aa, Basella alba alphaendornavirus 1
DVENWIKANKDCPKIVTEMLETLSGGFLNKHINDVNVHLKLESLYKPDPINVWRQQQARIIVWQRKSICAIYSSAFKAIKNNLKACLDYKVVYADGLRPDELSARARLCNNVAGFFENDLTKQDRQTDRPLLEVEMMLYDILGLHPKVISSWKEMHEEWRFKSEHYWGTGTSMRLTGQATTAIGNCITNLQVHQQFVKDNWDNLELALFLGDDMCMVFSQQPSIKDLKYDIAVNYNM

SEQ ID NO: 709 - protein, 237 aa, unidentified
DVKKWIEENKDCEKIERELIDLLCGELISKPINDVNVHLKLESLLKENFTIMTMQQQARIIVWQRKAVCAIYSNLFVEVKRRLKEVLHRKIVYADGLRPDEISARVRLVKNVAGFFENDLTKQDRQTDKPIIEVELMIYDLLGVHPNVIASWKEMHEVWRFKSNLYWGQGEGMRLTGQATTALGNCLTNLQVHQNFTKTNFRILQLGLFLGDDMCMVFSEKPDTSNLRKDIATNFNM

SEQ ID NO: 710 - protein, 237 aa, Oryza sativa alphaendornavirus; identical to SEQ ID NO: 690

SEQ ID NO: 711 - protein, 237 aa, Oryza sativa alphaendornavirus; identical to SEQ ID NO: 690

SEQ ID NO: 712 - protein, 237 aa, unidentified
AVLDWIKSRPDNNAIAEETERILMEGMHVNPINMVNVHLKLESLLKEEPATNLKQVKPRALVWQCKGYCAMFSHAFKQIKNRLKMVLNEKVVYADGLQADEVSNRLRLVVGDLWVLENDLAQQDRQTDHEILNFEMELYLKLGMLPLMVRIWRNVHNNWRYKSKTVSGMRDGMRLTGQATTALGNVITNLLVHRQLVQKLGNAVKLFLVLGDDGIMLTSVKPDTDRLRQYCKHYHNM

SEQ ID NO: 713 - protein, 237 aa, Bell pepper alphaendornavirus
KVLDWLRDRPDSNKVAAELEVILEEGMQLHAINRLNVHLKLESLLKSEPASSLKQVKARALLWQCKGYCAIFSHIFKEAKVRLKQMLKPNIVYADGLRADELSARVRLTTGVKYLLENDLAQQDKQTDHEIIKFEMALYKVLGVHDDVITLWHNSHFNWKYKSRTVRGEGDAMRLTGQATTALGNAITNMLVHRRLVNRLGHNLRLFLILGDDGLMFTNTSIDLSRLNNETKIKHNM

SEQ ID NO: 714 - protein, 237 aa, unidentified
KVLDWLRERPDSNKIADELEMILSSGLEVNPINNIKVHLKLESLLKEVPAESIKQVKARPLMWQTKGYCALFSHIFKEVKIRLKNMLKANIVYSDGLRADELAARVRQVSDANWLLENDLAQQDKQTDHQIIAFEMALYKELGVDAGVVNLWHRCHFHWKYKAATVMGIRDAMRLTGQATTAIGNAITNMLVHRKLAQQAGNNLKLFLILGDDGLMFTEEMVDVHKLNAEMKTKHNM

SEQ ID NO: 715 - protein, 237 aa, Hordeum vulgare alphaendornavirus
KVKEWLQGRPNVESIVGEVNNILTEGFMKHPINKLNVHLKLESLLKSQPVVDHRQTKARILVWQAKGMCAIYSPVFKMAKDRLKSLLNTKTVYADGLRPDQLALRVTQADPANYIMENDLEQQDRQTDDKLLDVEMAIYHMLGVQEELLSLWRQCHNNWNFKGRSCRGERNWMRLTGQATTALGNAITNLCVHWRLCSKLGNDWKLFVLLGDDGALLTNRTLSNKEVKTHGKLLYNM

SEQ ID NO: 716 - protein, 237 aa, Hordeum vulgare alphaendornavirus; identical to SEQ ID NO: 715

SEQ ID NO: 717 - protein, 237 aa, Cucumis melo alphaendornavirus
DVKKWIEENKDCEKIERELIDLLCGELISKPINDVNVHLKLESLLKENFTIMTMQQQARIIVWQRKAVCAIYSNLFVEVKRRLKEVLHRKIVYADGLRPDEISARVRLVKNVAGFFENDLTKQDRQTDKPIIEVELMIYDLLGVHPNVIASWKEMHEVWRFKSNLYWGQGEGMRLTGQATTALGNCLTNLQVHQNFTKTNFRILQLGLFLGDDMCMVFSEKPDTSNLRKDIATSFNM

SEQ ID NO: 718 - protein, 237 aa, Phaseolus vulgaris alphaendornavirus 1
DVEQWIDDNKDCPKIVKELLQLLSGELCVKHISNVNVHLKLESLLKDNPIDYWRQQQARIIVWQRKAVCAVYTSVFVEAKRRLKAILHDKIVYADGLRPDELSARLRLCNSVAGFFENDLTKQDRQTDKPIIDAEMIIYDMLGVHANVIASWREMHETWMFKSDNYWGTGQAMRLTGQATTAIGNVLTNMQVHAKFIHKHWNILEVGLFLGDDMCLVFKHKPSYHHLKNDIATMFNM

SEQ ID NO: 719 - protein, 237 aa, Phaseolus vulgaris alphaendornavirus 2
KVLDWLRDRPDSNKIAEELNNILAEGMQLHPINKLNVHLKLESLLKSEPASNLKQVKARALVWQCKGYCAIFSHVFKEVKVRLKDLLRPEIVYSDGLRADELAARVRLTTNVKFLLENDLAQQDKQTDHEIIKVEMEIYKLLGVCPHLVDLWKNCHHSWVYKSRTVAGVGDAMRLTGQATTAIGNAITNMLVHRRLVKTLGHNLRLFLVLGDDGLMFTTTWVDTTKLNNELKTNHNM

SEQ ID NO: 720 - protein, 237 aa, Bell pepper alphaendornavirus; identical to SEQ ID NO: 686

SEQ ID NO: 721 - protein, 237 aa, Bell pepper alphaendornavirus; identical to SEQ ID NO: 684

SEQ ID NO: 722 - protein, 237 aa, Bell pepper alphaendornavirus
KVLDWLRDRPDSNKVAXELEVILEEGMQLHAINRLNVHLKLESLLKAEPASSLKQVKARALLWQCKGYCAIFSHIFKEAKVRLKQMLXPNIVYADGLRADELSARVRLTTGVKYLLENDLAQQDKQTDHEIIKFEMALYKLLGVHDDVITLWHNSHFNWKYKSRTVRGEGDAMRLTGQATTALGNAITNMLVHRRLVNRLGHNLRLFLILGDDGLMFTNTSIDLSRLNNETKIKHNM

SEQ ID NO: 723 - protein, 237 aa, Bell pepper alphaendornavirus; identical to SEQ ID NO: 684

SEQ ID NO: 724 - protein, 465 aa, unidentified
PYTMNYTASVIEPLFDMPDIASMQLWTDTDLTDWLNMYAPSNKTVIKSRELPGKIINMEKITMTKYPIKSRPVLTKICFEEGRSITGRLFSVVNLRTVTPDPEKILWDVCNAYFKPGWEHNIPHFKNDLLIITPEDVKNWIEENKDCFGVEKELNDLLAGELLIKPLNDVNVHLKLESLLKDKHISIMKEQQARIIVWQRKAVCSLFAKLFVRCKDRLKTLLIDHILYVDGLRPDEISAKLRQISDVFGFFENDLTKQDRQTDKPILEVEMLMYLMLGVHPNIISSWRSSHDDWRFKSTNYWGKSTAMRLTGQATTALGNCITNMQVHSKFVIKNKYWLKFALFLGDDMCMGFSHKPNTQHLRQDIACKFNMQSKDSWMTNGATFCSMVVYKTNDNVVELGPDVVRMKFRYEVTNGVHEATKENLLMRKASYLMMLGKTPEVDKLVNDLQLPINPVHWYNYHTML

SEQ ID NO: 725 - protein, 462 aa, unidentified
PYTMNYTASVIEPLFDMPDIATMQLWTDTDLTDWLNMYAPSNKTVIKSRELPGKIINMEKITMTKYPIKSRPVLTKICFEEGRSITGRLFSVVNLRTVTPDPERILWDVCNAYFKPGWELNIPHFKNDLLIITPKDVKDWIEENKDCFGVEKELNDLLAGELLIKPLNDVNVHLKLESLLKDKHISMMKEQQARIIVWQRKAVCSLFAKLFVKCKDRLKSLLMDHILYVDGLRPDEISAKLRQISDVFGFFENDLTKQDRQTDKPILEVEMLMYLMLGVHPNVISSWRSSHDDWRFKSTNYWGKSTAMRLTGQATTALGNCITNMQVHSKFVIKNKYWLKFALFLGDDMCMGFSHKPNTQHLRQDIACKFNMQSKDSWMTNGATFCSMVVYKTNDNVVELGPDVVRMKFRYEVTNGVHEATKENLLMRKASYLMMLGKTPEVDKLVKDLKLPINPVHWYNYH

SEQ ID NO: 726 - protein, 103 aa, Oryza sativa alphaendornavirus
DRLKTLLIDHILYVDGLRPDEISAKLRQISDVFGFFENDLTKQDRQTDKPILEVEMLMYLMLGVHPNIISSWRSSHDDWRFKSTNYWGKSTAMRLTGQATTAL

SEQ ID NO: 727 - DNA, 226 bp, Bell pepper alphaendornavirus
  source 1..226: mol_type = other DNA
gtaaaacaaacaaggttttatgactactaagttgtctagaccttttgctttacgtttactgggtggctctcgccccccgaaaactcaaattcttcatgggtgtactggtaacagtatacccatgaagaaattaaataagaaaaacgattgctctgctagaaaagcatttaggcagagcaaatttaaatttaaaataagtaaaaataagacgatatgtccggcagtg

SEQ ID NO: 728 - DNA, 101 bp, Bell pepper alphaendornavirus; identical to SEQ ID NO: 595
  source 1..101: mol_type = other DNA

SEQ ID NO: 729 - RNA, 33 nt, Hordeum vulgare alphaendornavirus
  source 1..33: mol_type = genomic RNA
agaggtcgagtggcttaaagccactcgacctct

SEQ ID NO: 730 - RNA, 33 nt, Lagenaria siceraria alphaendornavirus
  source 1..33: mol_type = genomic RNA
ggggagagacctccattttggaggtctttcctc

SEQ ID NO: 731 - RNA, 33 nt, Lagenaria siceraria alphaendornavirus
  source 1..33: mol_type = genomic RNA
ggggagagacctccattttggaggtctctcctc

SEQ ID NO: 732 - RNA, 33 nt, Hot pepper alphaendornavirus
  source 1..33: mol_type = genomic RNA
ttcatgggtgtactggaaacagtatacccatga

SEQ ID NO: 733 - RNA, 33 nt, Bell pepper alphaendornavirus
  source 1..33: mol_type = genomic RNA
ttcatgggtgtactggtaacagtatacccatga

SEQ ID NO: 734 - RNA, 33 nt, Cluster bean alphaendornavirus 1
  source 1..33: mol_type = genomic RNA
aacttaggtgtgtgcgaaagcacacacctaagt

SEQ ID NO: 735 - RNA, 33 nt, Phaseolus vulgaris alphaendornavirus 2
  source 1..33: mol_type = genomic RNA
ctcatgagcacacgagcaatcgtgtgctcatga

SEQ ID NO: 736 - RNA, 33 nt, Basella alba alphaendornavirus 1
  source 1..33: mol_type = genomic RNA
acctgaacgaggtgataaaacacctcgttcagg

SEQ ID NO: 737 - RNA, 33 nt, Cucumis melo alphaendornavirus
  source 1..33: mol_type = genomic RNA
agggagagacctcctttttggaggtctctcctt

SEQ ID NO: 738 - RNA, 33 nt, Oryza sativa alphaendornavirus
  source 1..33: mol_type = genomic RNA
atgatcaaatcaagtacgatcttggtttgatca

SEQ ID NO: 739 - RNA, 33 nt, Helianthus annuus alphaendornavirus
  source 1..33: mol_type = genomic RNA
caaagtagccatcaacacccaggccactctagg

SEQ ID NO: 740 - RNA, 33 nt, Lagenaria siceraria alphaendornavirus
  source 1..33: mol_type = genomic RNA
gcaaatgcagtataaaacagatgcaattactcc

SEQ ID NO: 741 - RNA, 33 nt, Phaseolus vulgaris alphaendornavirus 2
  source 1..33: mol_type = genomic RNA
atgctctgcaagaaacgtatacagacagagcaa

SEQ ID NO: 742 - RNA, 33 nt, Cluster bean alphaendornavirus 1
  source 1..33: mol_type = genomic RNA
accaaggtaaaattacatgatgatcttgagact

SEQ ID NO: 743 - RNA, 33 nt, Bell pepper alphaendornavirus
  source 1..33: mol_type = genomic RNA
ggccgatgttactaccaccatcaaaacaagacg

SEQ ID NO: 744 - RNA, 33 nt, Oryza sativa alphaendornavirus
  source 1..33: mol_type = genomic RNA
tcaaaaacccctgttataaaagggtttttgaaa

SEQ ID NO: 745 - RNA, 33 nt, Vicia faba alphaendornavirus
  source 1..33: mol_type = genomic RNA
gcgtaatctgcaccgatttaacagaaatattaa

SEQ ID NO: 746 - RNA, 33 nt, Phaseolus vulgaris alphaendornavirus 1
  source 1..33: mol_type = genomic RNA
caagccttctatcaagcaattaggttgggtagg

SEQ ID NO: 747 - RNA, 33 nt, Hot pepper alphaendornavirus
  source 1..33: mol_type = genomic RNA
tggacattagaacaattagaaatatgatgttat

SEQ ID NO: 748 - RNA, 27 nt, Oryza sativa alphaendornavirus
  source 1..27: mol_type = genomic RNA
agggggggggcggagacgccccccccc

SEQ ID NO: 749 - RNA, 27 nt, Bell pepper alphaendornavirus
  source 1..27: mol_type = genomic RNA
accgttttacggtggacctagtaaaat

SEQ ID NO: 750 - RNA, 27 nt, Phaseolus vulgaris alphaendornavirus 2
  source 1..27: mol_type = genomic RNA
tctttgggtggttcacaccacccgaaa

SEQ ID NO: 751 - RNA, 27 nt, Yerba mate alphaendornavirus
  source 1..27: mol_type = genomic RNA
gagggggcactcgaaagggtgcctcct

SEQ ID NO: 752 - RNA, 27 nt, Oryza rufipogon alphaendornavirus
  source 1..27: mol_type = genomic RNA
agggggggggcggagacgccccccccc

SEQ ID NO: 753 - RNA, 27 nt, Cluster bean alphaendornavirus 1
  source 1..27: mol_type = genomic RNA
ttcattgccacttggtggctggccaag

SEQ ID NO: 754 - RNA, 27 nt, Persea americana alphaendornavirus 1
  source 1..27: mol_type = genomic RNA
ggagggggcctcgaaagaggccccctt

SEQ ID NO: 755 - RNA, 27 nt, Cucumis melo alphaendornavirus
  source 1..27: mol_type = genomic RNA
cgaagaccctcttgctggcgtggttaa

SEQ ID NO: 756 - RNA, 27 nt, Basella alba alphaendornavirus 1
  source 1..27: mol_type = genomic RNA
gaagattcattcctccgattagaaata

SEQ ID NO: 757 - RNA, 27 nt, Lagenaria siceraria alphaendornavirus
  source 1..27: mol_type = genomic RNA
gattagaagttttgaaaaactatttaa

SEQ ID NO: 758 - RNA, 27 nt, Lagenaria siceraria alphaendornavirus
  source 1..27: mol_type = genomic RNA
caaatgcaaatgaatacagatgcaatt

SEQ ID NO: 759 - RNA, 27 nt, Hordeum vulgare alphaendornavirus
  source 1..27: mol_type = genomic RNA
gaaccatggtaccctgtgcattggctt

SEQ ID NO: 760 - RNA, 27 nt, Helianthus annuus alphaendornavirus
  source 1..27: mol_type = genomic RNA
cggtgccccagcgaaagtcaaggactg

SEQ ID NO: 761 - RNA, 27 nt, Vicia faba alphaendornavirus
  source 1..27: mol_type = genomic RNA
atcgccgccggctccagtcggcgaccc

SEQ ID NO: 762 - RNA, 25 nt, Persea americana alphaendornavirus 1
  source 1..25: mol_type = genomic RNA
taatgatatagcctgtgaattcaat

SEQ ID NO: 763 - RNA, 25 nt, Winged bean alphaendornavirus 1
  source 1..25: mol_type = genomic RNA
aagccaaaactaagtagcgtggttg

SEQ ID NO: 764 - RNA, 25 nt, Basella alba alphaendornavirus 1
  source 1..25: mol_type = genomic RNA
gcctcctatattatgatgctggggc

SEQ ID NO: 765 - RNA, 25 nt, Bell pepper alphaendornavirus
  source 1..25: mol_type = genomic RNA
tcagtcgactaaacaatgagacaaa

SEQ ID NO: 766 - RNA, 25 nt, Helianthus annuus alphaendornavirus
  source 1..25: mol_type = genomic RNA
cacctggatttttaaacacctagcg

SEQ ID NO: 767 - RNA, 25 nt, Yerba mate alphaendornavirus
  source 1..25: mol_type = genomic RNA
tgaatcggaacataaaggagattca

SEQ ID NO: 768 - RNA, 25 nt, Cucumis melo alphaendornavirus
  source 1..25: mol_type = genomic RNA
catgcaaagcaaagattcttgggtg

SEQ ID NO: 769 - RNA, 25 nt, Phaseolus vulgaris alphaendornavirus 2
  source 1..25: mol_type = genomic RNA
ttgcacactgggaccagatgtggtg

SEQ ID NO: 770 - RNA, 25 nt, Phaseolus vulgaris alphaendornavirus 3
  source 1..25: mol_type = genomic RNA
agaatcaaggagctaacaggagatt

SEQ ID NO: 771 - RNA, 25 nt, Oryza sativa alphaendornavirus
  source 1..25: mol_type = genomic RNA
tgatatctaaagacgacatttatca

SEQ ID NO: 772 - RNA, 40 nt, Persea americana alphaendornavirus 1
  source 1..40: mol_type = genomic RNA
gagctacaacggtgcaactttttgtagcatgatactagct

SEQ ID NO: 773 - RNA, 40 nt, Phaseolus vulgaris alphaendornavirus 2
  source 1..40: mol_type = genomic RNA
tgtccaaatggggtgagtgaaatgactcccgacaatgtac

SEQ ID NO: 774 - RNA, 40 nt, Hot pepper alphaendornavirus
  source 1..40: mol_type = genomic RNA
gaatgaagaacggcaactattaaagatgttaagagagagg

SEQ ID NO: 775 - RNA, 40 nt, Basella alba alphaendornavirus 1
  source 1..40: mol_type = genomic RNA
acaaatggggtacacgagatgaacgatttgaataacttga

SEQ ID NO: 776 - RNA, 40 nt, Cucumis melo alphaendornavirus
  source 1..40: mol_type = genomic RNA
gtggctcataagtataatatgaacgaggagcaggttagag

SEQ ID NO: 777 - RNA, 40 nt, Oryza sativa alphaendornavirus
  source 1..40: mol_type = genomic RNA
tagaggattcggtaatagatgaatattataactaactctg

SEQ ID NO: 778 - RNA, 40 nt, Lagenaria siceraria alphaendornavirus
  source 1..40: mol_type = genomic RNA
caaatatgatatgacgcacgtacaagtgctagatgtatat

SEQ ID NO: 779 - RNA, 40 nt, Bell pepper alphaendornavirus
  source 1..40: mol_type = genomic RNA
tgcgcttacgacggcggttcgaatgccccaatggggtaag

SEQ ID NO: 780 - RNA, 30 nt, Yerba mate alphaendornavirus
  source 1..30: mol_type = genomic RNA
gaaattcaatatgcaaagcaaagataattg

SEQ ID NO: 781 - RNA, 30 nt, Phaseolus vulgaris alphaendornavirus 1
  source 1..30: mol_type = genomic RNA
catgtttaatatgcaaagcaaagaatcatg

SEQ ID NO: 782 - RNA, 30 nt, Winged bean alphaendornavirus 1
  source 1..30: mol_type = genomic RNA
gcgagaaacagttgcaaacaaaaaattcag

SEQ ID NO: 783 - RNA, 30 nt, Cluster bean alphaendornavirus 1
  source 1..30: mol_type = genomic RNA
gatgtcttattgcatgatgttaggagacat

SEQ ID NO: 784 - RNA, 30 nt, Vicia faba alphaendornavirus
  source 1..30: mol_type = genomic RNA
ctacctacacatgctaggcaaaagtgagga

SEQ ID NO: 785 - RNA, 30 nt, Lagenaria siceraria alphaendornavirus
  source 1..30: mol_type = genomic RNA
tgtccagatgtggttagacttaaatttaga

SEQ ID NO: 786 - RNA, 30 nt, Hordeum vulgare alphaendornavirus
  source 1..30: mol_type = genomic RNA
ggaactccaacgcaagagccacagaggaca

SEQ ID NO: 787 - RNA, 30 nt, Phaseolus vulgaris alphaendornavirus 3
  source 1..30: mol_type = genomic RNA
tggcatataagtgggaagtaccgaatggcc

SEQ ID NO: 788 - RNA, 1912 nt, synthetic construct
  source 1..1912: mol_type = other RNA
gtaaaacaaacaaggttttatgactactaagttgtctagaccttttgctttacgtttactgggtggctctcgccccccgaaaactcaaattcttcatgggtgtactggtaacagtatacccatgaagaaattaaataagaaaaacgattgctctgctagaaaagcatttaggcagagcaaatttaaatttaaaataagtaaaaataagacgatatgtccggcagtgagtgtgcggaagaacttgaaggtttgctacacagtcaaatatgtactgcagaagatcccagcttgctgcagtactcaatcaaaggtaaacctgagactcttgcctactatgatcccttgggcccgaaattcaatactcctctttatcttcaaatgctcccgcttctaaaagacaatcctatctttcggaagccatttgtatttgggacagaagccagtagaactctaggatcttggtgtgttgaccagatctggacggatgccatttgctgcacgccaaaaatacatcgagcagatcttcgccttcgagtaaagctaccacttctatctattatctactataccccagagtcaaatatcatcgtgacgaaaactgtggcgagcctgagaaagattgtgcaaagtctcaacattttcgaagacccctacgttttgacactaaaaaggagtgatagcgaaaaaagtcaacgtgagctggcgaaagtactcaagagtaaataaatagcacaacatttcaaccagaaacactagccgaagcaaatccattccacaagcacctggtgggatcatctcatcatcagaaaccaagagagagattccgtgtccgcttgttgtagtagattgtgaggactgaggaccgagaagcagccgccaccatggctctagttgttaaaggaaaagtgaatatcaatgagtttatcgacctgacaaaaatggagaagatcttaccgtcgatgtttacccctgtaaagagtgttatgtgttccaaagttgataaaataatggttcatgagaatgagtcattgtcagaggtgaaccttcttaaaggagttaagcttattgatagtggatacgtctgtttagccggtttggtcgtcacgggcgagtggaacttgcctgacaattgcagaggaggtgtgagcgtgtgtctggtggacaaaaggatggaaagagccgacgaggccactctcggatcttactacacagcagctgcaaagaaaagatttcagttcaaggtcgttcccaattatgctataaccacccaggacgcgatgaaaaacgtctggcaagttttagttaatattagaaatgtgaagatgtcagcgggtttctgtccgctttctctggagtttgtgtcggtgtgtattgtttatagaaataatataaaattaggtttgagagagaagattacaaacgtgagagacggagggcccatggaacttacagaagaagtcgttgatgagttcatggaagatgtccctatgtcgatcaggcttgcaaagtttcgatctcgaaccggaaaaaagagtgatgtccgcaaagggaaaaatagtagtaatgatcggtcagtgccgaacaagaactatagaaatgttaaggattttggaggaatgagttttaaaaagaataatttaatcgatgatgattcggaggctactgtcgccgaatcggattcgttttaaagacgcatccatggctgaatggttaaagcgcccaactcataattggcgaattcgtaggttcaattcctactggatgcaaagatccgtcctactggtgcctaatccgccgtatgttaagagaaaggcagtactttaagcacgaagtgcttcactggtttgaaggaatttaaagccaggttaacaacaaaatttgagttttcggggagggagggcccccccccccc

SEQ ID NO: 789 - RNA, 2000 nt, synthetic construct
  source 1..2000: mol_type = other RNA
gtaaaacaaacaaggttttatgactactaagttgtctagaccttttgctttacgtttactgggtggctctcgccccccgaaaactcaaattcttcatgggtgtactggtaacagtatacccatgaagaaattaaataagaaaaacgattgctctgctagaaaagcatttaggcagagcaaatttaaatttaaaataagtaaaaataagacgatatgtccggcagtgtagcttatttgggttctttatcactgtcctgattaaggctgaatcagaacaccatcacttccactcacacgacagtagtaagacacagaacatagtagttaatactggaaagtaacccaccatgggtgtccaaaagaccgaaacccaggccatttccccagtcccggcagaaaagctgttcaagggttctttccttgacatggacaccgtcgtccccaaggcttttccagaaggtattaagagcgtccaagttcttgagggcaacggcggagttggaaccatcaaaaacgtcactctaggggatgccaccccattcaacaccatgaagacccggatagatgcaattgacgagcatgcattcacttacacttacaccattataggaggtgatatccttttggacattattgaatccatagagaatcatttcaagattgtgcctactgatggagggagcaccatcacacagaccaccatatacaacaccataggtgatgccgtaattccagaagagaatatcaaggatgccaccgataagtcaatccaactattcaaggctgttgaagcttacctcctagcaaattagaaatagcacaacatttcaaccagaaacactagccgaagcaaatccattccacaagcacctggtgggatcatctcatcatcagaaaccaagagagagattccgtgtccgcttgttgtagtagattgtgaggactgaggaccgagaagcagccgccaccatggctctagttgttaaaggaaaagtgaatatcaatgagtttatcgacctgacaaaaatggagaagatcttaccgtcgatgtttacccctgtaaagagtgttatgtgttccaaagttgataaaataatggttcatgagaatgagtcattgtcagaggtgaaccttcttaaaggagttaagcttattgatagtggatacgtctgtttagccggtttggtcgtcacgggcgagtggaacttgcctgacaattgcagaggaggtgtgagcgtgtgtctggtggacaaaaggatggaaagagccgacgaggccactctcggatcttactacacagcagctgcaaagaaaagatttcagttcaaggtcgttcccaattatgctataaccacccaggacgcgatgaaaaacgtctggcaagttttagttaatattagaaatgtgaagatgtcagcgggtttctgtccgctttctctggagtttgtgtcggtgtgtattgtttatagaaataatataaaattaggtttgagagagaagattacaaacgtgagagacggagggcccatggaacttacagaagaagtcgttgatgagttcatggaagatgtccctatgtcgatcaggcttgcaaagtttcgatctcgaaccggaaaaaagagtgatgtccgcaaagggaaaaatagtagtaatgatcggtcagtgccgaacaagaactatagaaatgttaaggattttggaggaatgagttttaaaaagaataatttaatcgatgatgattcggaggctactgtcgccgaatcggattcgttttaaagacgcatccatggctgaatggttaaagcgcccaactcataattggcgaattcgtaggttcaattcctactggatgcaaagatccgtcctactggtgcctaatccgccgtatgttaagagaaaggcagtactttaagcacgaagtgcttcactggtttgaaggaatttaaagccaggttaacaacaaaatttgagttttcggggagggagggcccccccccccc

SEQ ID NO: 790 - DNA, 82 bp, Nicotiana tabacum
  source 1..82: mol_type = genomic DNA
agacgcatccatggctgaatggttaaagcgcccaactcataattggcgaattcgtaggttcaattcctactggatgcaaaga

SEQ ID NO: 791 - DNA, 12730 bp, Agaricus bisporus alphaendornavirus 1
  source 1..12730: mol_type = other DNA
cccttaaacaaaatgaactcattagctaaagtagaaacatatcacacacacacacgagggggtggtgtcccctccaaaatacgttgttacaccagtttcaaaaaaacgctaacagccatacaacgtaacaaacactgtcttggacttcaaatcgatgaagattttccaaagacagtaaaaatgtccgatcctgttgatgaatatgccgacagaattaaattaatagttggcgcaacaggagtcacggaagtcaaacataaatactctcacatggttggaggggctgtttacttcaaggaagccatgaaaattagtggtcttaccagagaagagttactctcagaaatcctccaaacggtgagatcgaaattcgtttgtctatttgaatgtcacaaacaagatgatcccattaacatggtgatggaactcggcaatgaaattttaaacaatttgccagaagatgatgatgaaaatattgattcgttatgtgaaacaatttcagacttatatctaggtgaatacaatagttacgattatgaggaagaagaacatgaacattgtgaggatgaaatggagttgttagatgatatctacaacgacgtggcagcttactttgaagtgtcagatatgtatgatacaccatttacacccgaacaatgtttagaactcctaaaacaattcgatgaaccaatcacttcaagtgttgacattttaaaattgcatctaaatgttaagcacttaccaaaacttgttaacgtggcttattgtgccaattgtgaaatggaagcaatcctaggtcataaccacaaaaatgtcctcactaattgcatttgtttaaattgttataaagagttgacaattaaaccattaggtaaaatcggatccacggtgcctgatccaatgagtctgacagaatatttagacaatggtaatagcattagtggtgcctttgagaatattgctcaagagcacgatttgagagtggttgtgcaagcattatctaggctcaacgccaaattaataactttacacgaaccgatagataacttgaccaaatcataccttaagaaactagcaccagaactagtgtttgcacgaggtaaaggtagtcttgttggtaacacattactagacaatctaacaattggtttaacagcaaatctacacaactctggtgaaaccacgttactcatcagtgaacaccctccaccatcaccagcatatattaattggaacagatggcccgacagcaatcaaaattacggatttagaaacactgtggtgtcaattgaccgtatagtagctggtttcaaactacttagtcaactagaagtcgactgttctgtcgtgttttgtttgccgactggcatagctggtgtcacagattatgatacaaccactaacatacgttttgataggtcaaacaattcttgtttaatgacacatgatatgagaacagaagtacactatattaattccacacataaaatgttgttattcaatgctaacataatgagcattaatgataaattgtttgtcattagtagacaaacttatgatagtatatgtgtcgtcacggtacgtagagttgtgactttcaaagattggacaatttacaatccagatttgcgaaacacgtttactatccctacgattacctacaacagcgctcttggtttagtcggagcaccgatcgtcgtgatcaaaactgtcaaattacacaaagaattgttgactactttaattacacgaaacttgaccggcaatgtgagtgccaaagaactcgcggagtacggattgggcttcgctcattcaaagtacaacttattcgacaaatcattcagtcattatgacgtgagtgctcaaatgatcatggatcacgttttcatatccgtactattgtgcacaagagctaccaacaaaagacgcgcgttactgaattctgccacacctgatttaacaggtatattgaacttaattggttacaattcactcggctacctcgcagccactattaaaaagatgttagacaaaaattctactataactgcactcaacgactttttcacaaacaataacagtgttttaacagaatatgctaatgatccagtttgggacgaaattgagagttggacacacactgctactaacgaaaacattcaactaatcacgcattacgaaacgccccttggttgctgccacactgatatacacaacgacagttgtggttgttgtggtttgggaaattccacttttaggtgcacccactgcgctaatacaccagcacaattaattgagactctgaatatagtagttgaagaaaaaatagaaccgtcagagcaagtgaagacacgtaatgaaaaaatatttgattacaatggcataccagcaaggaaggcagtgttgccttgcgtcgaactatcagacggttcacatgaacacacttgtgtggtttgcaacaatcgttataaacacacacacaatcatgagagtagtatgcatccacttttcgttggcgattgtccatggtgtgaaccagaattaacaacaaaaaacaaaggagaaaaaattgattatttagactcaaacaataacattaacaaaccagttaaaaccgacgcaaatgttcctaacaagcctataacacctggacccgccaaactactcaatgacgttccagaaaaaacagagcgtacaccagaatcaacagtacctgaaacaccgtggggaaactcaaatagactaagtgttttatactcacaattaagtcaagcaaccagtgtacatttcgctgagctgatttacagcaaaggagcacggttcgtgaacctttacacaatcactaatgaaaaacaaagtttaatattgtactgcccatttgggactcacgttgtgactccacaaagtttcgttgtcaaagacacaatgcccgtagcaaattcaggtttagatacttgtgcctatgacgcattaaatttcttttatcaaaatagatcaactattgaagattttaaagctgtaagcaaaactgataacttttggagtaacgatgaaattatctctgttgctgaacttaagaaattgaacgttgtggttttgtcaaagcaaagtggaataatccacaaagcaactaatagtgacgaatttgcagttattgttcacaatgatttcttagataaaccaggcgcacactggacaccagccaaagtgtcacaaatttcaaattgtactataacgccagtttggaccttgaatgcagacttggaacagtataacaagatgtcaaacatgaaatataagaaacattacgatttagtgaaactagatattgaacaattgctaaccgtaaacctagaaatagttaaaatttcaacaaacactttagaactacttcgtcacgcaaaacctaacattgttgttgatgttaagcatggtcacgaattccttcaaacaacaagtttgagtcaagatagtatggaattagaaacagttgaaataccagtcaaattttcagctttgatgaatttgttgaacgattcgagtaagactgttcttgaacatgataaattaacaagacattacaatgtcgcattaactaatactatcgacgaattgtacgaggccgagatcactgaagctatcagaatattcttaaaatgcaaattcggtgccaatattacaaattatcataaaatgagggtaattaaaagatttgatgatttgatagaattagaaaatttagatttaccaaaacttaaagtgggagacatcatccatttaagtcaccagtcgaacatgatagcggtaccgattttaaaaactcgtcacaatacattagtagtaaaaataactggtgtgcgagttggtgttcaacttttgtttggaattacaaaggaatccgctggaagtatgatcaggcgaattttcggtttgttaagggttcccaaattaagcaacaaactttttgaacaattaagtaatacagaatgtgtcctagctgttccgggagcagggaaaacatacgaaatattaaatagttataacgcaggagattgtatcatcgctatgacttcccacaataaatcaagcatttatcggagagctaaagaaatgaagaaaattgtaaacgttaaatctttagagaaattcttgagtgaggggaagaaatacaagactgtgtacttggatgagtgtactttagttaaaccatttgacggagtgttggttctcacattgtgcgacaaaatgtatgcgtatggtgacaacaatcaaattccattcgtcgatatgtcgcagtcagctgggactagggaagttaaaaatattactgacgttgtcaaacccgaaaagattgagaccaaattattatctagaagatttggaccttcattagtttctgagttgtccccgttaatccccggaattatgtgtcatccatctgttgaacatgacactgacattagatttgcaaactatgagaaaaattctatacaagtgactgcagaaatagaaaataacgtcaggaactttaaacctaatgtagtgttagtatttttccaagcgaagaaagcattttggttgaagaggttacatccgattgttgttgaaaccgttcacagttaccaaggtaacgaggccgataatgttgtggttattcaagaaccaaatgaaagcacattcggcatttgtgcagataaaaagtatgtgatctcagccgcatccagagcggttaaacacttgttttggatatcgatcgggatgtaccaacacaacaaaggattaagttcaagagtctacacattatccccacagcgtggtggtggtatacataaaacattcaatgccatattagacaacataacaggcgtagaaatggtgtccaatacaggaacaatgattgatgctgacaaatttaatgcatctaaatcagcgtatgaagataaatacggtgtaaaagtttctttagcaaataactctgatggtcaatccctagaagttcgtaaagttgggatactaatggtgagatttgacatagtaaatggtgtggccaccacttcatatgacagattgaatatggtcacgtcaaaagatctgtctgatctaaacgaactgttgaaacccgcggtcattcaatgcgataaattcgacacgaaatttaacaccactattgattcacaacaagccgatataataacattcaatatgcaacttagtgccttgcattcggcttgtgcaagcacacaagttacattttataacgattctactgaggtaagcatcatttgtaggacgactcataacaaatttagaatttcattatctttaaatgacgattattgccttaaggtacaacccatgattattggaagaaattttgaaactcatgtgcataatgttctcactactcttggttatcaagatggtagtgaagaatatccgtttagccctgcggaaccaattaaaactacggtaattaatcacacttttaatcaaatcatgaattatttaaaaactgtagtgccggacataattgaacaaaaaatgagtgacagcaaaaaatttttaaataagatttgtgaactaacaaaagagaatgaaatggtactgcttcataatcacgaaacaggttgttatgtagtcaagactccaataaattataagtgtgtgactcccaagtgtacatacaacacaaatgcatacaatgcgttaatgattttcttgaacgccactagttttaagactagtgcaatgactattttgcgtttacttacgaagtcactcattggatctcgtactgataatggaatagaaggactgatgcttccatggcactaccacaagacgcacgcaactaaagctttcaaacattacatcgacaagagtgctttattatatatgactagtaaaattggtgaaaaaagaacaatctacgtgacagaacaaaacagagacaaaatcatgaatatggtacgagatgcaggtatagatgttaatgtgaacatacatcgtttctgcccatcgttgcccttgggtgttgaaattgttggtgttttaatggtcttaagtctagataagtctaagcaagacagaaaaatcaaaatctacggaccacacgcaggtgttctagccgcaaatgggttcttaaatttacaaaaagttagagattatcatgaattatctacttatgagttgcatgccgtcgatgatcgaatgttgagttcagtaaaaaacagtgttagcgaggcattaaagaaaaagcagtttgataacacgaacactgaaaaagatgacgcttttatcaaagcgttggaaacacctaatgagattaattatgccgcactttatggttatgattacaatctgataacgaattctaatttgttaacagacttatcagagtttgaaaccgtcaagttaataacagatttagattcgattgagcagtgtactgaaggctcaccgaccttcgttgacaatccaatgtggcaatttactttcaaaatacctaaaattttgaatgccctaatacaaacaggcgctgacgaaaacaaactactcagttatgattccacgtttgtggggttgggtgctgtagtgggtgacattgaacaaggtgttagtaaacaactatacagtcaactggcaggatttgtgctacgtgatcaaataacactaacagtaccacgcttgaatagtagtatgattgatggggaagtaaacgttaccagccaagagatcactgtgtcacgtaaattgttccgcgattgcgggttgagattgttaagagaaaatcacgatatcgacagtttactaaaacacgttcgcacaaaacaacatgctacttattactcagatagtggtagctacagacaatataaagagacacccggagcagctatggatttgtgtctagctgtttacctgagatataacaataaatttactgagctgttcgatacaattaaatggctacaacctgaaacagtcaaacaagaaggtatatttgagttgttgttagataacttaggtagtagcgctaaagaaatggtgttgaacgttgttagcaaactctcaggtattgctggtatgaatttaccacaaaaagactttattaaaacgatatggaaagttgtgagaaatatggctttccatcaggaagacatgttcactgaaacgatgagtgtgatgaatgtagaagagagaatatctactagacgcctattaatgcggggaaccaagcagattctaatgactagtggggcggcgagcattgatgaaggggcaaataaagtgaccttacaatccaagtatctccataaattgttcagcaatatgtcaacgctgatgcaatccgttagtgcaagacatgaccctgtcactttaatgaaagacttcaccaaaccaaagagtatatgctgtatttgcattggttcttttggtgacataaccaaccatctccaagtagcaaacatggctgtccatgaaggtgttaaagtttcattaatctttccagacagctatttggatcaggtgaggagtattgcagactcgaaagttaccctagtgccacaaagattcagtgtagacaatcacatcaaactattgaatgagttaaggactgacaaccttgaggttttaatgacggcatacaccgaagagaaaggagcattactttataatgattttgattacaagattttgaaaccagacttggttgttggaacttgtttgactgtacagggaccaataatcgccaaaaagttcaatgcaaactaccttgaattgaatgcattaccttggaatttagtaagagccgaaaataaaagattcgactcacttaaaaatgtattatatcggggttacagagcaatgcaactagaaaccatcataaagcaatacgccattgccggtttgcagaaccccacacctcaagacataataagtgaaaattacacaagtgtaaatgtaatagatccaatctttggtttagtggctgagaaagaaaaccactcggtagttgggtttttaccatttaaatacacaaattcaaagacaattttaacaaccaaaacatgtgtattaacattaggttctatgaaaaccaaacagcatgcaaacaaactaatatcagtagctaaaaaactgttgagttttggtgaacatgttacgattgttgaaggaggtgtcaaatttaacaaagaatttatagaccggtcagataaattacaaattgtaagcaatgtggattatacctcacaattagttcactgtaaattaatgttacatcactgcggctcaggaacaacacacaccgccatgttagcaggattaccacaaattttgttgccagttgattttgatcaacctcaatgggcgggagcgcttaataagaaagggtacggagtgtatgctgatgaactgttgaacatggaattagatgatttcacccattggttcaacgtcacgttagagaaaaccaagaatgactcaaataaaatgattcggcataccgctacaaacatagcacatgccttgaaattaacagataatgcaatcactgatagtgttacattgacaacagacattacaattgaggaagaagcaataattagagacaacatacataaatgtaacctccataaatgtaaacctttagagacgatgagtgttttgattaatacatgttgtggtgaacgtaaaagacactgtgtcattggtgagacagaagagtgttacataatagtgaattcaacacattaccctgatcacagaattgggtggaacagaaaacaacatattgctatacaacccatcatgcccattccagtactgcgtggtcattacgaaatagccactttgggttatcatgctcatggaatgtgtgaagcaaatagtgaatcacctcctaacttttatataaaacctaatcaagtatctgaatttaacaaatcgatagattggattgatttagttagattacacaatgggagatggtcaaaccgaggagtgttcggaatcgaaccaaggacaggtatttgcaattgttgtcacagatcaatgtggttattaagatcacaaaatgaaaagttgtgcacatcctgtcatatacaaatcaattggcctcaattcactttcacagactccgtatccaccaccaaaaccgataattttaaagccaaatctagagcaggacacattatttttgagctttcgaagttacaagaatctcacgtgttattagatcctaaagggaatagcaattgcgttcccaactgtttacgtgctgttgcaaagtatagtacaaaggtgtccagcacgatcaataatgcatttattgattttgaaattggtgagttcaccagtatagagaaaattattcaaatttgtcgattcatgagagtggacatacaagttgaccatccaaatgtaaaaactgggggcagattgttgcacaatttagagtttgataagactccaaaactgaggctgttaataacgggtgaaagagaacagcactgcacattaaccgccgctatcaaaatacctgctgcacagaaatcaataactttaatagaaaccgaaaacccatgcgatgacatgaattcattgataactactgacttgattgacaatgcagacatggatttcaatcaaattttaaaaacaaaccttaaaaccttcaggtcaacaaagtacacagacgttatagcaaaaacaacagatggtaaattgaacatttatggtagaaggaatttgttggtggaagcaaatattgtattcagaaagttcaaatctcatgaaatgtactttggtgaattaccggagtcatttaacagatttgaggacagaatactttgtgtcccgactagaaccggtaatgttattgggttagtcacaagattaaacaacacggaaaaacaactaattgttttgactggacaaagacctttacctgtggtaaattatgtgatcgacgcaagtgtatcaattaccaaggtcaaaaaacacaaaaaacttattaaaaatgatactgttacagtgggcgcgttcaatgaaaaaagtagacgcgaattgtctaccatttacccagggatcagtgtgaatagaaactgccagaaagtagtgattagtagtctagacactagaaatcatcacttgtatagtgagtggaatgaaatgcacactttgttaaatagaaacacaatgggtgaaacactcattgaattgtacggcaaactggatggtgcaacagtgccaacactggtcgattcaaacttaacacaaagtatatgtgaacaattttctagaacgacaagggaccaaattttcagatttggttgggaccaaaaacctactgttgaaacttggacccgtgataaaccaactggcttgttccttgaagagcaaggtttcacatcgccagaaaacgagaggtatgtattagattacgagcagtttaaagatataagtgagttgaatgatacagaaaccatgaacaagttaataagttgcgatttgatcggatacatttcactcaagaattgtgtgaaatatttcgaaatcattaaatcgactgaggatattgtcgcatttacgggtgtggataaaaatgaattaaatcgtgaattgattgattatgatgaggctagcttaacagtgacttgtgggccgatctggaaaggcggattgcccgagataacgacgatggattctcttaacaggactgtctttgtgagaccagaagatattaaggagtcgaacggtgaattgacgctagtttggttcaggtctaattgtttaattttgacaacctttgtatggaaaaagaaagtaagaggtggttcttatggtcaaaaacaggatctcgaggatagaaaacaaaatattgacagtgacaacaacaaactttattggtttaatgaggagattgaagaaagattagaacaccgcggtgccgaatcctggatagacaaaggatcaaaaccaaaaaacactcaattaccagctttagctgccaatgaagttgaactcgatgccttatgtagtgtttttaatgatggaatgaggggttacgacgggaaaacgtttgttgcttctgaacctgctaataaaaagtttttaatgtttactgaaccagacacgccaaactttgtttgccatgaaacgggagaaggaccagaaataggaacggaagtgatggatataattgacgatgttgacttggccgatcacgtcacaagactagctccgaaaactggaataattaagtcacacgaagttccaggtaggattgtcactaacactaagacaactatggttaaatatccagagatgtctaaacctgttataacgaaaggggtctaccaaacattcaatgctgtttcatcaagactgcatagtgtcgtgaaatatcgcaaacataaaatggatgttgtgtctgagtttgacagatgtgctaattgttattttgtgcctaattatcaacatgtattggatgaatttaagaatgatcccataacctacaatgttaacaacatagtagattgggtgaataggagaaaaaacagttctgtcgtagctgccgaattgattgaactgatgcaaactggttggtttaatcatccaatcaacagcgtgaaagtgcacagtaaacttgaatcattgttgaaagaagatgaaattggttatcaatatggacaacaaaaaatacgcattatcgtgcaccaaacatatgcgatttgtgcgatatttgcagatatatttttgcaagcaaaagaaagatttaaacaactcctgggtgaaaaatgcgtgtatgccgacggcttcacacttgaagaattggcagccagaatgagattaatcaaatcagacaaaccattatgggtatttgagcgtgacttcacaaaacaagacagacaaacagacgaagatttaataaattttgaaatgtacgtttacaaacaacttggagttcatgacgacgtaataagtttttggcgcaagacacatgagaattggttctacaaaggtactgacttgagtgggtcgttaagttggatgcgtctcactggacaatgtacaacggcattaggaaatgctataactaatatggttgtgaatagcagaacttatcaagaatatgaacaaaacattaaaattatgctgttgctgggtgatgataattcaatgatcagtgactgtgaaataaatgttcacaatagtagaaaaattagtagggattattacaacatggagtcaaaagatttttgtaaaaaacacactggcatatttttgagaatgatattacaccaacaacaagacggcagtatgtctgtctgtcctgactttttacgtttacgaagaagatatgaagttactaacggagtgcacaaaatgggtgacgaagaacttaaactacgtggtttaagttatttgtacatgttgggtcgtaacaaagttactgaagaagcagtgacatctttgggttataacgacgaattattgccgacgtattacaattttgaagaagcagttatggctgtggcaactaacaatggtatgacgaatgatgcagcaagaaatgagtttaatctattgattgatatgatcaaagcaaacaagtcttacgatgtagactatgtggttaccagtagtcaaattcgttaaactgattattgcgtattgagtgaaaacgtttgtttcactcaacgcgcaattagtgtgtgtgtgt

SEQ ID NO: 792 - DNA, 10431 bp, Alphaendornavirus fimbriatae-1
  source 1..10431: mol_type = other DNA
atggagctactacgtcatctagacatcaggagcaaagacctagtgtgtcggaagacaaagaggcaccgactagtatttcgggatgatggactcaagtcccatcatcccgaaacgagggccatgctcaattggatgaagaatccaaagcatgtgcccacaaacagggctaatgccaccgaacaaagtcaaacttctcttgaacgcaggaatttggccagatggatggccctacacaccaaacaaaatgtccgtgttggagacaacggggacacaaagtcaatttttaaatacatgaagagtaagggcatggggagcatagcatggacccaaacttggggttatgacacttaccaacgcactggtctgtcccaaggatccacacggttaatgtctcaaggactcacagaggatccatccatggggtactacagtgcacccaaggagttgagagagagcacttttacacagattgggaaaatgtacttgactggaaagcacactggattacaaaacgccagagacgctatgatgctggccaaatgggtcacaatggattaccgtgtgcacccaagctgtccagtttacaagtggataacaaacagccaagaaaaccccgtggccccaattgcttatttcttctactacctggagggcaaccaaaagatgagaggtgctctcgaaaagagaggcgccatcaaacctgtcagtgactcggaaaatgacatgttcaacctgatcttcctcaaacaggtgtgtaagaaaatagccagatggagggattggaagcaatccaagtctcagcaaatggcttacatcaatgaacaaggagacatagcagccaccacatctgttagatggtacactccagaagagcggattgaaggcgaggtgtgcttgagcttatcagaacctagtgacgcctattataatgacattacgcaattgaatggctcgaacttgggttgttgcaagctgtgcagacactgtggaaccctgaacatcaagcaagacttgctgtacaaaccatctatcgacgtagaagagaatcagtggtggagcgaagaagaaaattattgtgcggaatgtcactcctatttggacatgccagaccaagagtgggaggacgcacacaatgtagaggatgtggtcaattacttcatctctgcgaacgttggttcgaaagttgatgaaatgggtttaatgaactacctagatggcgttgattggctaggggccagcaacacaaaatccaatatcaaagcccatgatcttctgatcgtgaacagtgcgctttctaggttcaattacaccacagtgttgaccggacccggggtcagtcatggcaacctgctaaaactccatgatggatttccacacattcagtttgccgatggcgcgggagaattcgttccaggaccaaccttccgggcttgcaaagatgccatggtctctctaacagagctgctcactcgcagggaccaacacattcatgtgccaggaatggacatggttcggaacatcatcaataatgataggttcacaacacagctagaaaaagctagtgtttccctgattgatggaactgaggagagtctgaacctacattcattgttatcacatcaaaaacacaacgatctgttcgtcatactactaagcactagcggacctgccgaggttgtgcaaggggagacgtggttagccaaccatgctggaacgaacctcatggtccacgccggctcctccagggcaacgaatttcacatccatagactcacctggctggtcggacagaggaatgatttcctatgaaaacagctgcttctctagcagagtagtgatcactcacggaccgctatcactggtgcattactcatcagtcaaatccaagaaggccgtcatgatgcaatggatcttgtcagagggtgacaagatcaaaaccatgaaagtgccaaccatcaataaccacgctttgctcacaaaggccggtctgcccatcattgagatggaagaattgaccctccacaaagcactcatcaacagcttgttggcccgcgctgtcgctggcaaagcaacctacgaggaacttgtggaatacggaatcgcattcgcacgttccaggtacagcttgcaggatgagactgtttcatacagagatgtgagttttgaacaagtctcgagacatgcatgggtcgcccattgcctgatggccagggctcatgccaagacatggacaacttctttcatggccagcgctgaaggcctgatgggtttgggtttgaggtccactgtgactgtcagcaattggctactcaaggcagcccactctgcccttcccgacaacctgtcagcagcactacaagaagctctgaatgttaatgccacacaaatcacccgcggcagggactctccggtctgggatgaactggatatttggcttaacactagacatgcctacatcagcaggggattcaatgaacaaattgaaataaatgcttgtggtcatcacaatggggggccttgcaattgcccaatcaccagccacacttgcaactgctgcggacaaccaacagccacagattccggcagatgtttgggttgtcagccaaagaacccctcctgcacacacaaacccaccaatgtggactttaagggcatggttatctgctattgctgtggactcccgttcacgcaaggctgtgacaattgtcctccaatgattgcagaagtggacagtgaagacgaatacgagttgagatccaaaagaagcatcaagaaccccaaaaccatcactaaacaggaaaggaaacccccttccaacaaggcgcagatcgtggaagaaccagcactattgaccacacaacagccaaccactctggtttcttccgagagcaagccacgtgattatgccagcgcggccacccctaaatcagccaaacagcccgaaagtgtcacccagacaaaagaggagttggaagattacttggtcgcagccaacagagagtttacgccagaagagaacatcgtgttgttttcagggaaggattgcaacaccgacctcttgtactctggaagtaacaacaagtatgccatttacttgcaccattgccctatgggggagatcgttaccatgtccaacaacttcacactcctaggctttgacaacaccgtgcaacctggaaatcaatgcggccattactcattctcgatctgcaccgatggtattgggaagatctcagattttaacaaagtgttgggtgtggccggtccatactcggatcaacaccttttgagaatggcaagacattacaatttgaacataattctgtacggaggcactttcaccaccgtgcaaaccatggttccgggagagcaacactacaccatccaacacatcaaggatgaaaggttcaaggatggacactggaggccttgcaccttatcagtcaggaagaggtggacagacaagctgtcaatagccaccatgttcaaccaacaagaactggacagtctaacatcagaagcgctcggggaaaagaaacactactccacagagttgctggaaccccgtgatctgtacacggcctccaagcacatcaaagactgtgcggggatgctaaccagcaatgtgcaatccactcttccacaactgacagagcgtaagggccaatggtatctatccaatggcaacaccacagacatcgccagaggtctcatcaaccagccagtgccaggatgggcactgggagctttggaacccatcaactttgacattaatgacaaggtgaaacatctaacggtgaggggtgcagttgacagcacagctgatagcgtagtcaatgtggacgccaccctagatggggtgatcaaccttgcatgtcacgacatcatcaggaccagactgttgccagagcaagatgtgaattccaacctcaaatcatctgtgaaaattattgaccttccgacaagaacgctatccagtggaattctagcgataaacttggaaggtaccagactcaagcagttggacgagatttatgttaaagaatggaagacgatcattagtgtcagagtgaagatgatagaaggtacaccattctgcatcactcccatgaagtcttcactcaagaagggagtggtcagggttgccgttccatcatccagcgttggaagcgcttggagggtaatcatagctgctttaaccaccaatgtcactcaaggtcactttgatatgactctcaagcacatgagaggagtttcagccatatttggctggggcaagtccaccaccatggaaaatggccgacatgaacacaaccgtggcgcaatgaccaggggcgcgcaaaccgtactcaaagggaaactgatcgaaagtgggaatctagccaccagagccaaaccgggagctattgtaatgtcagcagaggcagcttcaatgaggaaagtggtaacaaagcggctgattgtcgatgaagcctccaagctggggcccgcgcaactgttgatgatgctcacagacaaagtagaagaggtggtgctgtttggagatcatctgcaaatcggagccagagacatgaacgccactcccggtgagagagtggccacaagttgcttggatctgtgcaacaacgtagaaatttacaaacacaccaggcgcttgggggccccacttgcagaggagctaaagaaaattcccgctttgcaagatcttacatatgatgcaaagatcacaaacttctccacgacaacaacaagcaaatacgacagcaccatgatcaattatttggtgcaacaataccaaattgacaccgtgttaacacattaccaggaaatggcagccatgctcaggcacgacctcacaaacatggtcaaagagggtaccttggttgttagcacaatagattcttttcaaggccaggaaagtgagagagttctgatagttgcatcccccacagccaacgggaccagacacttggttgacgatttcgagttcaatgtgagcgcggcatcgcgagccagaagttatttgcactggtggtcgatcaactgccaccaggaatccactccactccacttacgcatccttggatcaatggtgggcgcaggcatgcccggaggattccccgatgaggacggacatgatgacatgatggacaaccacattattgctgaagagttgaacgttaacatagcaaccgagacaatgcagacgttggagcatgtactgagaacaaagaccaaagagtttggttgcacttacaagctttgcaacaacccgtcaaacctagaaattcacatcatcaagaacttcgggcctctgtcaaccaccatggcaacttatatgtggaaccatgaggctaagacctccaccctgtcggtaagtgctttggcccccatcagtgctttggagtctgaagctctaagacgtcaaatggacaaattcatggagaaaaccaacccacaaccagatgaggaacaagaaattgccaagactaaaaagtgttgtcactcaccatcagcagctgagacttacaatgaagacatatacttcagcaccacaacatcttacaagctcaagaatttggcctatctttgccaacaattccaatccactggcaacaaactaggattgtacaccaatactggagtgttggtagagttaacttcaggcggagggtgctccagttgtggaggcataacaggaaggagagtagatggcacaatgatcatcaaattatcatccgattatcaaagactcggtaagagaggaatcactgtgggccaagatgaggacgtacttgccaactccataatcatcatggtgggaggctacagagggccgactgacgcctggatcaatacagtgccaatcgatgacattcttagatctagatacgtttgtgcaataaacatctttgagcgtgcactcacgctgggagtccagacggtcatggacattgcaaaagccgattcacccttaacgttggagaacagatatcaaaatgtcaattctcaacatttatcagagggagagagacttaaaaacagcctgctgacgtcatgtggactggacaacaacatccacgaatggtttgatatgtcaaacaaattgatgggccacatgaagacggaccatttaccttgggtgtacagaacaaccgacgggtcctttacgctagcattcactccaaagacgggatcattgttgcaaagacatgaaccatctgactacagacagatcattctagactgcattagagcacacatagacaagacttctatcattaaggaagtgcaagccattatttcagacattcacagcaaacgcaaagtgggagcaagaattaacggattgttgcagccaatctcacaacacaaagatgcgggtgatgaaatttacaaaactctccagaattttgcagcaaaagcagagctaggaaaactcaagcacatgcccaaaccagtgttcatgaccaggatgggaatgaatatgatgggggatgcaatcaacgaaatgcatccaaaattagcagtgcaagagcacaatatgactcatgggcatgatcctttaggtcaggctagagaaacagcagctaatgcctgcagaagaagggaccgtaataacgttgacatactgacacagcggccaagtgtttacttcgtaaactcctggttcaacagcaacctaatgacacctaacgatgaagacctgcacaaacattggtttgacagcgaaatggggctgtgttataatgtcttatcaaacatcgctgggcgcataggcgccagagagaaaatagatgagaccagctcggccatgaagatcgctgtggagtcgtataaaaaccagtccatgcaaccattcatctcaaaagaaaaacagcataaggctctggaaatgaacgatgtttggtgcaccatgacaccaggcgaaattatctcaaagatcattgaccatggatgcaaagaggcaacaggttggtttagctatgactttgacggcacccaccaggctctcaacttaccaggcaaaggaatggctagatcgcaatgcttgacaggacaagacattccatccgtgttattggactctcacttcgaaatgataacaactgggagagtcaacaaaaccaaacacgaagagcacacattgttgattgaaaagcaaagcactttctcaggggtgcacctagttaaactcatggtggacaacacacgcgacaaattctaccacattgaccaccaagtagttgggagatccaccatcaatgtcaccattccggccctacaccctaacattgttaaaggtatcaccactgggcagccgcttctgacaaagaaacactgcgttatggacaagaaactactggaagcgatgatcatgagaagagccagactgagctgcagctttgatgacctcctggaatacggacgatctcaaatgatgaccagatattacactacgcgaggtgtgcaagacaaatttagcctaaccactgagaaatgccatgacatggctgtcgcggcttggtgtgccgggggggccttaactcacgacatcacctcttacaaaaattacaacctggaaaaagagttcactccccaactgctggaaacgatcaagcaagtgtgttggagcaacgttaattactcggcggacaagttagccggtgtggcttcaatggcaatgaccatgttcggtggaaagttgagcgagttcgacctgggtgacttggttaaatccttggatattacaaatactatgggcacagcgacagagatactgcagtcaatgcagttgtggaaggtcaacttacacagcggtcacgggaaaatagtcaagattgccaatgcaccacttaatgttgtggaacaggaaaccaagcgatccggcccagtgttgatagctgggatgggcacttacggagatgtcgccataatgagacaagtcaagaagatggttgagcaagccgggctaagcaccgtgcttgctgtgccgaaaacttactgctctccttcagaagtgtctctgaactttgatgccatcgaggcggcgaatgaagccaggatgttaattgagaatccattaaagttgatcaagcaaatgttaaatgggaagagatttatgtttgcagatgacgtcgttgacaaattgagtgatgtagagtctccttccctgatcatcactaacgcagtcagcccgcaagtgcacatgtatgccaaggccaacaacataccgacaataatgctgaatggaatgatcatgcgtgggcatctgttcccaagtttagagaagtatgatttgactgtgccagattgcgccaccaagacagcactgtccatggtctggtccatggcagtgagagagcaacaagaataccacaatagtgaagggaaaaacacgaagggatgggaaagccacgctaccaccaccatcctcagtcacccactattcatgcagatagagagcgattctcccactgttaaaaatgccggatacctggggtacaatgacacggaaggcctgcaggaggaggatgtacccacccacatcctattcaccatgggatcaatgcgaggcaaggccgtgtccactttgatggagagagtgtcacacgtctccaaaactctgcacatgcaattgctaataatagaaggggctgaaccagtgcctgccaggttgcgaatggaggaacatgtgattgttcgtggcagaaccccactggaaagcgttaccccacactctcggtttgccataactcatggaggcactggcaccatagccactctcatatgtgagaaggtgccaacaattctagtacccactattggtgaccagttcgtgtgggcaagccattatgccaatgcacaattggcaacgtccatgtcaattgagagtaacatcaaggaaatagagaaagcttgcaggtccatcatgttgtctcctgttatgagaagactacaaggtatacgacatctaacaacgttagaacgctcgatggagcacgggcgtaaagtcattttccaagcgttgttagagcagggtttggaggtcaaggaaatggtgtcagccaacactcaacaaagacagaataaaaagcccaagcccatgcccgtggtccaaccaatgacaaaaatcgtgcctaaacacgtaaggcagatggcgtttgatctagtgcatgacttggagccactggaccaagacctcaacatggcgtgttgtggtcagaaacagaccaatgataccataattggccaatccgaggaaaatgattgcttcatcacttttaatcacaaagaaaaattaataagctgggtcactcgaaagcatgaagtgtcctggagacaaatgagcttccaccgccagctgggacacccttgggtcagcaccctcaacaaccactctcatgggagggtgttgtttgctggagtcaagctcaagtggttgcgctccattgtgttaccggcaaaccaaccagtggacattagcatcactgagtgggagaggttgagtaatagagagtccagaaagttcaatgataacggggcactggaaaagatcactaagaagggtgtttgctcttactgcaagaggaccagacacatgatgcacgatggactttgcaagaattgttccagtgacaagaacttcttgcagccaggagcagaagaactgattttctcactaggcatgtcggatgaggaactaccagtcatggccaaaacccatggattcgtggcagaaactcttcctgcagacagccatgaggaagaggatttggatttgactggcatgttagcaccaacaacaccatctcacaacctaggaatcatgaccgacttccaccatacaccggtcccaccaggggtgtacaagacagggccaatcttacacacaattctgtatgatcctgttggaacaaatgacacctgtgtgctagattgcttgaagttcagcctagacatcaacagggctgcggctggatttgacaacatcaggtcattcataacagcaccaggaggtgtcaatcaaggtgaaatagtgggactattcctggcatgtggactcaacctagtgttgcacacagacacagagaccacagcttacattatggacagtaagttacctcttgccaaagtgaaactagttgatggtactagaatatcacacttgttagtggtggaaagcaatatcaggtggatttgcaaagaaaggatcacagcccaacaacaagatcacaaggtttatgacataactgaacccatacacaccatcacaggagcagacattaagaccattaatgacgccagcgagttgatgcaaagcattctagatccagacaacaattcagaggcttcaagaaacttgacggctagacttaagatgagcaattacaagtctgtcaataaagaagaaacaactgcatggttataa

SEQ ID NO: 793 - DNA, 12973 bp, Alphaendornavirus fimbriatae-2
  source 1..12973: mol_type = other DNA
atggcgcgcgctcacgcaaatgtgtggacaacagcgttcctggccagcgctaacggcgctgtaggcctgggcatgcggactgcagttacagtgtcaaactggctgctcaaatccatcgagagagtcattcccagtgagttccactccaccctgtcttccctagattccatgaacttaactgccatcaacagggggcaggagagcgccgtgtgggacgagcttgatgtgtggctgtccaccaagaaagtacaattgagcaagggcttcaaccatcagctgagcctgagtgattgtaaccaccacaagaccaagggatgcaaccaacccaagaccggcgaaacctgtagctgttgtcaaatggacaccgccgaccaatcgggcagatgcaagtgctgctatcctaaacgaccttcatgcacgcacaaacctgacaacgtcaactttgacggtgaaatggtctgctactgctgtggactaccattcattgagacatgcaaagcttgccctccactggtttcagagggtgtgaaggaagatgtgagcgtaagcaaccaaggtgaactcgtcgccaaatctcacccgaacattggcggcaacctgtccactggttggcctgacccacggggtggcaagcaacacaaccacaagtgtaagacttgcggaaatgtagtcacacacgagcatcagttcacaactttatcacatgtgcatccaagctccatgtgcccagtgtgctacccgaacgaccgagctgagacccaccatgtaactgcatcatccgagccaacacctagagagtacgcagcagcggaaaggaaagaggagaagcgagtagcagagacaagtgctgacaagaggaagagggaagcgttagtgaaagctaatgccatattcagcccatcagaaaacctagtattatttggcaaggacaagtgtcctccagatgtgctatcaagcgcgtcctctgacaaatggtcgatctaccttaactacacccccacgggcgagactgggtgcaccagcaaccacttcctgttgaacggatttgatgctgaagtgcaaccaggcgatcaatgcgggttccacgctttgaacacgtgcaccaagggaatgatcaagctgagcgacttcaacaaagtgttgcaaaggaccggtccttacacagaccgacagctgataagaatggcggcatactaccacatcaacattctaatcttcggagatgtcttctcaatggtggttacaaactccccgggagaaccccattacacaattcagcacattaagaacaaagagtttccggaggggcattggcgaccatgccaactgtccttgaaggacaggtggactgacaaactgacaaccagcccaatgttctccatctctgaactagacagcctgtgcagtgagatcatgggcgctaacacgcactattccacaaacctaatggatgaggccacgctgttaaagtgtgccacacacataaagcactgtgaggatctgatgcaaagcaaagttacagcacaactcccgcaggtatacgaatcagactcagattggtggatcacgaattctaaatatgacaacatggcaacgggagagatcaagattgccgtcccagggtgggccaagagcgccattgagccgttaaccaagaccggaagagagatggctgaccatttgagcatggctgccaaggtgaacgtttccccggagggcctcacagacgtggacagcctgttacacaacgccatcaccatggcttgccatgacataatgagagtgagactactcgcggagctggaggtgtcagaacaactgaaggccagctttaagattcatgagttgtccaccagaaaactaagcactggcctgctggcgatcaatttgtccgggactaagttgaagccaatggatgaagtgtacattaaagaattaggagccgtgttgagcatccgagtcaagtacctgaaggacgttccctactgtgtcacccccatcaagaactctgttggcaccggcaacattaaggtgttggtgccaaactccagcgccgggagcgcgtggagaacgattaaggcagctctgacatgcaacatcaaccaaggaaagttcaacgatgttcttcgcagcatggaagggacgtcagcagtgttcggctggggaaagtccacgcgcatagcgcaagaagccgataacgacacaacggtagttgcaatgacgagaggcgctgtggaagttctcaaggacaagctactcaagttaaacaaacaaccaactgttgtcaaagccggcaccagagtgatgtccgcagagtcggcatctcaatctaaagtcatgacaaaaaccctcatcatagacgaagcctcgaagctgacaactgaccaattgttattgatgttgagcgacaaagtcaagactgtgaagctgtatggcgattacttgcagatcggggccagagacatgagccagactccaggaaccagggtggtctccagctgcctggagatctgtcaacaagttgacgtacggaagcacacgcacagagtcggccaaccattggcgggggagctggccaaaataccacaactaattgatttaacttgcgatgaggacaaagtcaccaagttcggaacgaccacgactgccacctacgatagcaacatgagccggttcttggtggagcagtaccagatagacacagtcctgacccattaccaagaaggagctgcgatgctgaagagagatctccaagataaaattgatgacgggagcctccgggtcagcaccatcgactccttccaaggtcaagaatcgaacaacgtcatggtcgtcgcaatgccgacggtaagaggcacccgtggcctaattgatgacttcgaattcaacatcagtgccgcctccagaggaaagtcgtaccttcattggtggtccatcaactgccaccaagaaagcaccagcttgcatctacgcatcatgggatcgacaattggctctgggttgcctggggcgtatccagatgaagaggccattagattgatggaagttgacgggttcacagaggacgggcagcccttcatggtcgggaaggaagtaagagactcgctagaggactccattcacaaccaagccagcaggtacgggtgcaaggcagacatcagctcggaccaggaccatttcagggtcgaaatcagaaagaagattggattcatgaacaccgtcatggcgacgtaccagtggactttcaatacagccagttctgttatgagtgttagccccttcgctccgatcagcagcgaacaggccgacaagctccagtcaaccttggactcgcaattgaagtgcatgtccgctccctcctcgcatgtggatcacaaagtcaaatcgaccaagtgttgccatgcagaatcagcaacagagaaacatgcggaatacctgtttgccaatcccttgagcagctggaagctgcgcaacctggcttacatctgccaacaattccaggccgctggcacaaagctggtcctatacactgagaagggccatgccgtcaccatctcatcaggagggggttgttctacatgtggtgccttgagtttcagaaacgaggcacggtcggctaatcatgaaaatatcctcagattaccagagaatgggcaacagaggaatgaccatcagccttatgaggatgcgatagcgaacagttgtctactaatggtaggacacttcagaggaccaacaacagaagtgatggtcagcgactctgtagatcatctgctcgactccaagcggctgatggtcatgaacctaatggaaagaggcctcaccctgacaggacaagtggtcaacagctcactgaagcgtgagaacaacaccaaccttgaaaatagatacatcgatgcgaacaccaagcacattgaaaaagggaaacaactcatcagacaggccttagccgcgaacaacatcgacccttggtatgttgacgagttcgtgttgaccaacaagcccgtagggcacatgtcctgcgaccacttgccgtgggtgtaccaagctaagactggcaacctttccattgcgtacaatggaaaacgggcgagtgacttcaacccagcgccatggcaaagcttgattctagagtcgatcatagagaagttgaacactaacacagtaatgggagagttctccaagttcttagcatctatggtggacaatagaaaggtgggggcgagaattgcgggcttattggaaccagtgtcagcgcacaaggacgcaggggacgagatctatagggccttgcaaaactttgctgcaaaatcagaaatgctcaaactcaagcacaccccaccgcctatattcatgaccaaaaaggggatggaaattattggtgacacaataaactccttgcacccgaagctggccgtccaggagcataacatgacacatggccaagacgctttgggtcaagccagagagacgctggcggcggcagcgagaagaagggacaggaacgcggtcaacgtaatcacccagaggccaactgtgtactttgttaattcgtggtttaacagcaccctcatcagccctgaagagacctcgtatcataaacactggtttgatcaggatctaggcatttgctacaacgtgttatctaacattaccagcagggtatcaagcaagtcagagcaaggcgagctgaggccaataatacaaagagccgtccaggcgtacaaatctccgaccatgcacccggtcatttctgagcaaatcagtcacatggtcacggacatgaatgacacatggagtatcatgactcccagtgaaatagcagatcacatcaaggcaagcaacggggagtacgtcctgggctggtacggtttcaatcccgaagctagcagacagaaagtgaatgttcctggaagagggtgggccacggtccaagccacgacaggtcaagacataccaacgataatgctagacacgtaccttaaccacatggaaaccggagttactattaaagtgccgggaactaaggaccgcataatgatagagaaacagtgcagtttggcgggagtgcatcttgtcaagatccacctcaatcaaagtttaaccaatttctaccacgttgacaacaacgaaatagggacgtctaccgttacggttgacatccccactatcaactccaatctgatcagggggatcacaaacaaggttccttactttcgaagaagacaaccaagatggacaagaagttgctcgaagcaaggatcatgcgccgagcacgaacagattgtcaatttgacgacttgttggagtacggaagatcccaaatgagggtagcacaatgcctaatggcgcgcgctcacgcaaatgtgtggacaacagcgttcctggccagcgctaacggcgctgtaggcctgggcatgcggactgcagttacagtgtcaaactggctgctcaaatccatcgagagagtcattcccagtgagttccactccaccctgtcttccctagattccatgaacttaactgccatcaacagggggcaggagagcgccgtgtgggacgagcttgatgtgtggctgtccaccaagaaagtacaattgagcaagggcttcaaccatcagctgagcctgagtgattgtaaccaccacaagaccaagggatgcaaccaacccaagaccggcgaaacctgtagctgttgtcaaatggacaccgccgaccaatcgggcagatgcaagtgctgctatcctaaacgaccttcatgcacgcacaaacctgacaacgtcaactttgacggtgaaatggtctgctactgctgtggactaccattcattgagacatgcaaagcttgccctccactggtttcagagggtgtgaaggaagatgtgagcgtaagcaaccaaggtgaactcgtcgccaaatctcacccgaacattggcggcaacctgtccactggttggcctgacccacggggtggcaagcaacacaaccacaagtgtaagacttgcggaaatgtagtcacacacgagcatcagttcacaactttatcacatgtgcatccaagctccatgtgcccagtgtgctacccgaacgaccgagctgagacccaccatgtaactgcatcatccgagccaacacctagagagtacgcagcagcggaaaggaaagaggagaagcgagtagcagagacaagtgctgacaagaggaagagggaagcgttagtgaaagctaatgccatattcagcccatcagaaaacctagtattatttggcaaggacaagtgtcctccagatgtgctatcaagcgcgtcctctgacaaatggtcgatctaccttaactacacccccacgggcgagactgggtgcaccagcaaccacttcctgttgaacggatttgatgctgaagtgcaaccaggcgatcaatgcgggttccacgctttgaacacgtgcaccaagggaatgatcaagctgagcgacttcaacaaagtgttgcaaaggaccggtccttacacagaccgacagctgataagaatggcggcatactaccacatcaacattctaatcttcggagatgtcttctcaatggtggttacaaactccccgggagaaccccattacacaattcagcacattaagaacaaagagtttccggaggggcattggcgaccatgccaactgtccttgaaggacaggtggactgacaaactgacaaccagcccaatgttctccatctctgaactagacagcctgtgcagtgagatcatgggcgctaacacgcactattccacaaacctaatggatgaggccacgctgttaaagtgtgccacacacataaagcactgtgaggatctgatgcaaagcaaagttacagcacaactcccgcaggtatacgaatcagactcagattggtggatcacgaattctaaatatgacaacatggcaacgggagagatcaagattgccgtcccagggtgggccaagagcgccattgagccgttaaccaagaccggaagagagatggctgaccatttgagcatggctgccaaggtgaacgtttccccggagggcctcacagacgtggacagcctgttacacaacgccatcaccatggcttgccatgacataatgagagtgagactactcgcggagctggaggtgtcagaacaactgaaggccagctttaagattcatgagttgtccaccagaaaactaagcactggcctgctggcgatcaatttgtccgggactaagttgaagccaatggatgaagtgtacattaaagaattaggagccgtgttgagcatccgagtcaagtacctgaaggacgttccctactgtgtcacccccatcaagaactctgttggcaccggcaacattaaggtgttggtgccaaactccagcgccgggagcgcgtggagaacgattaaggcagctctgacatgcaacatcaaccaaggaaagttcaacgatgttcttcgcagcatggaagggacgtcagcagtgttcggctggggaaagtccacgcgcatagcgcaagaagccgataacgacacaacggtagttgcaatgacgagaggcgctgtggaagttctcaaggacaagctactcaagttaaacaaacaaccaactgttgtcaaagccggcaccagagtgatgtccgcagagtcggcatctcaatctaaagtcatgacaaaaaccctcatcatagacgaagcctcgaagctgacaactgaccaattgttattgatgttgagcgacaaagtcaagactgtgaagctgtatggcgattacttgcagatcggggccagagacatgagccagactccaggaaccagggtggtctccagctgcctggagatctgtcaacaagttgacgtacggaagcacacgcacagagtcggccaaccattggcgggggagctggccaaaataccacaactaattgatttaacttgcgatgaggacaaagtcaccaagttcggaacgaccacgactgccacctacgatagcaacatgagccggttcttggtggagcagtaccagatagacacagtcctgacccattaccaagaaggagctgcgatgctgaagagagatctccaagataaaattgatgacgggagcctccgggtcagcaccatcgactccttccaaggtcaagaatcgaacaacgtcatggtcgtcgcaatgccgacggtaagaggcacccgtggcctaattgatgacttcgaattcaacatcagtgccgcctccagaggaaagtcgtaccttcattggtggtccatcaactgccaccaagaaagcaccagcttgcatctacgcatcatgggatcgacaattggctctgggttgcctggggcgtatccagatgaagaggccattagattgatggaagttgacgggttcacagaggacgggcagcccttcatggtcgggaaggaagtaagagactcgctagaggactccattcacaaccaagccagcaggtacgggtgcaaggcagacatcagctcggaccaggaccatttcagggtcgaaatcagaaagaagattggattcatgaacaccgtcatggcgacgtaccagtggactttcaatacagccagttctgttatgagtgttagccccttcgctccgatcagcagcgaacaggccgacaagctccagtcaaccttggactcgcaattgaagtgcatgtccgctccctcctcgcatgtggatcacaaagtcaaatcgaccaagtgttgccatgcagaatcagcaacagagaaacatgcggaatacctgtttgccaatcccttgagcagctggaagctgcgcaacctggcttacatctgccaacaattccaggccgctggcacaaagctggtcctatacactgagaagggccatgccgtcaccatctcatcaggagggggttgttctacatgtggtgccttgagtttcagaaacgaggcacggtcggctaatcatgaaaatatcctcagattaccagagaatgggcaacagaggaatgaccatcagccttatgaggatgcgatagcgaacagttgtctactaatggtaggacacttcagaggaccaacaacagaagtgatggtcagcgactctgtagatcatctgctcgactccaagcggctgatggtcatgaacctaatggaaagaggcctcaccctgacaggacaagtggtcaacagctcactgaagcgtgagaacaacaccaaccttgaaaatagatacatcgatgcgaacaccaagcacattgaaaaagggaaacaactcatcagacaggccttagccgcgaacaacatcgacccttggtatgttgacgagttcgtgttgaccaacaagcccgtagggcacatgtcctgcgaccacttgccgtgggtgtaccaagctaagactggcaacctttccattgcgtacaatggaaaacgggcgagtgacttcaacccagcgccatggcaaagcttgattctagagtcgatcatagagaagttgaacactaacacagtaatgggagagttctccaagttcttagcatctatggtggacaatagaaaggtgggggcgagaattgcgggcttattggaaccagtgtcagcgcacaaggacgcaggggacgagatctatagggccttgcaaaactttgctgcaaaatcagaaatgctcaaactcaagcacaccccaccgcctatattcatgaccaaaaaggggatggaaattattggtgacacaataaactccttgcacccgaagctggccgtccaggagcataacatgacacatggccaagacgctttgggtcaagccagagagacgctggcggcggcagcgagaagaagggacaggaacgcggtcaacgtaatcacccagaggccaactgtgtactttgttaattcgtggtttaacagcaccctcatcagccctgaagagacctcgtatcataaacactggtttgatcaggatctaggcatttgctacaacgtgttatctaacattaccagcagggtatcaagcaagtcagagcaaggcgagctgaggccaataatacaaagagccgtccaggcgtacaaatctccgaccatgcacccggtcatttctgagcaaatcagtcacatggtcacggacatgaatgacacatggagtatcatgactcccagtgaaatagcagatcacatcaaggcaagcaacggggagtacgtcctgggctggtacggtttcaatcccgaagctagcagacagaaagtgaatgttcctggaagagggtgggccacggtccaagccacgacaggtcaagacataccaacgataatgctagacacgtaccttaaccacatggaaaccggagttactattaaagtgccgggaactaaggaccgcataatgatagagaaacagtgcagtttggcgggagtgcatcttgtcaagatccacctcaatcaaagtttaaccaatttctaccacgttgacaacaacgaaatagggacgtctaccgttacggttgacatccccactatcaactccaatctgatcagggggatcacaaacaaggttccttactttcgaagaagacaaccaagatggacaagaagttgctcgaagcaaggatcatgcgccgagcacgaacagattgtcaatttgacgacttgttggagtacggaagatcccaaatgatgaccaggtattacacctccaggggagtgcatgacaaatactccatgacggtggagtcttgccatgacatggcggtggcagcttggtgtgctggtggcacgatgctgcatgacatcacagaatataacaagttcagcatggagacctcgttcaagccacaattgctcgaaacgattaagcagatggggtggagcaacattaacttcatggcagacaaagcggccggtgtcatctcgatggccctgtctatgtttggggcgaagctcacagagtatgacataccagagttgctggccatgctggacgttaatgaaacgatcaacaccatgaacgagatcttgagggcgatgaagtcatggaaagttaacctgcgctctgatcacgggaagatcgtgaagatcagagagcacccaggcgagggcaaggccaaccacgcaacaggaggcaacgtgctgataaccggactgggcactttcggagatgtggcgataatgcgctcggtacaaaagatcgtggagaaagcaggggtctctacaaaactgatcgttccaaagacctacgcaacaccttcagagggcagtgtagatttcgacgcagtgcaagcagcagaagacgccagagccttaattgacaatcctgtgggattgatcaaggacatcttgaaagggacgcaagttcatgaacgccccaaattacaaggaggcactgtcaagagagagcaacgttgccctgataataaccaacgcggtatcgccccaagtacacatgttcgctaaggcccacaacattcccttgatgatggtcaatggcatgataatgaggggccatctgttcccatcattcgagaagtttgacgtgcctgttccagacagcctgaccaatactgcactatcaatggtgtggcggatgtcaacacagtcagacgaatccgagtacaagatcgaggggctggacatctcgggatggaaggagcacagctccaagaccgtgctcagtcacccactatttatgcaggtcgaaccagacacggatctagttgtgaacgcaggatacctgggatataatgaaagaaccgatgatgaacgcatccaactgccgaggcacatcctggttacaatgggctcaatgtccggtgacaaagtaaaggaacttataaggaaagcagccgtgacggcgaaagaaatggctttgcccttggtgattgtggaaggggcgcaaagagtcgacgaggtcaccaagcaagataagaacgtcatcgtcttaccaaggacgaacttagaattggtcacgccaaacacgcaactcgcaattacgcacggaggaacaggaacggtggccaccttagtgtgtgagagggtgccgactgtgctcgtacctacaattggtgaccaatttgtgtgggcgaagcgttacgtcaagagacagatagcaaaggcggtgtccctggagtgcacgcaaagggagctgaacgaagcttgcaggtccgtaataaagggacctatagccagaagattgagcagtttgagtcacctcgcaaatgccgagagggccatgaaacagggccacaaggtgataacgatggcgctcaatgattgtggcatcagcacaaagccaattcaggctgaggatgttagaacgcccaaaaccagtctaccgtcgaagttgcccctcgtagaggagacaaaggacaaggttccgaagtgggcttgggaaaaggcattcagcctagttcaggacttggagccgctggagcaggcgctcaacctgacgtgctgcaagcaacaggaaatcaatgacatattaatcggccaatctgaagtgaatgactgttacatcacttttaacaagaaggaaagactcttgagctggatcacaaggaagcacgaggtcaactggagaccaatgacattccacagacaaataggacatccgtgggtcagcacactgaacgaccattcccatggtcgaatcctgttcaaaggagtcaaattgaagtggttgagatccattgtcgtgcccgccaatcaaagaattgacatttcgaaagaaaaatggtctcaaatgagcaacaatgattcgcgcatttacaaggacgacggatctttagagaagatcaccaagaaaggaaaatgcccggtgtgtaacaggggcaggcacctcatgatggatggcctatgcaagaattgttccagtgaccggaacttccttcaggccggcgcagagcagttgatctatgattagagctaccagcgaaaaagaagagcaataagaatgcgattatggctgcagctggaggtgcg

SEQ ID NO: 794 - DNA, 5790 bp, Alphaendornavirus fimbriatae-3
  source 1..5790: mol_type = other DNA
atgagacgggtgatgaacaacggcactgacgtcttttctgacggcccactcgcggccgtcatgacatacgtcacgagtatactcatggatgaatacggtacatgtcacatcgaacccgactctgccatcaccgtcgccgacagtgcgtcactcggaccgttctcctacactgtacccagctggtgcgaacagtcccgcctcacgtgggcgacgtcttccaccatcgcacggaaaatgctcgaacgattccgttcccgcgtacccgcgtctgatgtacgacacggccggcttgccgatcttgaacgaagcctggccttccgcgaaggtacttacggaaccgtgtccggggacgtccagcgagttgtgacgccacacgtgctcagcctcgcacccaacgatctgtcgcgacactacagcaactacgccggcaagacgtacagtttcgtcacacgcgacatcgtgcgcacagctcacggaagcggattcgtgctgccgcattcggaccgcttgttcctaatcaacaagcatcaactggcgtcaatcgaagacggacgcatgatagcgggaaccgaccttcgatggcacacaatcgacaactttgagggcctgcggctgctgagactttcaaaacaacgtctgtgggcccgcaacaccacgcagcacttagccgacgccactgtaaaaatgcccacgatcaacatcaccttgcccgaactggcaagaactggcgagctgttcacgcacagcacgctgagaatcaacaaaaacttcatgacgaacctgcgcaagcgtctgctgctgaaacccaccgatagagaggatttgtacgcgtacgcacgcaccatgatgcaaactgccgtgtacatgaccaccggagctgcgtccaaacgcgtgtgcaccgcgcgcgatgtggaaggcatggtacacttagccctcatcatgaacagttacgaacaagtcgcgtttagcggtacgaaaatcgggagctacgccgatgctgaactaaaagataacatgattgcgctcctggctcggttgtgcgacgacggaaaacgaaatgtcgacgcggtcgtcgcacagctgtcgtcgatggtgccccacgtgtccgacctcgcgcgatcgtacagggacatagcagccgtcttcaacgatatcatgcgacatctatcgtccgtagacggcgatttcatggctggcgacgaaatgatcaccccacgcggaagcgccacgatgcgtcccaggatcaaacatttacagcgtgtaaacttaaacgacaaacacggcgccatcgcaggaaaagacgaatttgccgggactcggccgtctgataacttttacagcgatctgatcgaggaccccgccgccgccaacgtcgagcgctttgctcgcctaggccgcggtgacgcgcattgcgaaccgcgctggactcacgctttgatgggcagtggtaagttcgctgtgggtcgtgattggctggcgttcaaaaatacgcactgggtcagctccaagtatctcaaccagcccgctttgtccacgacgcaacagcggttcttgagcacactcagcaatgccgtcgacaaattagaacacgccgactcttaccacctgtactccctgtgcgacggaatagctagccgctctccggctacggctggaccagggcggaacctacatgtcaacatcggcgctagcggatcctacgatccgctcggcttcgtgtccatacttcgaagcgaccccgggcgattcggcgcgtgcgcacgagttatcgtcgcacacatgctcgtaaccaggcgacagggatgtaccgtgtatattcgcagtgggcgacccgggccgcacgtgtattgggccgaagccgcgctagccgagactgacgacgaacggctgtcaatgggcaacacagtcgctcttccgttcaccacatttggtccgttcctcgacggtatgcgcatcgtcagcccgctacaaaacatggacggattcgtcaagaacaacatgaactactattggctgtacgggatcgacgaagcagaccacactgtgttcaacataaaaaccacgctaacgtgggagcgcgccacgttcccttactcgaattggttcttccatgacgaccgtgaaaacgttatgcacggaatcgacgccgtcacggtcgctacgcgcgcgcccggcgcgctcaccgacgaactcgtgatcgagggcacgcgcaaccccgaaaatatggggtcgttgatcaaacttcacgatcgcgcacattcgggaccaacacgctcgggcgactcgccttccgccctcgctagcgcgtgggcagccggcggcaaagcgccgcgaggagacgtcaacaaaaagtggctgccgtaccgcacgaccaaccgcggaacaggatgcatcgaagtgtatcgcggcaccgcgtcaccaggaactgttgtttacgacccccacaccgacggacaatgcgtgtggcactgcttcgcacattatgcacgccacgctgctgattgggacgacgctcgcattgtccaagcctatcaatcgcttgcgccgaagaccttcgaaaccgtacaggacatcgcgaaatacggcgtggccatgggatttagcaccagcgtcacgacacccgacggcgaatattactccgtgcaaattgacggcagtcctagtttgtgcctacacgtcaaatacacgatgggcacttacttccattgtaccatcgttgaacagcacaccataacagaacaacgccgccagagggaagatacgattgacgtcgctggactgtccgccgcagccggcaacgctcgactcgcacaacgcctaatacgggacggcctctctggccgtgccgggggagacgttgccaatgccatcgaagccacacgaggccctatctggccccgtgccgtcgtaatcgcccagaaccccgatttgcgcacaaaaggtcgggacggcaccgacgaatttatgcaggtgtcaggcgcgcaaccggcctccgtgatcgccatccctgggagtgaagggttggacttcaaggttgcctttgagcacgccggacgcgtgtggatcgagcatccgtacaccgatgtgtacattgcattatccttgcgctgcagcgtagattctctcgtggcgaggaacgcgcgtgacgacaaaccggctttggtcgacgtaagtggaacgacggacgcgcagccgagctttatcaaccacacatcaaaaaccaacgccgcgcccgaattgcaacaccacgttgtcgactcggccggacgtccgctaatagtcgtcgacttcgacaacacgaaccaccacggatccgccgcacatgacgacctcgccgcacgcgggtttgacgcgctcattttgccgggtgaacacatggacgaacagacatgcgacgaactggcaacgcaaggcatgctcatcgccggtgtgacaggcggcaagttgcgttaccgcacgtgcaccattaacgacgacctggccgcagccgtgtactatgacagtggcgtgcatcacgaacaacggcccaccaaagcagcacttgaggcatacaaccagggatgggctcaaacgcgcgtcggaaacagatacggattaggtcccgcgtgcaacgacgacgcgtgcccatgcaaccaggtcgccgacagcttaaacgccacaggccgcgcgcgtctggagctgggccgggccgagtctcgcgcgctactcgcttgcaccggcgagacaagctttgacctaacgcacaggacagacacgcacacgcgactgcaatgggtgttccaactcaacactggcgatagtgagtgcgagatctacgaatacgcagcggacaaatggatgtccacttttgacgtgttcgccgtcggatccggacacatgctcgtgagcgagtttgccgcccacgtcaactcgaaagcctactacgactacaaaaccggacgcaccacgaaaaccgagcgtgcgcccgaaccgcgaccgaacatgaacgatcgggttgacgccgtcaagcatgcactcggcgacagcggcagcgcccatacaataagcgccgaggcgcccacacggcgagagtacgaatacatcgaacacatggacgctagcgtcgagctgctcaccgacgaataccacgagcgcatcgccgctaaaacgatggattactgggacaataacacggccctgctgcccacagtcgcccccaccccacatgacgccgttaaattcaacgtaaaggagcacgacattgagttgaaaactgtcggcaaagcgatactcaccccgtaccccagccacgcgcaaccgaactataccaaacggtaccacgcaatgcagcaggcagcagtggatttgttcgggaaatctttcaagttgcgccaggttgaacacgacccggaagccgacgcgcgcgagcttgtacgcacgtatttcacccgcagcgtcccatctaccgaaatcatcacgtttgacgcgcgcgccaccgccgaatggattgcagaacggcccggtgccgacaacatacgccgcgagctcgacgagctactcgacgaaggatgggcgacgcatccgatcaacagggtgaacgtgcacataaagctcgagtcacgactgaaagataagccgcacaacgcggcggacatcggcatgcccgctaccatttctgaacagcgcgtgcgtctgatcgtgtggcagcctaaagcgatgactgcgctgttcgctcccatattccacgaagcgaagaaaagactcaaggcatgcctgaggcgcgacgtgatttacacggacggcatgagcccgcccgaactatccgccgttttgtccacctacgacggatcaggagctctgttcgtcgaggacgatctcgaaaaacaggaccgtcagaccgacatgaccctgatcaaaacggaaatgttgatctacaagtggttgggggtcgacccacgagttgtggacatgtggcaacgggtgcacgaacactggtccgcaaaaggttactcgatcagcttcgacggacacgcttcgcggcagactgggcaagcaacaacttccatcggtaacaccatagtcaacatgctagtacacatgcgcttcgtcaaaacgcttgggcaaaacctcgtcatcatgatgtgtctcggcgacgacaacctgatggtgtgccgcgggcacgtcacggagaacatggtgtcccagaacagcgctcggcacttcaacatgaagtcgaaaccgtccgtgagtaagacgcacgggggttttctgcgcatgatagtgaccaccaggtccaacgggacactaatgtgcggcccggattttataagattacggcgcaaatacgaggtgacaaacggagtttccgaagccaccgtcgaaaacctgcaagcgcggggcggccagctactgcgccatggtcggccccgttgggcaattcccgagtcttttcccccctggcgaatacgtcagcccgccgttgtggtacgaaccacacaagatcatagccatgacggcagagaaatacgacaccacgcacgccgcggtcgagggagagatcgcccgacttttcaactacgtgcgagaccccgtcgtcagggaagtcacaacagagatgtttgtcgccagagtgtaaagaaatgcatgtcagagtgtaaagaaatgaatgttgttgaagttgcccccagaatgaggtcatggccttcaaggaagtcggcaaggttgccaagctcaagcagctccccgtcgtcagggaagtcacaacagagatgtttgtcgccagagtgtaaagaaatgcatgtcagagtgtaa

SEQ ID NO: 795 - DNA, 21771 bp, Alphaendornavirus sp.
  source 1..21771: mol_type = other DNA
aaaaaatcaaggccttacccgaaatacaatagaagtcgggatggacgcagatggctaatcaagcataattataaaaacgatgctgccaaccacggaacatgggtcaaacaagcatatggttacggacaaccaacgagaagtcaaaggttgagagccgctataatgaatgcctctactattgaagagcagatcaccctggagaggaaactaaccagaacaaagacggcctacaaaagaatgatgaagaagaaagacaaagaccaatcagaaaagataagtgagatggacattattacaaacttcaaagaagccatcgaaacagcgaaggctaacatggcggcagcggaaatgcgcaaacaacgagaagaacagttgaggctactcgatctcagtgacaactctgcagacttggtggtgccagcggggacgtgctgggactgtataccgtttatcgatttcaacttggcaacatcaagcgcatcaaacacacaaatgagcgccatgacgaaggccggccgcgtaaacataccaaagggcccgataggcattgacaagctcttggccatagtcgaatattacaaagaacaagttgaatccggcgctattgacataccagactttgctactgaccccgaggacatgtacgcaatagatacatctggtgcagtgtggcacctgtacagagatggatacaacaactacacggacttggtagaatatgatgaagacggagaggaaatcaaaatggaagaggacgatggaacacaaacaatgaaaggcctgagcacagtgcccttcttggaattgcacgctgaattactgaagaagaagaaagagaaagaagacagagacaagaaattctctgaagtgaacgtagggggtgacaaagactgctggaagacattgttcatgatagatgaggaatgcgattacactaggaccctagaagaagtgacaatgcttctagacgaagccctaaaagcgagacaacaaggagcaaacgtggacaggtcaatcacaaaggacccagagacaggcctgtgttacatatgcttcgaagaagagtgcgattgtgacgaacctgaggagtacgatccagatggtgacgcaaaaggattcatgatcggcataagctggacaaggaccggaaacttgcacatcgaaggttaccgatacatgtcctcagctcaaccactactgaatagtgtggcattttacgacctgaagaaagctatgatggaaaacgatgagaaattcttcaaggccataacaggttggaagaaggacttcagaatagagagtacaattgaggtcggtgccaaagacggagatctacgagtcaattccatcgcggcggcattcaacattggagacgttccagaaacaaacacatggaaagctctgatcgattcacacgatttgcgagccgctgcgctggcattagcaaagatcgaccacgcagtttatcatttacccggagtattgcaaaatgtagaaatcgaaaagatggtggacgctaataaaggaggatggcttatcggagccaacttggtgtgcgacaacacattaggaccatgctttagcacaacttgtctgcctgaagtcgctggaatgcatatggcacgacaaatgttcaaaggcaaaggtgcctgcatctataacagtccagattggttggattgcaacgaatacttacccgtattgagaaagggcaaggacgcattagcattctttacacgagtgagcctaaacaacgcaaacatcacaaagctggcgaaggaccacaaaaatatagtgatggttgtgccgaacgtgcacaacgagatgcccgcgcacttcacgaatgagagcggaacgtttgacgtcagaaggcaaaacggcaacgtagttgtcgtgagaaccgatatgaccgaagtgatctcacacaaccaatcattattgtccgctgttaacacgtgcgaatatgtggtagtaggccaaaagatgttccaagtgacaatattcggaaaaactgaacacgacacggtattgatgctaaatcaaattaacatagacgataccatgttggagaacgtgtttaagtttgattacaacagtagcgtccgagaattcaacattctgatgccattactagacagcctgacatataatgttttcccagtgtttaaaatgcggaaggtggcaatagatggggacctgttacgcactatatgcgcacataacttgcaaaggggtgacctaaatttcaggaccttgttaaccaggtgcgttgggtacgcacacagaaggtatcatctgaaacacaacatcaaggccgtgacccatttaaccaatgaccaattattggaccacgcttatttggcagccgtaatggtgagaagaatgtatctcactcggcgttggttagtagatctaacagacagaccaagatgggtggaagtcgcaaccaaacacggcatgggggctgcacaactagctttacaagcaatgaaggaaggcagcagcacatacaggaatttccaggaatgggcggataagattagcacgacgtcaagaacaaacttgcacgacttcaccgaccaaacggtcatgaatgaagttgaggcatggatgtttgcaggattcgctcatgaagctagagtacacagtgtcgggaacgataaagtgaagatattgtgcgaacatcacaaacacgactgcgtgcataaaggagcgaacgcatgtgcatgttgtggcaagccaaccgacgacgcacgatgcagttgctgcatgaacgccatgtgtcaatacaaccacaagtgcggacacatatgcgatggtacgcactttggacccgagacatgtgactgctgcggccaggatagcgaacaaatcaagtgccgattctgcttgagtcctgagctgaaccctgaatatgagtatgaggatggagtgttcgcaactaaagtcaaacacgccgggggcgcagtaacacaaccgacgaatgaagtgggcaagccaagaccaatcacgacaaaagatggggtgaaagccatccaaccagtgtcacctgcgaaaaatatgggcaatggcaaacattgccatgagtgtgctaaatgtggagggtattacacacacgtacacaggttcacaagcgaattacaccccttattcgagggtgattgtccgcactgtgagggaaacacaacaagcaggaaaactgaccaggacggcaacgagacaggtcatactggcaycgcggagacaaaggtgacggaaagaaacccaaattccgatccaaccgataaggaaattgaggaaaaagaaattaaagtaacgggacaaagtgcaaacgtaatagccctcatcaacatgggatacagcctcaccgagataagcgcaatccgaggcaatgccatagcttggagtgaattaaccgattggaggcaggagggagcgttaaaactcccaatgatcccgataggaacacaaagtgtggacgtagaagttaaagacttcaaaaagatcaccgatataccagacacagagacatgtggatatgaagtgctgaattacattaacccaaatgtcaaactggcaatggcaatcgttatagcacaaaaagagagcttgttcacaaacaaggacatcatcaagattgcggagcattacggcatgaacatcgtgctcgtaagtgaaggagaaattgtgatatcaaggaatggggaccaaagttggtacgattgcatcctagcgacaacaccaggacattgggaagtcggatcatgttccatcacctggaaggcatgccctaaaatatcaaaagtagacggcgtcaagttgaatactttggagcatgtgcgcaagacagcgtcacgtacagctttaagcacagatgaggccaacttagctgctgaaatatcaatgaacgccgataactaccacgcttcagaacaaaggagattccacatcaaaggaaacttctttacaaacaacaaggaatgcaaacaccaaccttacctggggttggtagctgtgaaacacaatggactattaccaaacaacgtcgccgaattgttgaccgcagaaactccagacacatataggaaagcactagccacagagtggaagcatcacaccaaaacagaagtcggctacgagatcgacatgcgcatgctaaattatgccatgggaattagtgcgtgtcacaacttgggcaaaggtctaaacagcacggagatggttgcaaacgtgactgttccaaaccatgaagcatcggattatgtcaccttcgatcttcctccggatgccaagtggatggctggagacatggttaagttggtgtccagcaacttcgaagcgttccacaccgtaattccagttaagactggcaacagagcacaggcaaggttcaacttgccaaagactggtgcaagatacaagatgctttaccctaagagcagttacttcaataacggttatgggttggcaactttgattggaattaaggcagagatagacaacggaccgatggaagcgatagactcagaatgcacgatgggagtgcctggcagcggcaaaacgtctatcatcctagcaaaagctaaaagaggcgatctgattgtgacggccaccagtggaaacaagaacggagtgagatcgcgattgttggacagagcagctgttgacagaccggaagttttaggcccacaacagatcattgaaaaagccgcgttcgaaaggaagaagtacaacaatatattcgtggatgagtgcacaatgtttacggctgtagagtacaggacattagaactattgacgcacaaccaaaagaacatcatgctgtacggcgatgacagtcagataggcgcagtgacgatgactccgttaaatcagataggcagcgcgactgaactgcagcgctttgtcaaaccagataacatgaaaccatacatgaacaagtcgtccagaatgggcatcgaagcttgcgcaatcgcttcaaaggttacaggcaaggaaatcataagcacgaccggcagacatacagttgtaaagacatacaacgcgagtgatccgggagcaataaccgcgcaaattattaaggatgtcgaacatatagacgtcatcctttgtttcacaaggaacacacagaaagcgttagcaaaacatggcatcaaagtgttgtgtgaacgcgtgcacggtttccaaggtagagaggcaaagaaaataatcgtgctgcaggagaagccgactccaggacaagacgtgtcaaccaacccgcggtacacctacagcgcattcacacgtgcaagtgaagaggtgcattgggtcagtctagggcacaacaacaacatgtccattgaaagccgcttagggaagagaggaaaagtagagggtttcgttggcgatagtttcagagctaaggtcaaggaattcatcaaagttaaattcggcaaagacaaggttgagctgagcgcctcagaacttgcgaaaagcaaagttctagatgcaactatggcggatgatggtgagcatttagataggaaaatcaaggacaagttgcaagtgtacgcggcgaaacactacaacgctaccgtgacatatgagacggacgaaaaacagcgaacaataatcaacatatccagatacggattgctagccctgtcattactatgggacggcaaaacactcgaaacgatcacagacaaatttggtgttatggacaagaacaagaaagaagccataatgcgagctctcgatgagagagaagaagacatcgattggaaacacgtcggccaaatgtcgagctcaaggaacgattgcatgcttatcgccttaatgatagcagacaattgcagaatgcttggaacgacattcacagcttatgctgatgacaaaaagttcaccattaaaaccaccgtcacgagcattggagaacaggtagtgatcgaatgtgatgatccagagtacaactgcactatgtgcatcacagatcaagatggtgtgtatctcgcaaatgtcgatgaacagatcatcgagcacgcaatatacatggttgaagaggcaataacaacactcgtgggtaagtatgaacacccagcgaacatttgccgagcaatgaagtatcaaagaaaggtagcatcgaacaaagaaatactggctcaattgagcgcaatgctaggattatccaccatggacattagaaaccataagacaaacaaatatcacaaatcagcaaagaaagcaaacatcacaacgctgatgagatacgaaaccttgaaactcttagagtaccctgacttgagggagatgtttatagtcagagaccgcaagacagatgcagcaggatggttgactgcggaaggaaaatacatcgacagtagtgaatgggagctggctagcgcgtacgcgagtgtagttctgatcaaagcgctgaaaaagacatggtggtataaagtcatgaaattcaaggagagtatgattgataagttgaaagtgggcgcgataaatgtcacagttaaacaaatggaggaacactttgcagaggaatcaaatacagccacatacattgcgaacaggatgggcaaagtgaaggcaatgatgctgaagcgcgagccaaaaccagtcacagtggttcctggggcaagcgaagcttggagtgacttgttgacaatagctatgccacaaacaggtgtgcagttaacatccgtaccatgcatggtagacacgaacaaccacatggcaacgcaaatagcaatcaagatgctgccacaatggaagaaattaatgaacatttactgcgtggaaccagaggcaactctggaagctggccaatatgaatggaggactgtcaagccaataaatcacagggctggagctgaatacatgaagaacatgctaagactagaccgattagcccatgacattaaaaatgctaatgtggcgaatgtgtccaacgatgaagcaagaacgaaattggaagctctgatacaagctgctgaggatcatctggaaggaaaggcagaggtttgggtctccaactttcattcaaacataaaaggtgacttactagcgatgtacgatgctatgaacgtaacaagtaaagacacatacaacgacgaaatcgtacaactggtaaacggaaacaaaacatacgtcgcattacccacatgtgcatacaagaatcacatgggcaacagcgtcaccgaggtgagcaatggtatggcgaaaataatcaacaatgagtacggattagtagccactgtcccagtcaacataatggaagccatggaaaagggagtatacaagtggaaaaatgaagaatacaccatggacgtgatgggtactaacatggccgtaacgatatggaagatagcaaaaggtaagcgcgacacgctgtacagtcccatgccatatgtaactcctcaaactatggtggaagtcaaaataccagtgatcaccgacaacttggttgacactctcatcaaagcgaaaactaaagagacaagagtcttaatggtagatcgtaggttatacaggtcgctgagtttgagaatgatgcgagaaggaacgacttttgaagatttgctagtggcagcgaggacaatgctacatggtgtgatatacagcccaggcggcacagcatggaagaacaaagcgtcaacttcaatcttgatggacacagccacagcagtgtacataataataaccaagaaagttagaaacatggaggcggcattcagaatggtgagtgacagtatgagcaccgattactgggtgaggacaaaagggaacttcaaaaatatggcacaaggactgcttgcgaacgtgcagcgagtactggggatgacgctcacagagaatcaactagtggacgtactaaaagcaagtgactcgcaatctctgagatcggctgctgaatatttagacggatggagcattagggtcgatgaatacacgcgttacgtcaggcttggtgatgaagagtggagatcctcacctctagaagatgtgcccaagataaccgaatttgctcttaacaatctattgcactggaagtcactagtggcaaacgtaccggacagagagttgcgaatccaacaccctccaatgaaaatcaaaatcactaaggacaaattcaacgctatgaacgaagcaaacgtggctcagttggaactagcgatcaaaactgtgtcccaggccacgtacgcagaaccgacctggatagattgcacgcagctgagcgcaaccgactccagcatttacactatgataatggcttgcgtagctagttgccagccagtgggactaagagtacgcttgcggggctcaaaccgggactggacagtctccgggcacgaccacgactggcgcattatgatcataacttcagaccaggtggaagtgactgtcaaaaacactggagaggacgatatcgtcgtcacagacaacgacgccagtattctccatgaattcataaacgaagtgtgggaacaaaagaaggacaacatgggcatcaacttaaccgccaagtccactagtatcgtcttagatacgcttgccacggtgagacttgccaaggacaaattgcaacaggtcgcagctgtagtgttggggatggaattcgatgcctccgctcagaactacaaccagtacgaagaacagtttaacaagttcaatgcacgaaatctcttgtcatacaaaatgctgaccccacacacaatcccggagcaacccattatagttggggcctctaatagggaaggacagataggctggatcatggctggtaggttcttcaccttggatcaaagagatgaagtcgaagcggccgtaatgattagcagcgccgcttctttgagggatagctgggtgtacagactcgctgagctgataacaaacgccaaagaattcatcaacgtgaaagccatgggagcgaacctcaaaccatggagcgaccatgcagcggaagacacgcacaccagccagtacgtttcaaacaaagtgtctcaactgaaagcacgcttgcttaagtttgaacaaaaaccagttacactgacgccaaacgccaacaaagagtggaccacacttgtggagctcactatgtccacatgtggttataattggacatcccacccaaacctactggactcaaacgctgctgccgccgagcaagtggcactgcgcatgctaaccaacaccgagaatctgaaattatatagtgttaactgcgacgccaccttattatcaggaatgtacaaggccatggttctgcagcccacgaacgaagcgaacaaagccttatacagaatgacgttaccaagcctcctagcagcttgtgacaggataatgggaagcaacacggaaaaattgaccgacggcccaacaaaagaaaatctcctgtccctagtggaagcagcaacaaaccagaaagcaggcatagatgtgtggactggcaaatacaacccggacgtcgagcatgcaaacctcgtgattaacaacagcgccattgattacagttctagagacagatacaacgatgagctgttcagtatggttgacaaaaacagaaaagtcaaggtgattatcaacagaatggacacccacgacacacctcacagtaacaagtacgaagtcaggggaggaatgacgcgagtgatcaacacaacatacaataccgtaagccattacagtgtagagatgcaacaaatagctgaaactgggagaaccacctggcatggcaagcaataccgaggtgacatcgtggcaagtaacaacgctctggaaatctgggaattggaagaagggcccaggaatgagtactacagcccaattaacacccaagcgctcaacggcctccaaaaaattgaagtaccaaacatcaccaccaatgtattcgatatgctagccaagggagaagttatgaggaaaagaataatatacgtagacaagaggttgtaccggtcattagccctcagggccatgagggacgggaccacttatgaagacttactagtggcagcacgaacccaattgcatggtgtgatatacagtccgggaagtgtagtatggaaacatataactgactccagcatattgatggacacagccatggtcgcacattggaagggtaagagattgttgaagaacgccggtgaagccgtgagattaatggctgactcattatctgaaaacatcggcactgcagctatgggtagagttaaggatatcatacacggcttgtctggccatgtgaccaaactgctgggactcaacatgaactggaatcagctagctgccgtgcttacaaacagcgacgtggaaatgctcaccaggatagggaccgaaatggagaagtgggctgtccgagtggatgaatatagcagggagatagtgggtgtcaccaaatcaattagaccagacacaaaggtaacctctgcaatcaccggtttcgctgtctcaaatctgctgaacataagatccctggttacgccggtcagcagcaaggcattgcggcagtacaacccaaaacaaaggaaaatcataaagaaggagatcaaccgaataataatgctgagaggtgccttggacgctaacgtggcgtggtggttaaaggacgacaaccttgaacccaggctcaacaacttactggccaacttggccgtggggggaaaaggtactggacgcttgtcatccagcccagtcatgcaaggggccctaatagaggcgctgaacagacacgataacgaggcggtataccggatcttggacgcatctgaagggaacttagaccacgacaaacaagggcaattagagatcatcaagaaacttcaaacatacaatggcacagcgaaccaagacaacctgtcaacagctgatagcattacaaccgagcgagcagagggcctcctgggaatgcctgagttcagactgactagaaaggatgtcgcaagattggagtccgtgatgaaagacgcggatgacatggaaagccgggactactcaaccctctggtccgtgtttgaggcggtgaccaaggaacacggagtggaatttaaaaggactcatacgatgtcaaagaatttctcgaaaatgagggtatgcatagtggccacaggctcacgaggagacatcaggccaagccacaacctggccaaacaattaagcctagacggggcagaagtctcactcctatgtccaagagaaagcttgaaagagagtgaaatctacaggatcaactacgtatatgggaactacgacgttgacggtgaactacagaaatggcataagcttatggagtggacccctgagtccatcgacataataatgcgggacgatttagacaacaactggttgcgtcaactacaaaccgacaagttagagacaggttatgacctgatcattgggtctcccgtaacacccatgggcttagcattggcatatatatacaacacccattatatagacttttgcccgatgcctctaagaaacgtgcaagggaacataattgaaagagtgtatgcccgactactaagcagagaatacgtgctactacatgaaaaagcaataaataacctaactcaagaattgatcggaaagccggctgacattccggctttactaaccatgaatagaccttacgcttttgcagctgacccccagctcacagccccccaaccaggagagatattacaaagagccgtgggctactggggagggaaagctcttgacgaaacttacgacaagatagacttcctgacccctgacacacaagtggtgataacaatggggagcatgagagacgaagaggtagctcgaagattgactgcaaacatggaggcagacaatgtggtggtgttagccaaaccaggcagcccactctgcgaccacgcattggcaagagggatcaaggtgtactcaggggactacaacttgggggcgctacctccacatctcactgtggtgcatcacggtggcgcaggaaccacagcggaaatcactcgtagcaagtgctggcaagtaattgtacccgtagctttcgaccagaaagcttgggcccaaacaattgaggagagaggcctaggaaaatggatcaaagcaaacagagacatatccaaggaagatgttgccttccgaacaccaaaccccattgcaatcaagacggcggtgcccgaaatggctgcaaacttcactaagttgttggccgagaacactggagcggcatgggtgtggccagtcacaggttcaatctttgcaacaagtgacacaggcaagccttacgcttgggaccgcttgataggcaccaacgccgccactgaggccgacgctgacaaccagggaatatactatgacacggaaccgagaaagttgactgtatctttcgatcccttaggaaccgaacccggagagacaggaacatgcggggtgagagcgattaattatctgaagaaggaagggaaggataaaatcaaagcgcggctgacaaaacttgggacaacctttgacgaggtgaacagcgagggcatgacaatggaccaagttattaactactgccttgacgccgaaattaaccctgtgatttgtacggagaggtcctgtaaagccataatagctcacgcggcctggaacacaatatacctttggtggcaaaaccaagggcacatagtcgtaatagaacctatcaagactccaacaactagaatggtgattggcatgaccaacgacagatacaacgcaaaagacaagatccaatgcactttgactgggcatgatgcttacagctggcccaacaaaacttcggattcctaccatgaggacctgtgtatcgatcaagaccaactggaggaggaaatcaggagggtgttggcaaacgcaccttccagtagtggcccaggggatagagccaacctatggtccaaacaaacgaagaaaaccattcaagaccggattaaatcgaacttcgccagcgccaggaggagaacccacccatggataagagcccgcaatatcaagatatggagtaagggagtagcggtcatggaggaagtgcccgaaggcaaattagtggcattccacaacgacggcaatgactacctgctggccatcagtgtgggccgagatgaggacgggtggacgtattacataacaagtaaaggaccgcagcacggcatcagtcccagcggcataatattggacgccaacacatatctaacagctggaattgacagtagcgttgctatcgtgccgatcagggcggcaaacaatctaacaaacatattgctggaaaagggctacccgatctgtgcaaactttgacgcgaaggaggcagaacgggttttaatagggcatcatgacggtgtcccacaccattggaacaaaaacttatttaacacttacgggcccaatgacatattgttcggcttggatgaagttgccaacccagaactgtatgaccggttgaagaacaacatcgggcccttaaagtttgcagtgtggaaggacaccgtatacaggaacctggtgttacaggtacacaaatacccagagctgtacaaccaacaatgccgtgcgcgatggccaggggccgatgacacctttggggtgagttggcctgaggaccaggtatccgcagaactagaaactgagataaacaacctcacttccccggtatacaccgaacaaggctattacaagttcaacctcccgatcagcattcacaacccctacccggcgcacatgtatcatgagatgatgaacaagtggagggccgatctgtcaaccgagcaatcagagccgacatcgatgtggcatttggagccaactgttgattacagtggattgatacagataggatcatggtatttccggatcgtgcaagaaaccgacacaccagaagagaacaaagaagtgaaagaacacaccacactgcaaaccggtacgccgttttggtacacaatagacgaagccgatttggaagacgggcaagatctaccaataccgaacgactccacacaattagtgataaccaagagtaaggacgtgagcaagggccaacgcacggacaagagtcatgaggagctatggttgcaggttaggggggacgtaattcaaaacgaacactacctattcctaaaatgttcatccgtcgaagagatgttggcatggatgcaggccgactacgtgccagccgactgcgaaaacaacgtgtcatgtggcccaccaagataccaaaactccactggatgggtgtcaaacaatggtcttgtgagatataaagatggcccatggtctgattggagattggacttaagcaaggaacaatgggacgggatgatgtccgcggagccaccaactggatacgcaaacatacgagatgtccaagaagtattaggcatgacttccgaacaggtagaaatcttggttgaacaaacatcatgcgaagtattcctgttcaaacccaggataacggcttacaaccacgacacgcaattttacgccgaatcagactggttcgagggtctaaacgtgtacggcaaatgcgcacaactcaaactcgccagtaacggacacatggaatcagaaacacttgacgtgaatttcccggtaggcacaattccatataggaaggatgaaataaacgcataccgcaatgctgaaggcacactgatgcaccacctgactagcaaaatcaagttggacaggagtgacgaaataaacgttcagggcaacaagtgggagagaaccgcagaactgatccttgagcgattcctgaaaccaaaccacacacatattgttatcacggccacatcggaatggaacccggaagagcagaaaaagttaaacgagagtgaacacaaagcaaatactctgtacctaaacttgacttacgacgacacttaccaacaaggttggtgcaacgttgtcatccctaagtcagccacaaacaacgtgaagagcctgagacaggctagaacaatactattctacatacccaaatttaacccagacatcatggtcacggtggtcggggggcgcgaagatctcactgaagctgccaaaggcatagacgccgactacccaaaaactaaaggggtgttgaaacacaaaccaggcaacctaggatgtcaattgtacatgaacaattgctcgggcatgttgggcacgttgaaccacgccagccactactggaagcaggacatggacctgacatcacacatatacggaacagacgagtggctggcctcggagtgtgccgccaacttcacaacactcacacgcttacccgtagataccgtatcaagcccgcaggattgggccgcatacattcgtcaaccaacgctggcaattagaccaaagtggttatcaagtgaccaagacaagctagttgacgacataatcagacgttacggactgaagaacgaggacgatagtaaagctgcggccgtcaaaattctcaaatggggcaaaacaagcaccaccacagaacccttgtcgtgtgaacaggccactgtggacatcagtgacattacatgcgccgtagtgccgaaagtgactggggcaaatggatccaactacaacgtgaccatgggtggattggaactgaccgatagtgacaaatacttaacaataagtgcagttcctcacggaaacgacactccattatttatcatgccagggtgcaacacacaagtaatgccaggttacacgaccgtcactgtgggtatgggacaccaaaccaatcgcgaggttagagtgaacacccacgatccagtggcttgtttagctgtgattcatgccctggcagcgaccgcctacaaaaaggcgattgtacagatcgagggttactggccggagcccaccgacacgattaacagggtttcagtgatggattacccgaccatacaaccagtttacataggaaccaagctcacggcaatgatctacacaaacccgagccccaagaacttcgcaatgggcaaacacctcgtcaccacaaagttcgatgcgttcaatgagctagccgaacgtgagtacactacactacacaggtacgatgccccattaagaacgagttggccgcgcaacccatggttgcccaccaagggaggaagagtttggcacgaagccgagctgagccacacgctgggaaaagccaacatgaatgatgccaagaagatcgtcaaagttgacgagataccgaaaaacggggaagccggacacatcagcgccacggacataattaacgaattgacgtcggccatggtaacaatacccaaaggacccttgagggacaaaatgatcgcggaaatggcgatatgggacaatgtgccaccggacgcgtcatttggggcgacatccatcaacaagactgcttccgaaaaagtcattgcggcagttgcattaaccaaaaacttgaaagcgggtgaaaacatcgtctattaccacaaacccagaggagaattcttagtcatgagaaaatccaagcacatgcaatatgaacaagatgatgatcaggacattgagagtggcctctggttcaacactgaagaagtagaaacgaaaggcatagaggaggctgacaaacacggggtcaaacaaggatacgtcaaacatgccacaggcatggacgagcgaactagcaacacgtcgaagcaggaccaattaatgccatgggcaatagctgtgccggaggccgaggctagagctgcattggagggcatacccaaccggtccacatacgtactgcacagagacataatcacgccacaagaacaagctagactcgacaatgaggaggaaattccaaggttaaacgggcagctcaaggccattagcaggcgcgtggagcccggaaagattttgttgacatgggggccgaagaccacagatcaaaaacacaccatattcaggggcgctatgatgttggcatataacaagttcgacgaaccaaattcggagacacgtgacgctttacgggagggtccggaagctgatagactcattctggtgaacaccgttgaagagatgcgcgaacgcctagaaggcatgcgcagggaaatgcatgacaaagggattacagagaagactgttgtcttgcaagacctaccgttgacggaattcctcaccaaccaactacatgactacgaagttgggtcaaacgtagggtcgggcaatccgaatgccaaacacgcatacatgccgataacacaccccggcttcaccggagtgggggaatccaccactgagaaaccgcaaagagagatagtgactgatgaaataatcgccatgtacgaaaactcagatctaagtgatttggtgagaatacaagcaccactaaacagaggcgaagggaaggggttcgtgggtacagccatgccaataaacgtaatcacatcccggaaaacagcattgacagagtatccagttgcttcaagaccagtgttgacacacatggcatacagcaccgagaatgccgtattcaacgtcctgggcagccaaatcacataccgtaagagtcccctggacacaaaacacgagataaacatgttcataaagacctacggaggccccgacactagggagctactcttaaaatggaagaaagaaccgctgtcattcgacattgaacggatccaggagtggttagcaggcaggacaggcgtgcaagaaatcgacagagaattgcaacaaatattggctgaggggttattcaaccaaccgataaacaagcttaacgtgcacaacaagcttgagagtctgctgaagagcgccccgatcaccaactttgcacagcagcaagttcgcaccatagtctggcaacaaaagggttatgcagctctgttctcccacgttttcctacaagccaaggcccggctaaaagaattcctgggtccgaaattcttatatgcagacggactcacgccccaacaactctccaacaggtgtagactggagagatgcttagggtttttagaagacgatctgaccaaacaagaccgacagaccgatgaggatacaatcaactgtgaaatgagaatttacaccgaagttttgggggtgcaccaagacgtggtgcaactatggagatctgcgcatgaccattggttcttcaagggcgatggaattaaaggtcggttaaacatgatgaggcacacgggccaggccactaccgcgataggaaacgtattggttaacttgttggtgcatcgtaggatggcggaccgactgggagaatctctgaagttgatgatggtgctaggggacgacaacttgacactttccgacaaagccattgacccacgaaagttgagagttgagatacgagatctttggaacatggagtcaaaagccgaattcagcgaaaaatcaggagtgttcctgcgcatgatggcttgcaaggacactaacaaccgggtgcaattgggtcccgattatgtgcggctcaggaaccggtttgagttcaccaacgggcaacacatgataagcgacgaaaccatagaagcccgagcactttcatatgcctgtatgctaggcccgttacctagtgtcatggcagctatagacacttgttcccacaaagtggaaccagtggcttggtatgacccagtgccccaagtggaagccgtgggggattattacttcaaagaggtaccagcaacattgagggctggcatggtgcacaacgaaatcaacttattatgtaaaatgatgcgggagcgccggactcacgaatactctttcgagcactatactaccgtccagaaattgcggtaaaccctggagggggggggcaatgaccggcgccgcagtccaaccaactggcccggtaggccgggctgctgaccacacaacaaacagagctttgatcaccaaacaactaaccgaatcaaaccaccatatgaccgtgtcacatgccaacttgatatttgaccgcatcaacgagttgttaggagaagtgaaaaccaagctcgctctggcaggaaacatcacgcagggtagaacttttacctggaaagattcaaccaacaaaccagagtccatccttgtcgacgcagccaacagccgaattatctacaccaacacagccgccaccactgtatcaaaagacggctccagaggtggcttatgggaagagcaatccaaaaattttagaaaaccaaacgaacttgcacaaatcactggctggattcgtgccaaacccgaacgtactttagaagaacgcctgagccacataccgggcggtgctgataaattagagaagtggattgaagggatacccagagaaatccgcagtaaactgagacaccacctcgaaaaagaaattagagaccaaatgatattgaccgcgttggacctggagattgctatacaagaaggatgtggctggggtgttaaaatcttcaaggacgggctgatcaaaaaccgcaaccacatgactgagagggaactactgaggaatccgtttatggacgaggagatggctcgcacatgggtcaacacctggagagattgcaagcacttggtagagttcgacgcgaactccgggttgatcagcaattacaacgacctgaaatccggcagtgagctgatggtccaaaaagctatcgacaaattcaaaagttggggtggcagtgttgtcggactgaccaacagtagaatcttcctgaaaaggcagctcggagccaaataccacgccaggcaatgtagcgtgtccatacccccaaagggagggaagaaaaccttagcatccaaagaaccttggatgatgacagcggacaaaaagaacgatgaagataagaacctaggagccctggttctaacgggcgaacccggacacttgagcttgacgccgcctaaactggactacaatgccgaaccataccagagacaagaggggttcatttactacatgaactacacgaccaaggctcaagtggtgtcgtatgaacagatggccaccttagcaagctcgcaccacaacgcatggcttaatgatcgttgcaaattttacaagcagttcgaatgcctagacaccacaacgtcatgggaaggattcgagcgccaccgagaacaatatgaacgtgactattgcacaaagagagatgaattcaaactatacagccacaatgttgaaacggcaatacatagaaaattgcacatctccggaagtaaacccaacccttacaaataccgaaccacgtctgtgatgatgcaagacgacggtggcaaaacattgttgtgtaaggtattcccaaacaacataacggcagtgacgctatggcctgaagcccacactcctattggggacgcgagctacagccacgggatactgaacgaagtagcatataaagcggggttggcgacattacacacagggtggcccctgaaatgggacgaaggcaaaccaatcttcaacgatgactcaaggcaactgatgtgcccatacaagatcgatactctcagaccaatgcctttccatacttccaaagacatgggcagcaagccggcagaatgggaagttattgtggcgtggatgatcaaagtaggagccttagatttagattacgcgaacaaaatctgggaggaaaacttaagactgtgcaaccattgcgggcgggaggtagggcactggcccccgatggcagcttacaccccggctgcgtgcaagtgcggggcaaagctttggcatgagtatcgcattggatctaaaaacgagactctgcattccctggggctgaaaacagaatggttgaacgagccaataagatgggggagcgccaactacccgattgtcacagaactggaacggcatgacacgccaattaacaggcacgtaggaaccgcaagacaaatgacggacgttccaaacacattgccagggcaaatggattgggcaacaaacaccatcctacaaacacccgggggcatgagatacagtcatgaggcagtaagagggttgcgtgaaccaagcttcgaaggcatagcttgtacttccgcgaaattcgagactaaattaggcttatttgacccacaccttgagctaaatatggaatggttggaatctcaactcaaacgggttgaaaccaccaacccaaacttgggggcgttttgcataacagcaactgcaggattcagacttgggggcttgtacaccatcaatttgaagtctggcaaatcgcgcggttggatcggggaccccgaagaggggacagaaacatggtacttacccgtaatgggagggcgatccttagccagttacaggttggccccgtactttgcgtcaggactgaaaaagaaatggatatgccacaacggaagagacacatcgcagtcagttcgaaccgacacattcatgggcaacaaagtggccgtaaatgacaagaatccaacgggatacgattctttcacctgctattacgggccaatgttgttcatgtattggggacacggctcagtgttctcatctgccgtacggagatatgtggatcaaatgcacgcatacagtgatatttactgcggcgacgagaaaatgttgatcgacgctgcaataaacactaataacacaataatagggtggcaagatgcagccatattgtctggaccgtaccaggcttctggacatcccagacgttggctccatccacgacaaatcataaaattttatgaaaacggacgggaacagttcaaagtacatgtcaaagaagttgagtaccaactattgggtgaaaccattaaagctagcataacagaacaaagtcaggactgaaggtctgacacgaggaacctcatgggttc

SEQ ID NO: 796 - DNA, 14027 bp, Basella alba alphaendornavirus 1
  source 1..14027: mol_type = other DNA
ggaatatggctaatcggcttattctaatcaaacgcaaaagacttatgacacagaccggacctgaacgaggtgataaaacacctcgttcaggttcaaaacgtagaagattcattcctccgattagaaatacaactacgtctaagcacgatagagatggtatcaagatcggttttagaccacgagaaaatcggcaaatgaaagtacaagttgggtggtttaaattaccaagaacagtaacattcaagaacaacggcaacccgtttgttacctcatttcgtaaattgtttagaagtaacaaagataaattatttaatggtgggaagaacctaagtacagtaccagccagaagtagtgaaatgacagaaatgtttatgttcatgtccacgctagagggccaattgtcaatccaagatctagatccaaaaataatcaataagtctatatacatgatagaggtaatgggttacggggtggtcaagcctgacggagttccattctcatggtttgagggaagggttggtcactcatacatcaaaccattggcagagggcgaatccagatataacaaattttccacgtttaacccttcagaacctgtactcacattcacaatggataaagagccaaacgattgtagtgaagatttaatcaaactgttcaagaaagaaatgattaaatacggaggatttgatgaatactgcaagttgaatagtaaaaatagacctgatgcaatatctactataacaagaacctctgctggattttccatagaaccatgtggcttagtacctgtaaaacagtgtcagatatgtggaatggtcaacgtgtactctcattatgaaggacatccagccaaaatccattacagtttaggacattatgataaaaccaaagagaaagaacataatgaattactctctgaaataaataacaagggggaagtcacaagtgtgccctggaggtgctgtggatgtttctctgatttgaacatcggagtaattggagcaacttataaactagtgttagtgcttaaagttgtatggaatttttgtttcgtgacggccggagaattagataatttgttaacgatgggttttggggacatgtttccagacttagaaccaactagcaaagagaaactggtggctaatgattgtcgtatcgtgtcagagtatttctttcatctacgccggagtattgtaccatgtggctatgatgtagacagtagtgtattgtccaatttgaatgaacaggtaggagggatatacttcaagaaacagatgttatacaactccataaaaccagagttagtaacagaattgtcggtttgtaacattagtttatggaaaataatcagtgagcataatgtcgcaagtgtaggagatatgttgccacatcctggggtaagaaactatcaccaatggttttatgatgactctttatttcctttattccccatggatgtttgtgcatccagagaatattgtaatgatgataaagaatttgccatttttggatcactaggattttctagattctccttatctttcgtcttagaaaaggttaaaaagcaacgaagtgtcaattatatcgtcccgagagtacagaacagatcaactctacaagatggcaccggatcagtcaggtttgatgatgggaaagtgctgatgtatttagacgggaacccaacccctcttatatttcaagcagaaactcttgtagcgttgactgattatgatattctgattcatgatcaacattattatgtaatcaccacaattaaagatctaaacttagtttctatgaagacgattacaggaccttacagttccataacggtggtaccagaatacaaatcacactttatatcagacaagactataacattacctcttccatccttggaaagattcttaggtggttggaacaatttgtcatacaaaccacaatcctttttaattaatgccaaattattcaaatatctttgtgtacggaatctatcaggaaaagtagaacatcaaaccttaagagaatacgccgtaggattcgctctcaagagattcatggtacacaacaaagttgtggctgatttacaagtcatgtacgaagatatagacatacatattatactaagcagaatttgcatgatgatcattaggaaaaattaccaacacaatttcgaattttcagaatttttgaagaaattagcaccagtaaaaggattattaggttccatttgtaatagtatgacaaccatcgcaattcaaatctttggagagttccttagctttgcaacaggcatttccttagaacaattcgttgaattattgaaatactcgcatatctcttcatggataacaggattatgcaaagcagacttttggaatgacctgttattattggccgatgatgttactttgcaacacacaaaaatattatccattgataactctcaagttgatctatccagttattatgaaccaatatgcaagcaccatcatgactgtagccatgacgaaccgttgaaagagaacaggtgtgcatgctgtggtctgcaaataactgacgatgtattttgtgaatgttgttacccagtacaagggcaagattataaatatgataaattagtgatcccaaaaccagatgttgaaatagaaaagattgaggaggcaacagtggaaagagctagagagattctagaggaaatacttaaacaatctgacaaatttatgaaacaggatagcgtgtttcagtttggaaaagaaacacctgtaataaaaccagtagatgataaaatggcagttcagataggagaagaatcatcaagtacatcaatcgtggatgaggaacctgagcaaacagaagcatcttttccaataccaagaattatatcaatgccagaaacacgagatgcccctcttaccatcacagaaaccagagcaagatttaaagaaaaacaatccgaatcaaaagaaaaattatccgtgcctggtgtgcaatatgttaaacctgttaagggcattaaagcattggtagaaaacttaactgttgaggcgcaaatacaaggcgaggctatgtacgtaaacatgttgggtctagaattcaccaaacatgtattgtccatggtagaatatgaaaataatcggaatatagaaccagattgcagatattacatgccacacattttgtgcggagtgacaatgatcagttccatggacttttcagtggtcaaatcatggaatctcccgaatacagatgtgaatacatgtgggatggatgcttacaatttcgttacaaattctaatcatagcttatcagagttccgacaattgtgtgaaatggaagaatcattctcagattggggtttacaattgtgttgtcaaaaactagaatccaatctgataatctacagtaaaactcacataacaatcttgcgatatgatgcaactagtgattattatggatgcatagagtttttggaaccaattcccccctctagtataggacacttcaggccttgtagtctaaaaaggatggctagatcatcgatctatttgtgtgtagatgaccccaacagtatgtcagacagagaattatgtttgtccagcattagaggaaagaaagaaaggttgcactctcaaatagaggtgacccctgaggagaacctattatgtgaactaacgaggaaaataaacgtgttagacacaccgatgagtaaaattagcaacaatccaagaatgataaaaattgacaattgttggtacatcactaacaatgaagaaacccggcagaacaaccctgatgccaactttattcatgttaaagtaccaacagaattactagatatggctgacactattagagctgccttagaaggaagattcgatctcgtacatttaccagagatgatgcatagttcagaagaattaccacacaacaataccgaatgggtgaaacaggaaatatacgaaattctgcgatcttgccggcgtgtggaggaagcagctatcacattgacccaaagtgagataaaggttataggtgggatattagcccgaccatacttttctaaaactgagatagtacctgatcataaagatcattttaaacttcggttgcatgataaggtacctattcgtcttgaaggagctactagacaagtattctccataatcggattcacagagaaaggttacataataaaccatcctttaacctttcccacaagaggtaccatgatggagctcaaagagtcatggggtagtaatttaagaagattaatagggttattcaaaccgatgataagcattaaagaatttagagatattgtaagtcgagctacttgtgtacttggacccgcaggttacggaaaatcaaccatgatttccaaggaggccaaaccaggagatttgtgtgttgcaatgacatccgtttccgtaaatagtttgaaacagaaaattaaaagtaaaaatgtaatgatatacacaatagagaaagcaaaatataagcacttaagtacttctaggacattgtacgtagatgaatgtataatggtagactggaaatctgtactacaattatgtgagccaagtactactttaaaattatttggtgcaaggaaccaaataggttacttggacatgagtaaaacgccaggtgtgagatttaatcaagatctgattaaatatttacgagaagatcaaattaaagtcaccaatgttacatacagaatagggaagcctttgctggatttcttggaaccattagagaaaggatggaaaaacccaaccaataaggtgacaacatataatattactaatttagactctaatgaaattaatactctgaagaaaattgtacttataagtaagccagatgtagtgataacaatgtacaattcaaacaaaaccttgatagataaaactctgacaggattggatgttcaagttgttaccacccattctttccagggtcaagaggttaaaagatccatggtggtactcaaagcggatgtaacaggagcatggaatttgaactccgaccccaattatttgaactccgctctaaccagagcaagcgaacatgtagaaatagtcctgtttggttttccgctatcccatgtttcaagcgtggatcaattattatctagaactgcaggacaattgccagacatattgacagaaatagaacaattcgataaaaaattaatgacaaacaatgaagatgagaccttgaaaaccttgacacttagaaacatgcacaaactgagtgatgatcaaatatcaatactcaatagtctgaatataactatggagggtatcaacattaagtatttgagggataataatgcagtgatatgcaaagccagcttgtactctaaagagatagcaaaaatcataaacaatggtggttcagtaatcatagaagccaacgatttgattaaaaacaaaataatgagtaatttagacagatccatagatgcaaaatatctggacaagctaaatcttaaaaacacccatcaatttgtagaaatcatgttgtcagtcaaatctgcaaataagcttagagagctattgtggatagtggataaatttgatgatggcataatggaatgttatttaatgggtcgggagattaagttcactaaaaccaaaggttgccctttattctcaggattaaagatcgaggatgaaaacaaccaatttattataggagatgggtggtatgatctattccggcgggaaatagggtataaaatcaaagatattgatggacctgtcaatacagtaatggcttggctagatattaaaatagatggtttgatgattccggaggttgacagtattggatggctggacgtactgcaagggatgaacacaagtacccaatggcaaatgcaggaaaggttaacaaccatcagcatgtggttagtgaactctatcaccatggactccacgagaaagtgttacccgaacaataatgctaatttatctattaataataaattatctagattgataggtgcaacacctaataggaccaaacatcaatcagtcatcaagcaccaaaatttaatagttaaaaagaaacactggttgttcatcactaagttccatttagggaacggtaacgggtgtgtgatgactgtaaatcaaaaggccacagatgataaattcagagaatttgtggtggagtgtattcaagatttgaagtatgagccaaccccaacattagtagctgggttcagtctcaatgatttacatatacccaatttgaatatgcctctcacgcgacacagggtcttgggcacacaagtgaacaagatcatcatggatcagatggtagagatacaagccctcacgtccagatcaccagatgatgttattaggttgagaaagaaagacttcgatgtttacagcaaattgttaaaagataagtacaccacactgtctgtaacacaagcaaattacgacatgttaattagcaacgctgagaccatgtttgaacagctgataatcaatcaaatggttcccaatttttgtaaaccaggcactttaatagtttattgcggaaacaaccctttatgcgtggcagtcaaaaagaagtatgaattaaaactgagaatacctaagttaaatgacccttcacgcgtagaatacgatagacaattgccaggatatttgaacttatacaatgaatggatcagtaatcaaactgataagaagattaaaacatttagctgggatgaaacaacacatgccaatttaatgatagccggaaccaatttaatatcgattacagaaccagatctaaaacacctacttgatagatgtgatgaactagtaggatgggtgcctttggacatcgtggatgatagtaaaattcatcaatttgataaatccaaacgattgttgagttttaaggatagcacattctgtcggccagcccgcaataatctacacatagacatacactcttgtaaaccattattcatcgataacgaaactaacacttatgtggaaatggtagttaaaaatgagttctccggaatggctatgttaagtcttaaaaagaccgctataccatgcgacaaattagtatatagatgtatgggcaccagacaggacttacacggttatgaaacgattaaggttccttggttgaacttagatatattagatgttgttagtactaaaaaattgttaacatttaggtatttcagagtcaatagaattatgatgcgaaacatgcttctgagattaatgacgggtcaagacagcgaagactctttattagcatatgctaggaccttggaatccacacaaattatttcccaaacaagtataacctccatgtacaactctgacttgcctacgttgctcaacacagcatgggtggcactgtacatccataaagacaatttatccaaatttaaacatataataagactgatagataattctcaagatagtaagtatttaatagaaagattgaccctcttaataccatctttactaaatttgtccagtcttatgtctgatataacagagggattaatcaaaacattagtagagaaattcataacttatgtcaaatttgatactgaatggagagaagtattacagttcaacttagagttaacctggctaaaatacacaccaattagacatcataaaatatataatttaggagatgatgatacgcaaacacaaccggaccccccaagtgacgatagtgataattcagatagtcctgactcagaagactattccgacgaatctaggactgaacaggactattatagtgcagaagatgacccctatgaatcagatcaaagatccgacgagaacgaagaccttatatctaaaacgtcaaaatcagatagtatggttatggaacgtagtatggaaacagcttctattacagataacattcacacagaagagtccttatcagatacagagtcacctgcgcaagttgatagacctttggaaactatcctgtcaaatgtaagtgttcattcaaatatcaatgatagtgataccagcccttctctaacggaagtgactatagaatcacctatcagtacaaaaggagaaaagacagatagtagttcagagatattacccggtcccgagcaagcagttgtagtaggtgaaatcataaaccaagaaacacgctatcctgaagtggaggacaacacaaaaatcgaagaattagaagtcaaaaccatgacagaagaagacatgctgaaggtagtggaaactcacctaaatgtggatctatcagatagagagtacatttggaacggaattaaagattgtaaacaatttgacggtaatcaatccttaaccatgaaacatgttatagactacttgagaataacagttttaacaaaacctagcgatacaaaggctgcagcactagattttccagggatgaagagacaaccaccgctaacagtgaattccatagatggtaaatatgggtcaataccaaaaatcctatggtgttattgggaaaaagatagtgttacctatttattacacttgtgtcttaagacttggcaccattataattcggattatagaataatcgttttaacacgtaaaacaatggaaaacatggttgggaaaaccacatggaattatataagtaattttattgtgcaattcagggctgattgggtacgattatatattcttaaaacctatggtggagtctggttagatatatcctccattttcaaagattcacttaatcctattgtcaattacgcagccaatcacccaagttgcgttttccaacccagtatttggaatcgtaatgaacctaatagggctttcgagaattggctgattgtgtgcaacaatcaaaacaagttgataactaagtggtttgacattgtcgatgacatggcgaaaaatgcaggaaattgtgaagaagagattataaaatacttgattaacaaatatggcaaggttggagaacgagcatgctccacagtgtctagaatacacctattctacttcagagtttacatatgtgaaagtatcgccatgcaattaacttgtacagaagatatagcttgtatgttcaaggatgaaggaatagtatctttgtggcaatccagatcgatcagagaatgggctagattgtatgatatatacttcaaagatagcatggaccaacatcaagtggatttaccaatgtacaaattgataggagatgaaaggaaaccaatagaacgttggctggaagaaggaagagaagtatctcctgacagtattataggacaattgatacagttaactattcaaataccatatgacgtgcaatcagttaaattacagataagtactccaaagaagacggtagaggaacatttggcaatagcacattatagtggagtaaatagcattttaatgtgcataggatcagccggcgacttgttaccaattattaaattgtatgacttattagagcttaagaattataaacctattttgataacccacaaagatctgaaatcaattattggtgatagaaggttacatcctttgacaatgacgagtgatcttttaatgagagtggcaaaccaattattacatgaaaaagatcccagaggaatggcaacaggattcgatctaacaaagtcgatagtgcaagaaacttgcaattatttgtccgaatatcataaaccaatggacttgtacatttgcaacccattatttcctaatctcaaggatatacaagaacagctcaaaaataggtggataataacaaacccttttccatatggttggacagctggaagaaaccctgaacggtcttggtttgataaaatgataactattttaggagattgcagtttacaattgagtgatataataagaagacaaaatgtaaaactgaacctttcggaacctgcgtatcagttaactgtgaataagctattaacatgttcacatacattgcatagggaagatcaacctgaaataatacaaacaggaccgatgtccctttcaggttactctagtttaggagggggacatcagactttgcacaatagaaaatattgtctaattaattttagtagctgtttaaacaacgttaaaccagaagatgtgatgacagtatgtgatgtaatcatgaaatgtgggtttcacatcatatttaacgatgcaaagactagcatatctccgtttggtattttaggaaagtatttaacagctaacatgggcatgataatggttaaaaatgggttgaatatcttagattatgttgggaaaactgaattttgtatcactcatggtggcatagggacattgcatgaattaatcgttgcagggatcattccgtttatatatcccacaatagcagaccaatatgaatgggccaaccttgtgaatgaaaagaagataggcacaaaattggaccacgaatctcttgagtcagacttagagtacgggataagttctttgggtatgtttaaacagaatttgctacttgtgactagtgagttcaaaataagcatagactggttttggctaaacatacaacaaaaaggaaaaagagatgttaggatagtgagcaaaacaatgatggaaatgcaaaggcccagtttgcagttatctcacaaagttgtaacactaaacaaattttcagacgtaccaattggtatttataacataagtggaaatagtattaaaatacattatagtccaaaaagcaacggattttgtgtaaagcaatgcttagagcatatcttaggagaatcaattagaggtaataacttcataacgtcaaaccctcaagttggtgacttattgacagatgtagtagacaggagcaagattataccagggtttctcgcgttaggtttgaacatagtgaccttgcaagacaatggcataggcaagctgtacaaattataccaaggtaccgtcatagggatttacttgaaggaaaccatgtcggttttccattgtgaggtgatagatgactttgtcgttgacgaaattatacctatgaccagtccaccaaagacaactcccatgaatttggacatttttgaactacttaagaaagaaggtcattataaacttagctatgacacattgtgcaacccaccattattgtataaaaaagaaggaaacaaatcttactctaactatttatctagaatttcaatgaatggtatggcatctctacacaccagaggaagttatagcacgttagatttaacactaaatcgcgacagaaacatctactatggaagttcttacgctcaaaatagtcctttgcatacgagtctggttacctctagactgggatggtgcacttgtaactgtattattaaaaatggaacagcatatatattctctgacattgagttaccagctaaagtagtgatgataaatttgcatctgcaccctttgtcctccattccttcaaaacatttgattcataaacacaaattgattaatttgaacaaagagaccagaacattggggagtgtacaaggatcattatacagaacagacaaattacctgaattggttaatgaaaattatacggtaatagtaggacattatgataatcggtctcaccataacactgacgagttaaacatattgctgaacgctagtcatataaactttcaaacagagcaacattgcgaattaaaaatgttcatccctagttacaataattgtatggatagattatgcatacatgaaagaaaattaacttattgcacagaattaccaacagtgttctcagccaaagtaatatcagcattatctggtttggaacagattggtaatagattgatgcatagtgccccattaacttcagacatcaggaacatgctgttggcaaatttcaaagtcagcactcctagcatgttattaaagcatgaatatggaacacaattggacaatgccactgttgaagctattcgcaaattcttgacagaacctttaactgataatgtccttatcagaaacattgagcatggtttacaaactctagatatcagaagaaattatcatattagacgtgggatactggaaaaactacagctgagtcaattaaatgaaaatatatttgtttcaatccttaataacatgtacctaccatggtgcgatatgatgattattgcagaatcaataggtggcaaaaaagaaacttcttctactctagtgggacctaagatagataatgatgaaagaatgagttggaggctggacgttggttctgagtcaaccactaacaattggtggagtttaaacgtgaacacaaataccagttcaaaggttatacctccgatgactgacgtgatggctatgaatgaactttacatacatgacattgaaccagtgtatgttgacttagggaatgagcagcatcaagataaagtggaagtggactgtttcatcagtccatatacaagcatatacacaggtagtcacttagaacctttacttgattttccagatcctattgtcatggacttatggaataacacagacttaacagattggctaactctgtacagcccaataaatgagggcaaggtattctcaagagaagtaccaggtatagtgattcaaatagaaaaaattacaatgacaaaatacccaattgtaagtcgtcctgtgttaaccaaattatgttttgaagaaggcaggagtattatcggaagattgaaatctgtagctacgatacgacggaatgaacccaatccttatcatgcagttatagaattgtgtgagacctatttcaaacacgattggcgatctatggtttcaaattaccgcaacaacagaatattgatagatccaaaggatgtcgaaaattggattaaggcaaataaagattgccctaaaatagtgatagaaatgctagagactctttctggaggctttcttaataaacacatcaatgacgtaaatgttcatttaaagttagaaagtctttataaaccagatccaatcaatgtatggagacagcaacaagctaggataatagtttggcaaaggaaaagtatttgtgccatttatagttccgcttttaaggcaattaagaacaatcttaaagcatgtctcgattacaaagtggtgtatgcagacggattaagacctgacgagctgtcagcaagggccagactttgtaacaacgtggccgggttctttgaaaacgacttgactaaacaagatagacaaacagatagaccattattagaagtagaaatgatgttgtatgatattctaggactacatccgaaagtcatatcttcatggaaagaaatgcatgaagagtggagattcaaatctgaacactattggggtactggaaccagcatgaggttaactggacaagcaaccaccgcgataggaaattgtatcactaacttacaagtacaccaacaattcgtcaaagacaattgggacagtttagagttagcactatttttaggagatgacatgtgcatggtgttctctgaacaacctaacatcaaggatttgaagtataatatagctgtaaattataatatgcaatctaaagaatcctggaacgaagcatttggaaatttctgttccatgcttttatcccccttaacaaataaaagatgtgaattatgtcctgacgtggttagactaaaattccgatacgaggtaacaaatggggtacacgagatgaacgatttgaataacttgatgaggaaagcctcctatattatgatgctggggcaaactccttggaccaaggaaatcgtaaaggatttagacctaccaatacaacctgtagagtggtacagttatgaagacatgattaaaaccgtgggagctaagtatgaaatgaacgaataccaagtagaaggatatttgcacaacttgttgaacctgttaaaatctaaagaatattattcacacaagttccgcatgttcagcaataggacaggtacaaaactatactaacgttttgatagaggttataaacccctaccgggcccccccccc

SEQ ID NO: 797 - DNA, 6780 bp, Beijing alphaendornavirus 3
  source 1..6780: mol_type = other DNA
gtggataacatggactatagcacattacaaggatggctggtttgccatggaggggctggcaccttatcagctctatggcagggcgctgcaacagcagttgtattcccaattgccttcgaccaaccatactggtgtcaatacaacagacaacatttgtatgtaggcgaggaattggaggatttagtaaatttacaacccttaacgggtccccgatactcaattaatgatactattacagccatcaatgaagtgttcgacaatttatccaaaccacttcctgctttgaaaatgatgacaccgaagggtacttttaatgcatttaaccggaaagttattgctgattacactacaatcaaggcagggcttgtttgtattaaaccttccgaaaaagtgatatatgacaacagcattgatttgagaatggacaatacttgtgttgtggactctataatgcatgcagcgggactcaaaactgtggctgataaagaagtagcacttagagatttgaccaaaaattgtgtaagcttagggcttacaaatatacataacactccacaaagttattctacaagtgtgcatttagctgcattgtttgggttcaattatgctgaaactcaccctggtgaaactacaataactgtagatataactttaccagtaaaagaatgtgtactgcttaatgtacaaggcaaccatgtaaatttacttggagtttacaacattacagacttgactttggttaaatctatcaacaggggtgaaagcaatgccgtcagatctggcctaacaatggattattgtgaacacggcaagttatctgcattaaccaaattcgacggttgcatacactcagaacatgatgacaccagcatagtaaagcaaatcatcaaacaccttgttgatggcactgtacctgagatgcatcgcatgcaaacggcatcgaggagtgtatatgtcaataaaaccagaagcaactggtccgagatgaccgggcgtattaatgccactcaattaaaatactgttatgaattcactgctagatgctacaatgaaaacagtgttccaacaagtggtgcactgatttgggtgctgacatccaacggggactattgtaagggcatactgctcaaaaacacaccaggcagctatttaatactggcattaacaactgaccccatgccttatataatcaacggtaattacacaattgctgtcaaaaaccaagggaaaaaaatgactagaggtgcaactgaggtattagatcaagtggcgctgggattgttaagtggtaaaggtttgaacttcaaattatggagaggtcgtgtagatgaacagctggccaaactagttgtaggagattacaacttcgtgccacaccattatgacagcaacaacactagatttgagggagttgttgataaactagtgaatgtggaaggcaactcaattggcaatcaattaagacctattggattaaatgcagtgtactcccgttacaacgtcaaatccagtgaaattatttggtacttcgaaataactaaggatggcgaaaatttctacaacacaacaatggtcaaagacacttttacgccaaaaataactaacggtgatcgagacacattagatctaattaatgagatttacaatgaagtggtcaaaccatcggctggacccggtctgatggaattggatgactgctttattattcagaatgatagtttaatgaccaccgacaaagacatcatacctggaaaattacgcaacaagaaggtttctttaatgcacaacgatgacatcgattggaacatagcagtgtcgttatacagagaacagcaaatgcactccggcgttaaatataaaatattacaaaaaccactgtacgagaaaattatttggtgtcacagaggtctttgggtcatagaagaaaacgttgaaaatgcagaaatggactatgtcccaagctgcatagaggaccttgcaaaagatgggttctctacaatcaaggtgatggaaaatgctgatttaacaatcaacctaagacaatttaacacagacaaatatgcaggaagcgttattcaatgtgataatgaaaatcaattaagacaatgtgtttatgaagcaatactcaatttaaaaagtgcacaacacaaaccagtcggttgcattgatgaattcggaaatatcataactagtagtagcggtgttttgattgacatcacacggaggtctttaacaatattggatgaacagcaccaaaattacataacccttaaaatacacgatttaccattagacattaagggtgaacacatttatgatgaaaaataccataatttattccataatagttatgttgtgcacaacaaaaagaaggtgtacttggtgataaagtcaattgaacgttgtatctcagccattttaacaaactccgactcgaagcttacacaggaaggggcacaatggttcaaattgacatacaatgctgagtacctgagagctaaattagaaattgatgacagcaccatggtggatgttgttagcggtcatagaagtgagttagtgggtgtggacatgagtggaaaccacaataggtggattgaaaacactagtggaaactctgactttattgagcaagccaagatagaaaatgtttaccgtgcagaggaaacaaacacctatcgcaacactgcttacggacacaacctgcatcatttacatgatccacataaatttgaagatttaaatattgaaatgcaacaatttattgaacaattagctttgtttatcgatagtttaccagctaatcagtctgtgatatgctcagctaatgttgaatgggaaaataacactgggttaataggtattaacttaacagacaaattcgtacacatgaacaattggataaccgtggtggtacccggtttaggccaaagatatagaatgttagctatgttaagattaattccatgggtgtactgtaaaaataacagattaattagggtggtaaatggccgaggtaacggctcagctaagtgcccatacagttcattaggagtaaccatgtcaaggaacgatgaattcacaagcttagttatgttgtgggatgcagtggctgatgctggcatattagggaaagagaaactcaaatatgaacaatttctagcaacaataggagatgtatatggtgccgacgaattgtttatatcgaaatgtgacgtatataaatgttgtattaattatggtgaagggaccaagaagttggattgtctcttaaatcatgaccaatctaaatgcgcttatattgtaatggaaaatggcaagccaataattcaaccgaatgctagttggttaggttacgataattacagcaatgtcttaattgacaaactggctgcagaaatgggcttaattaacgccatttatgtatgtaattatttgtattcgaaagtgttcaaattaggactaacaactccgcatacattacaatcaagatggttggagaggagaaacaattctaatgcacacggggaacttaatacaacaacacataatgatacctacaccaccgtagacaacaaaggaacattccataccctagatgaagacatggtagactctgaatgcactggacgtagaagggctcactacaacacagactgttacacaaaaccaatattctatgaagaacttaaacaactgacataccccattgtaggtgtggatggaaaagttaaactgatgaatatagcagagatcaagctaatgatgtattccaacactgatggaccgctcaaagaaactaattcgtgtttgatgccaaatagtttattgaaattggaaagttctgcaaggggtagagcctactggtttgaaggcgatgtgatgacgacagaaaatgaaataagtgacccacgagattatgatggtaaggttcaattcatttcagagaaacctttgaacatcattggagcaattgcaatgccagtaggcacagggaaaacttggttaactaaaaaatacccaaacctttttgtggaccacgacgcgatcaacaaacccagacagcatgagattgataaacttattagggaaaacaattttgaccaggtgttaagtatacacaagtcagctaaaatacctaaagggaaagtgttgttgacctggagcatgcacagtgttccagataattgtgtatatgggggtgcaatttaccgcagccataaaccacacttcgataaattgtcacctaaaaagaaggaaatggcattgttgggcgagatcggagtccgaatggaagagaaagtaattgaggtgggaaatgacttagaattggaaagtgaagccattaaattagcaagacgcattctaaacaatgaaattattgatgtgtcaagagtcagggatcataacattgaaagcttctttgatgtaacttttaaagatgctactaacttcagcgtcagtgatggggcatggtccgctggcttatacatgccacatatgccagtggaagagttagtgagcaatttggataacccgtttaatgagatcacacctatacaagttatagatttccacgaagacactgatttatttgacaacgcccgcgtgattatgccaagtagtcaagcccaaatcgcaagctatcctttacgaagctttgaaacagcaaacaaattacacacaagcaacaaaattagcttaaccaaatacccaatgataagcagacctgtattgaccaaacatgttttcggggagctgaatgctgcaagcttgcgaatggaaaatctacagtggtttgaaaaaggggaatttgatgtatcgaaagaactagatggtataattaaaaattgtttcaggtcggaagctccagagattattggaaactacaatcctatcacatacaacaccagatggacaagggaatggttagcacacagaccaggttacacagaaatagacaaagaactggaaaaaatggaagcagaaggactaaacatgcatgacttaaaccgggtgaacgtacatcagaaattggaaagcttaactaaacaaactaaaccaataaacagatacatagaacaaatagtaagaattattgtatggcaagcaaagacaatagctgcgattttcgcaccaatattcttagaagctaaacgtagattaaaagaactactcaaacaaaacataatatatgcagatggattaaggcccgatgagttaagcgagtatctgaaacagattcctgacgacgattattactatattgaagatgatggtgacaaacaagacaaacgcacaacttggaggatgttaaatgttgaaatgggtatctataagaatttcttgaaggttgatgaaaacgtagtgagcttgtggacaaaatgtcattggatgtggaagtacaaaggtcagtacttacgcggaatgagtgatggaatgagacaaacaggacaagccacaacagcaatagggaacgtgttaacgaacattacggtccattggagaatgtggcgagatctaggaaaagatcacgtgacaagtctaattttaggtgatgacaacataataatatctaaaagaccagtggacgttcaaaagcatttgcaattctcaaagaaacatttcaacatggttcaagttgttgaccaaaataaagcaggtgggaaatttttgaggatggttgtgtgtgggaatggtgattatttacaatgtggaccagattatgtgagattacgaaacagattcgaatatacaaacggtcaaccacacgagtgggatcttgcagaagtactagaggccagagcaaaaagctacttgatgatggtggggaaaaaccatgagtcagtggaaatcaacaaaactaaagggtgggatttaccattgaaatattatcatgatgagaccgccactataaatgctacggccgcattgtatggggcaacaaaggatgcagtgttatcagacagagccaggttgctaaattacattcgagacccaacaccatacaaacaccagtgggaacactggacctaccgtccctaaccaattcgcttttcaaaattacggaaacatgtactgtctcatcgacaatacatggtacatccaaccaggtgaatatgacagtgaacatttccacccagactttgaagtgtggccaagtcttaagagattgaagccaaaagggtttggaaaaatttcagtggtagatagaattacagtgtgtacagaatcgattgctagcgtgtccaggattacatttaaaaatttgttatctaatgatgtaggtcgattggttaacaaatacgggcaacttttaaccaacattatacctgggtacacatattactacacgtacaccaactggagaaatgaaaattgtgttcaacagttaagttacacagaagcgaaactgctctttgatcatttgggttctgaattcccttgtgggaaatcaaaaggtcttaaatttacaaaggtgccactggatggatggttggccagctacccgaaatatgaatatgctaaccaaaatgaaatagtaaaatcagggcacaacacagaatttaatatactgagacaagaggggactgcatccaaaaacactacgaactggtgtcttaatgatgattggaacacgatcacagcaaattgtagtaatatatataccgctctaccaatgtatcgcagtaatcctggtataccacactattggactaagtcaatggattcaaatcacataatgataccctgtggttatagagtgcatttcaatgacac

SEQ ID NO: 798 - DNA, 1304 bp, Beijing sediment alphaendornavirus 1
  source 1..1304: mol_type = other DNA
gcacaatttaatgcagttagtacaagattagcttcaactacagaatataggacaatacatttaaataatgatgaagagatcaaattattttataatgcatatggcagacaagattgggaattaatcttagataactttagatctcataatataatgtgggatattaataaaacaaaagaatggttaaataaccatcataattttaaagtagcattagatgaaacaaaaactttattaaaacaaggttggggtgattttcaattagagaaagtcaccgtacataataaagttgaatcagtcactaaagataaactgcaaacaggtaaaacttttaaattaacagatacatcagtgcgtattattgtatggcaacgttattgtattgcagcagtttttagtccaatctttttggaagcaaaagcaagattaaaaacgattttaaaaccgaagattcattatgttgatgggatgacagcaacaactgttgctaaattagtaagaactattaaaggtaagtgtgttttctttgaagatgatttaagtaaacaagataaacaaactgacgcagaaatgatatcactagaaatgggtatctataaaacattaggtgtgaacagtgatattatagatttttggaaacgtacacatagtacatggcgttataaaggactacaattgcatggtaaacaaaaagcgatgagactgacaggacaagtaacaactgcattaggtaatgttatcactaatttaaattgtcacaaaagattaatactgagaaatgaaaattacattgagttagcgttatttttaggtgatgatatcatgttaattaataataattacttagatacagataatttaaaatcagaaattaaacaacattacaatatgttaagtaaagatagtcaagcaaatgttggacagtttatatcatttctgttttgcaattcagataatgggatcatcatgtgtccagatttagtacgattacgtgataaattcgtatcaccaggattgaagcaaaatgatattagcagggaaacacgtatattgtcatatttaactctcattggcaatacaaaccatactaataaaatcgctgaaaatttaggttataaagttgaattaccaacatggcaaaatatttggtcatcatgtgcagcatgtgcttggcgatatgatatgagtattgaagcagtttatgaaacatacttacaattaatgtatatgttgacaagtaaaccaattacaattgagtttactcactggattagtaaaccacttttaagaaatagaaaaaagag

SEQ ID NO: 799 - DNA, 1523 bp, Beijing sediment alphaendornavirus 2
  source 1..1523: mol_type = other DNA
gttacaaaaacaaagtatccaactagaggtagggtggcaatgacgaaagaggcaaatgctttgtacaatgcttttagtacaagacatggtgacaaacaaaatctaaaaacaaggaaactaaacatacctaaagaagtgagaagagtaatgcgagtttattttgacagaaatagaatgtggaaattaatacactttcagaaaaaccctctgtatatacatagaggacgattattagactggttaagtgaaagacctgatggtttaagtgtactaaatgaattacaagaagctatagaacaaggttttgaaggcaatcctattaattccatgaaagtacatgcgaaggtagaagcattattaaaagcagaccctgcttcgtttccagaagaagtacgtgcaagattgattatttggcaaaagaagggaatatgcgccttatatagtccagtcttcaaagaagctaaagtaagacttaaagctatattgaaaaaggaatttatgtatgcagatggaaaaacaatggatgaattgtctgcttacacaagaggattcacaggcgtgacacacttatttgatagtgatttaacagcacaagatcgacaaactcctcatgatgtattagatgtagaatttgaaatatacaaaatacttggagtttctgcagcagtattacaaagttggaggcacgtgcacaacaattggcactataaaggatttgatgtatcaggggaactagatgaaatgagactaacaggccaagctacaacagcacttggtaatttaatagttaatttattagtacatgctaaatttgtagaatacaacataaaacagcatgtattttcgttattactaggtgatgatcacataagtggttttaaacacaaaccagtagtcacattttacagaaacacaatagagaaaaattataacatggtggcaaaatatgaaatcagagaaaacgtatcaatattttgcagattgatggtatataaaacagcagatggtcacatggaagttggtccagattttataaggttgagagataaatttgagacaactcatggaacggctgctgtatcaaaaatgaatttagaaatgcgttctatgtcatattgtatggtgcttggaaaaacaccacaaacaatggaattaattaaaacaaaaaactggccaattgaagttttaaattggtactctttcagtgactgtttaaatgcttgtgccaattattacgatatcagtcaatttgaagtactagatgattatagtaatttactaaaaatgatgaaagatgacagatactacacacacaatgtaacagtaatcactagcacaccatatggcaaaccaaaaagctatgcacaaccataccttgggaagaaaataatattggcaccacctgcttcgggcaaatcatattgagcaaaattgatacaacatggaaagacggtgatgaattgtactttgaaaaacgagtaataaaaagagattttttggctttgagtcaaacagaaagaggc

SEQ ID NO: 800 - DNA, 14714 bp, Bell pepper alphaendornavirus
  source 1..14714: mol_type = other DNA
gtaaaacaaacaaggttttatgactactaagttgtctagaccttttgctttacgtttactgggtggctctcgccccccgaaaactcaaattcttcatgggtgtactggtaacagtatacccatgaagaaattaaataagaaaaacgattgctctgctagaaaagcatttaggcagagcaaatttaaatttaaaataagtaaaaataagacgatatgtccggcagtgatggcacacagactcgaagaggaattagagttcatacaatttggacctgaagagtgtgttccagatttaaacaaagtggacatcagaaccatcagaaacatgatgctgttgtttgaccaagaccattgtcatttggacgtgaccactgaggatgttgtcaaatacctacaacaaagtcaattgcaaagcacagaaccgttttacggtggacctagtaaaatgtactatgccaattgcaggccgatgttactaccaccatcaaaacaagacggcacaaaaactgaagctgcctcaaaattgttgacaggtttgattaaaaagtttggtggcagtgtcattaacatggttctacttgattgtgtaaacaattataacatgaccccacacgtatacaaaataggaaattcgtatggttacaaagccatggaattgccaaatgtagaagcagcgatgacgtgttcgtgttgtggaatcacaaatttggtgtggttattagacgaaactgaaggattgactaagtcaagatgtggagtctgtttgcaaccgctattggttagaacaatgatgcctgaatgcattatgtggggcatgttggaggtgattgatattacacaattgcgagtgggagcaatagagctgaacaatgcagagataaccttgcagctggatggtcagccaccattagcaccagccacattgtcaaaactaattgaccaagatctaaggaatttgcggtcagtcatgtcacgcgctatgagtaaaactatatatgtacctaatgggttaactgaatatcagaaaaaagaattggcaattgttgtgccggcatacaagctattgccaatgtccggaacacccaacccacacgcaatgttggcagctgaaagaagaatttgtgcggttacgatgggtgacaaagtgaaaaaaggcaagaaaattctggacataggaaccaggattaatttgactgggaatgacagctggcatggcatgggtccatgtttggattggagggatgtggaacgctaccacaacagaccactgacagcaaacacttgtgaccacacagtgaaagagtgtggttgtatggatggacaaaaccccttgttaataagtgtggatgccatgtatgacatagaccctactgacgtaatatcattaatgcacagaactggtaccaaccaattgttcttttgccttagtacagcagaggtggatttcgaaaacaccaatgggaaattagcacatggtcagggagaatggatgcggcatgatgataaactaataacagtgttgcgtggtgatgatcgaccttatgtgaacaactggaagttaaccaaattgtggtccaccgcagatttaatacaagctggccatgttgaattgagtgtgcaaacagttaaaacaataggcaatcatattatcagagtagccacattggtgccggatggtatggattgcctacgcactcgacaggtgaattcacaaaatttgacacatttgaacataaccgtgcccatgatagacgtggaaagttggttgaatgtgttgggaccaccaaaaatgtgtcacaaaacaatgaagttggatctggcattgtacagggccctgtattcaagaaacttaactggaggactgtcattcgaaaagttgattgagtttggattgggatatgcacatgcaaagtacacaaccaaaacaacgacaatctcccatcaacatgtaacagcagatgatgttaggatgcacgctttgttggcttgtgcagcgaccagaaggaaatttgcgtgggtgtcttcagcgcttaaattaaataacaactctaatgtatttggtctggatcccattgaggtgacaaaacttttatctttggatttggccggcacactaataacagatttatggcgaaaaatgttaccggatgggttcattaaagccagagttgatgacctagtaacgcaagtgaccaactggataaatgattccttttgggacacattagactcattgagtggacctagcaaagtgttcacacccaacatctatgtgtggcccactactggtcacgaaacggtattgaacaatgaaagaatctgctatcaccatcagcaatggtgtgatcacccaatagctctggacaatctgtgtgaatgttgcagactggtgacttcactacctaattcttctaggtgtgaatgctgtttgaaagacacaaccgcacactcgtgtgaacacaagtgccaaggtgggcatgaaatggttccaactgaattgacacaaaattgcaagtgttgtaagcttaactcgttgaccaatccttgcaaatgttgttctaagaaactagctaaattccccgacagtcaacagcccataggttcagaaatatatgcacaaccacaggtggatatggcaaagaagataaacaattacaaataccaagggttggaaaagataactagctttccaacacacagaactacgactgaacgaccaactgagatcagtgctgaaagattggttccacaatttgagccaactccaaccgcttcatccataatacagttgtggaaaactcaattaggggatagagcaatgagctccaaaccaatcaatgagacacagcaacacctgacagcaacggtcactgatacaaatggtaatgcagaaggcaatgaagagacagcgccaaaagctctaacaagtgcagcaccagatgacaatgagtttaaaacagccattctagagctgacagggttaacagatttcagttatgttagcaatcttcggtacggctacacagaagcagtagcaagccagttggctctgccaaacgaacctaatcctgagaatcgcataggtatgagtgaattaaaatattttccaatgggcatgcatcaacaccaccctgatttgttggttgcaatacacacacagtctgtgggtggagaaggactttgcgcattctacgcgttagaacatgcatgtggaataaaactgtctttggaccacatgcaatcagctttgaattgcaaacaacagttctccactttgcaaataatcaagtacgggaatatgttaggatataacgttgcagtgttaacggaggaaactataataaccggtaaagttgaccctaccactgaccattttgtttgtatactccatacaattgaagcagagacaggcgcaccccactggcaaccatgtaatgtggtacagactgcggacctggagagcaccccttgctacaaaggtttgttcacacaatccaacattaacaaacaactaagtttgatatcagccgaagttcagggagttgagttgacaaaggaattaatcaaaatagtgttgagcttaataaagagagcagttccaaagctatctcaattaaaatttgggcgcgtagaaatgacattgcacaatgaagacgggtcatggaaactgtccaacaataggattaatagacatgaccccggctgcggattgttcaatttttcaattgatgaacgacacacagacctggttgaaagtgtttgtcatgaaacagtaccattgcaagttttagatgatttggagagtccgttgaatgtcggtactatgcacaattgcgatgtggatgaattacgagtgtccctattgcgcaacacagttttgcagttacgacaaacatggctgcaagcaaaaggaattgaaccaaggtcagaagatgcatgggtaaaggtgttcgcgctaacacataagattggccgggatactagattgctaatgttacaacacaccaaagtcaagtcaggagatgtgatttcagtagacaccatgtttggtattcaagatcgtgtaatatggaagttcaatgacggatttcaatgccaagattggttgcctcctactattggaacacaaaccataaaaatttacattaacaaaaggagtttcaaaagtggattaatcaaactaatgacgttgagcagacctcacgtagatttcacacaatttaaacagttggtgctaacatccacatgtgtgatagggccagccggaagtggcaagagtacaatgattgccaacaattgggtcgatggtacaatagcaatagctaagacaacatccgctgttaaaaatttgcaattgaagataggtgggccgaaaaatttggtcatgagtcacgaaaaatatgcattcacccaaaccccgatccacgacctggtgattgatgagtgcagcatgtttacttggtttgacttgtacttttcattaaccgagttaccacgaacgttaactatgtatggggacccccaccaaataagcacaatagatacatttatgctaggaggggagagaatattagacaacataacagattatgtagtcgaaaagaccaatctgagatcaacgttcagatatggggctagtgtgtgtgcactactttctccattggtgggtgaattgtcaagcaaagccaaacatgacacaaaggtggtggatgttaatttagcattgtgggacaatgttgaattgaaagccacaatcaacgaacacaacccagacgtcgtgttaactcaccataacatcaccaaacaacgattaatggcattgtgccccaacaaacgagtggagacaatacattcgttccaatctatggaagcgaatagtgtgctgattgtgcagtacaatgaagggggaaattcaaagatatacatggacaaaaaatacgccatatccgccatcacacgagcaaaactaaaagtagtatgggtaagtgtcgaggtgtcaaaccgaatgaccctgcttgacaagttgcgtggcactgaactagacataattggaggtggtaaacaaccggcggtaacagagcatagcgacacacttcaccaaacattgttggatacgctgcaaggcggaattaatgaggaagaaacaaaacaaccagtgttcccccaacaatctgaagaaacaagcacatcataccacgaaatggctgaagttgaacatcaacatatgagcaaaatattaaatgaaaaagtggtgacaacagcagatatagaaaccatcttagatggttacaatatgaacaagcaaccgttgttgatttacaatgggtgggcggattttgttgagaaatggtcacaaacgttgccgtccaataagaagatggaagtgagagaagacgttgggaccataaaaatatggttatattctctagaaataattgtaacagtggatgaaaatagagagtattacagcttgcaattgaacagccccatgtggttgtcaccaatgaagagcattgtaatggaaaaatacagagcaggacttaatgacgagtggtgcaagcatgcactcggtaagaagtattcaacagtgctagcaaaattacgcccagtacatcgagattggttcaaatcagttttgcattggcagccagagttcgaagtgccaaccactacaaaaatagcagaaacgaaaaacaaccaaaatttgaagcgaattgttgatgtggattctgaaggggacgaatgggaagatgcattgagtgaagatctaccagaagacactcaagccgctttagaggatgccgcattgtcaaatttagaaatgaacagaatattaacggatagacagctgagaaataagtatccatcattagcaaacttaaattatagtcagattggtgcgttgttaaacccggcggcaccaatgctgtatccgatgaaatcaacatcgctaatagcattagtatatgctacattaccaaatgtgaaattaaccacagttgtcaaagagttggacaatggattcgaagttactatgagcacagttgctcaattaatagtaataattgcagtgactggagatggattgttgttggaagttaaaggtggaacactaaaacaaaagatacaagaggcaatcttggagctaagagtcaggtcctacaacgatcttgcaccatatgcaggtgtcaagcaaaatggtagaacgttaacagcaccacaaacgcagttaatacaacagtggtacccatggttgacaaacttggaaaagcgtcagacgagtgacactgccattgaagtccatgatttgatagagaacggtcggtttgacgtgtcaggaaaaatgaatgatttgctaaattccatgcgcgagctgcgttggattttaaaagaacagggtgttgaaacaagtaacgacattgaatatgtgtgcaaagtgtgtgacgatcaatgcatgtactcggacgaagaaatagggcttgaaagcggttgcgtcatgttggaaacatacttgggtccaacggcaacaagaatcttaaggttatgcagtgaatgggctgtcttgcaaagtgatatcggtaagcagtttgtggttaacatacgcggagaacaagtaatgatcatatcattcggtggctgctctctttgcagcggtttgaaatttgtgtgcaataaccaagaaataatgcgaatttccccgcagagaacaatgggcaacgtgagacgattaaggctaaatcactctgcttatcccgcagtgttaaacagtataatgatctcaatgcatatgaataacatggcagttggaaattgcatgaacgacgagccaatttatttagatttgttatccaatgtagacaacgcattgaagtgtccgtggtatgaactaggtatgctgtttgaaaaaataagcattgccccaaagtatttatggagactaattgcagaccgagagtcacaatcagcatgcaaaatgtttgaagatgaaaacaacaatttgttgagtgaaattgcaaaccacataccaaacattgaaatcccaatgatagtgaacacaccaggacataggtcattgaatggtcgtcctttaggtgtaaggtacaaagggataaagtttgcaataatcaaatttaatggtaaatatagttgtgacaaccaattaatggcagcaaggtttgcatggtcatacatacccaccaacgtaatgatagagagatacttttttgtgcgactaaacagttggccatgggttatagctaagttagtaactctcaacggaaaactagcaaacattggcttggggcatgattttgatatgccagtaaactctctaaacttgccactgagctaccatgaatcaaataacacagcagttaatcgatttttggtagagaaaagaggggaggctgtgttgagcaccatgaaaaagacctatcatatagtgttcgtcagcaaaacgcaactacagaattatggacccatgctacaacgtgactgtgaaggaatgccaatagaggaacagggttgcgacacaattgatcaaggttttgacatgttgacagaacagatatgtctcaaatacttttacaatgggttgtcacgaggcgaagtgagccaaatgattacagactatccatacctttcaatattaacgtcaagttgggccaacttttgcaccccgcctgacaaaaaacatgcttttaggtactatcaaaacttgactgactgcaacaacatgatggagaaaatggagcatgcatatggagttggcaagcaaccagcagaaacaagcaaagagaaagagggtagtactagacaagacattatggaatgcgtcaacctgcaattaacagagggaagtggaccttggtacaccaatcaaacccaagatacagcagaaattgtgacgaacaatgtgttgatgggattagtgcagtgtcgattaagtccatgtgagatcgcagaaatgatgacgaaggctaaaaagaagtgtgctcacttgataatgccacaaatgatagagcaaaacaatcagctttttggagtggctagtgaagacgattatcagtacaaattttggtatcataactctagtcatttaacaataataaacaaacaattgttgacaatgttccaaactgggcagtgtgtgtcaacaccacacggtactgtggtgctgcactcttccaacagagtgttggggcattgcatagtaaaggtgttgttgctgccaagctgggctgcattgccaaaatatgtaaggccaaacatacatgacaaccaacaaaaactggtaaaattcaaattgccagatatcaagaactttaagcaattcataacaacaggcaaagcaatatcttacaaagaagtgagtatgtcactaaaactgtatagggcattatcattgagaatgttaagacctggtacaacaatagacgatttattggcttatgctagaacttatagtcacacagtagcatacaccattagctcacgaagctctcagcaaccacaattcgtgacggagctgatggagtgttgcgtttgtgtgtatgtggaaagcatcaagttgaacagtgcagcaactagagtaatggatataatcagcagcacagaacatccaatagataatgtaggcaaaattaaaaatacaatttggttcgctttagttaagatgttggctgaatgttatcactggttagggttggacacgacaatagaaaatttgattgaattgtttgcatctgtgggtaaagaaacagtcggaaatataatcaaaaatgttgaaaaattagtggtagttagaattagtaaggtagacacagccgacccaataatttattatcatgatgacaccgaccaatgcgaaatgtctagaactagcatggatgacactaggagaaaagtgcaacaagtgttgcaacatgttagagaaagcgtacaatggggtgatcaagtgcggaaaaataggaacaatctagtcaaggacaacaacgacaatgtcaaaccaacccctacttcccaattaactgacaaattggcgttgagattgggcaaagatagagatcatgaaattgaaaagttaataccaaatttgatggaatgttatgacagcaacgagatggcaacagcagtcacaagagtcatcaaaaacgtagctaaaaagttggagctaagagaacaacctaatataatttcttgtgtcggagatgagaggtggattagtgaaagcactctgttggaaaaagacaaaatttgtatgaatgattgctttactttggacgatttgagaaaagaaataattgaattacgttggatgtacccagacgagtgtaaaacctgggaaaacaaattagtaatatttagtacaataggtagtagaggggacattgaaccatacatatcttggggccaaatcattagagagttaggggcagagtgcagatttttggtcccaatagattatgtgggttatgtgaatgactttggatttgaagcaatgggtttgcaagtaaattctcatgatttaataaccacttgtatcgaggcggaaagatctaagtggaacccaataaggttatacaaggtgtggaaggaaatgtttgaattgatagaaaatttgttcaagtttaaccacacccaattaatgaaattcaccactggagctgatttgatagtcgaaacaccattcacgcacattggcatgcagctggcccaaaaactgaaaacaccatgccttttcgctacagcgtatccgtgggagcaacaggctggtatgaccaccagagcagacagaatgacagtaatggaaattatagcaggtgtcgcagcctttgcaccattcaagaaacacattcaattgtggagacaaaatatgctgcaattacacaatgagcgtggaataatggtgcacggtgtgggaaaccccatggtgtacttgcatcccaaaacgacaaaatggtgggaaacatccaaaacttcatgctgcgtaggttatgccaatacaatggttgacagagttcaagacggggacaaagacctttgtatatgggcaagccaatataagagcattgcggtgtgttttggttccatgacaggtaaaaccagacaagatttgacatcaaaagtaatagaaaaatttgacaaccagtttagaatagtagttgtggatgggagttacaatttgccagctaacaaaccaaatgttatagctgtaaaggaagcaaactacaatatgctattcagttgtgtggatgtcgtaattacccatggaggcagtgggacaacacacaatgcattgagaaaggactgtgtagtgttgattcaaccacactttggggatcagctagcatggttaaaatcggttgaacggttaaactgtggaggaagcttatcaaaggcattgtcaatgcctgcagataagttaatgcaagagttcgccacttggcaatgtaatgccaaaattgtgggtgcacaaataagatccgagaagttttacgtcaatctggtatccaatagtgtgacactgtggcaaaaagcggcggaacacaccaccaatttgttggccgatgttcgagaaccagtgcagtcattacaattgaacacaagcaacaatgttagtttgttgcggagggcgaaattaaagtggagtgactgggagtcggaagcggcgctaacaacgaaattgattctgaaatcgcacttcaaaccacaatttgagaaaactggtagcagtgcccaactgccaccatcaggtagcgcagacacgagaaggggaggacctagaccacaagtaccacccaaacgcgtgtatgaatacacatatggtgcgccgaaagacacatccagcacaccattagaacaatcagggatagaggtgatagaacgacaggagagaaggatgcaccttggtataaaggaaaccgaacagcaaacaacaccattggagcccagattacagttgctcagtgatgtagcggccacaacagaagaggtaccaattgaactaatagacagctcgtcacaaaccaccgacaacaacgacgattcaaattcttctaaggaggatgataatgttgaaatggacttgcagccaccagaacctgatgaaatagattatgccgagggctttagtgttgaacaaccaccacctgagccaacacaagttgtggaagatgtgccaatgccagagacggtgggtccaccagaaatccaattttcagtagatgcaacaaatgagctgaccagcaactcgatgttattattgaatatgtttgaactcaatccagtaactgattggggacccccaatggaagttgtaactcctggcagaaccagattgttgctagcaccaaaaagccaattcgattgtgcaaaggaagttttgaccatggcaatacaaacacaatatgacatagatgagttgcgagccacaaacatagtgcaaaagtgttaccagtggttaagggtggcatctgtaccaagagtgaacgacctcaaggtaataattcgcatgctggatttaaaattgggattgaagttaccagatagcaacatccgcttcgagcataaaagcccaaccggagacacagggcctgtaatagttgtagtaagtggaaccagtttggggcactgcattttaaaggaagtaagcatactagggtcaaaactgatcaagcaagaaaactgtgtgcaaatggggatcaatcgaaccactgagacgcaactaaacgaactattcgaaagatgtggcggatgtggtgattggaccagacaaaacttgccctcactgattttaaatgaggaaacagcagaaaaagcttgggtcgagttgaacactaattatactagacaagaatttttacacaaactgcagggtacaaatttagtgcacaccgcagacagaatggaacaaccaatatttctagccagatgccaacaaagttggtcagcaatattttgtaatgaaaagattgtaccagatcgttggtactggataaatgacggcacatgttgggacggtgcagtatccgtggaattgaacaaacaaagctttttattaaccaatagcgcagaccgaaattggaaccgagacatagtcacgttcaggacagacatacgcctaggaatagggaaaagtacacaaaagcgcaagccaattaaaaagaaaataataataccaggtgaaagcaaggtcaccgctttgaataggagtaccttgcatgagtcaaccttgaattactacggggtcaccctaactggaatacaggatgagagttgtgatttagtagctgtgttcgagtatgataacagggcacaccataaatatgacgacagagagtttctaactaaattgggtgcagagaaatgtttgggattaggttttgaattaacaagtgaattatggaacaaaataacagctagagttacaccattgcgccacatgattcacaaaggggagcacaaagtggcattggaattctccaaccaagctcagagattaacatttacatctatagcacacagcagcgaaatagattacatcgcagaaggtaacagtgtgtatgtgtcattggctaacctggacaaattaaaagaacaatgcttagaagaatgggccatttatatgggaatgaccaacgggcaagtaccacacatagatgatgtcttatccaagttgtcaaattgggtgccgctaagtgaatttttaagtgaacacggcggtgaagtgaacccaaaccatgtgtttggtaatattaacatagcccaaagtaaaataagattaatagtgaatccagggcgaacaaccatgaaactaacgaacatagtaaaggttgaaatggaatatgacccaccaaaactggttcataggaatatgtgtataacacttgaggtgatgattgacagaagagccggtgggcttgaggaaccagagttttggaagtttgcagacgatttcaagcagaacagtgtgtctcgttggtgggacgcagtaacaatagagaaaccaaaaaccaaatttgatgcaagcagattctcgcagattaacacagaagcattgacgggccatggtgctgacgaagtcaaccagataggaatgataatcaaaggatgtgacaccggtgatgcaaccaaattagcatatcaagcggtgcaggaatggtcaaatgcaatagacactgaacccactactgtagaaatagccagttatgatattatgagtctctgggaagatacagatttttcagattggaatgaaaaattttgtccaagaaatgaagcagtggtaaagtcaaccaatcctgcaactcatttgagagttacaaacaaatacactatggtgcaataccctatttacagcagaccagtattaaccaaagcagcaaatcaagaattcaatgccatcactggtagattgcacaacattacaacctataggagacaaaactacaacgtggataaagagctgcaaaaatttgtggcaacttattttgatgcagacaaagcagacatattgacttcatttgcgcaaaacaagctgacttacaatgatgcaaaagtgttggattggttgagagacagacctgatagtaataaggtagcagtagaactagaagtgatattggaagagggaatgcaactacatgccattaacaggctaaatgtgcacctaaaattggaatcattgttaaaagctgaaccagcaagtagtttaaaacaagtgaaagctagagcgttgttatggcagtgtaaaggttactgtgcaatttttagtcacattttcaaagaggcgaaagtgagactcaagcaaatgttaaaaccaaacattgtttatgctgacggattgagagcagatgagttgtccgcaagagtaagactaaccacaggtgtaaaatatttattagaaaatgacttagcacagcaagacaaacaaactgaccatgaaataattaaatttgaaatggcactgtacaaactgttaggggtgcatgacgatgttataaccttgtggcacaacagtcatttcaattggaaatacaaatccaggacagtaagaggagagggagatgccatgagattgactggtcaagcaactacagctctgggaaatgctataaccaatatgttggtgcatagacgattagttaaccggctcggacataatctaagattgtttttaattttaggagatgatggtctcatgtttaccaatacgagcatagatctcagtcgactaaacaatgagacaaagatcaaacacaatatgatgtgtaaaccacacgttagcaacacatacggagtgttttgttgcatgatcgcatgcataacacaacaaggtaattgctcactgggtccagatgtagtgcgcttacgacggcggttcgaatgccccaatggggtaagtgaaaccacatctgaaaatgcattagctagagcaatgtcatattacatgatgctgggtgcaactccagaagttatgaatgaagtaaaggttcagaatttgccaattcaaccggtcaaatggtatgacgtggatagcataaggtcagcagtcgctgagaaatataacatgagcgatgaagaggtcataaacgaagagcggcagcttttaaaaatgttaagagaaaggcagtactttaagcacgaagtgcttcactggtttgaaggaatttaaagccaggttaacaacaaaatttgagttttcggggagggag

SEQ ID NO: 801 - DNA, 220 bp, Cucumis melo alphaendornavirus
  source 1..220: mol_type = other DNA
ggtaatggcttcattccccattacgtgtagtaatcctagtactttgtataccgtttcgagggagagacctcctttttggaggtctctccttaagaaactaaaactaaagatgaaatataaagattataaacccattaaaaaggtagtaaagccttctgtagtaaagagagaattttctaacaaactacaggggtggatcaaattacctagaaattgtaga

SEQ ID NO: 802 - DNA, 13889 bp, Dicrocoelium alphaendornavirus
  source 1..13889: mol_type = other DNA
catctctgctagctattgtttgctttaggatgtgccatatacctwccccctttatacaaatttacgtttgaaattatctttcctcaaccaaattagctaagaagttggwgttaattgctctttcccttggttttttcgctagattgtcacagatcatcattttcatctcatagataattggttcccttctggcaagcatatccaacaaatctgcaatgtcttgttcaatcaaagatgtactacaaccctcatatatcgagtttgccagaattgaagtactggtgtcgtaccatactggtaagttgacttgttcatttatttgctttgcaatacagtgcgcttctttgaagccactcatcacatgacaatatgataaagttctttgttcaattttgtcttgcatcaccttctctgagtagctataatttgtcagactatacctgttttttaaccgcctgaatcttggtactattttagggtgtttatccaaagtgtgtaatatcattgataggaaaccaccaaccctgtccttttgagacaccttagtcaccatattgtaaatttgcttagtaatggtaccatgctgagatacgtcaatcatgccagcggcagtcattataagatcatcaccaagtatcattatacacccaatattgttataattttttgatacaagatgattatgcacgaaaagattggtgatggcattaccgattgcagttgtagtttgaccagttaacctcatagcatccccagtaccacttatcattctacctttccatgaccagttataatgacattgtctgtaaaatttcaaaatacctttatccagacccaataattcatatatcttaaattcacaacttattaaagatctagttgtttggcaatcttgagcactcatatcatcctcaataactttcggttgggatgggatggtttctaatttagcattcatctgttctactgtcattccatcaacatagatcacatggtttttcaatagtaactgtaatcgtttctttgcttcctggaaaattggtccaaagatacaggcttttgcgtaagacatgtgaattatggatcttgagacgacttcatcataccacctactgatcttatccatttttgtaacttgttcaactttcccatggactgcatatttgttgattggattgcgttcccaacccatttcccacagatccttgatactctccaacacatctttactatacttatgttcaatacaccatttataggatgcctccacatcgaagctaattgcgtttcctttgaacattggaatgtaatgtttacacctgttataatcaaaataattcaagcaaaacaattctacttcagtgtcgatgttcaatttggtagtttgcaggatccggtaacttgcttgtctattcgcaaaactattgaattcttcaaaaaccatgtctaccaaactgggtctagcaatacaagggttagcgaccatagcaataaaacgtttcgttgcataggtgtttgcaaacaaactacatttgattgccattctgtgatttcttggtaaaatacattgatttagtggattttcattattgtcccagtaatcaatagttttagcatccggcatccaacttgtgccacatctcgtgcctaratcaagttctagtccyttgtttttgtacacttctatacatgtagtctcgatagtctgttcactgtgttcatacactatttcactcaatgtattcatggaaaatattaaatctactaaggtttttggtggtcgaaaattcagttcgttccgttcaacgacgtctacggcyaaatttrtattatagtttaactcatcctcatgtttattcttacaatgcatactgaatccsgcagattctatgtagtctcttggacygggtactggatgatatttaccatgagttacctctttcagagccatragyattccactccctgatactacaattcgcaacaccatgaagtttttataggttacaagaacatctccaattggcatgattttattcgtccttaatgttactaattgtctacctgtcaaagatatttgatgattatcatctttctctaattctgtcgtaattgggtcaccattgtgtgatttcaaccaagattcagtcatgtgtctcacccagaacacatccatttccaatttttccaaccatgtcctcaatgtgtatctagtaccatcttcgaaatgtaatttaccatccaccccactgtatttatattcatctctattgtcggtggttactggaatcaataactcttcaacctgttgtcgaagttctctaattttcggatcgactactaacaagttagtgtcatgtagtaagtaacattgtgctaaagatttcatgaagcgtattgtgcagttttgtgcaaaaacatcttgcactaactccagaccaattttgaactctcctagtaacactaatccttttaagatatgattttgtttcaaatagttcttttcgtagtatgtgatgtcatttggcaccacaattaggttaccactgttgattattatctctttctcattgcgatctggtagaactcggttgtatgtattatgtatgtataatgtgtggactgattctttagcaatgacgttcactggcactccgttggcacgacaatacctcaaagtactattgtttaaacaagcagtgcttgcatgttggattaatggaattattttataggggatatccaaaggtaagttgtctaagtatagtaataaattaacttgcactgcatcatagatgccgtgatatatcactcctctgttagtggcgttgttcaacaatgttacaccaaaacatattcctttatctgttatcattgctactaatttgttaattggcaaatcaaaattacataacacacctcctttaacgtaatgagcattttctatcacttgtaaactatgacactttttcattagcatctcaccgaagtgggttcggtatgtgttgaataatgagtgaaaaatagggttgaaagttgagtatgatctgctggaagtattacctttcgtcaataactctttcaatgttctgaaataacttagagtttctttcactttaccatccagactacaatcaatccaattataatgcaacaagtcagttgacaattttgtatcactaatagaacattcactgcaatgagttagatccacatcaatagagatgtatccaattacatttgatgtgctggtcttatgtactatttcatagcagtacccatggtatactacacaaatccgtaattgtgtgcaaattatgaagcatatcagattttcaaaactatccaatcctatgttagctttgaatacttcatatattcgtttggtgcggttatgatgctcgaacattgaatgtttatctagaatgtctaacaagcatagaagtacacaatctttcacataagtattgccaattatttcaatattagtgatataggtcttcacaatcttaatttcatcattgagtttaacgtcgacactaaacatattagaatctatcaattctggtaaattgaccgttattatttctgatggttttggtgggggtaatcctagtgtttctcgcacccgtctattgaattcattatagttgtacgacacatcacatcttaaactgtgtaggaccttcgagtatgctttctcgttgtgtggttggtccacaccgaacccttctatgtgctgtttaacatttccgaacatacaggtaaacatagtaccagctccaccatggtggtaaacttcagtgatcagtttaattatcaacatgaaatttaatcgttgtgttacataaatgtgttcagtgaccaaattttctttcaacactatcaactgattattgtgttccaccatacgaccatagacccagtcattacctccaactacaattacgaaattgtcatctggtctttcatatagcacttcttgcagtcgggtcaaaaatcgctcggtgtagacactactatatgtgtataaaatatattttttattatataggatacagtgttcaatgaatcttccggtaattggatccattttgaaatcctcttcatataatggccatcctaaatttggtccatcaatcaaggatgccatttctgttggtaatgtgtatgctctcaatactttactaggtcctgttatttcacccatgattgtttttgaccatgtaaaatgctcaattttcttaccaagactaaattgtggtatgatatacaatcgtaaacgagtgcattttaagcactgcaattccattgaaaagaacaaacccactgttacgtcatatgctgtatggggaaactctttcatagctttaattattggtaacactacttcatgcactttaccaggttccctcagtgcagttctagtaattgtttcataggtatcaatataattaatgatttcatcattaaagaattcccaatttaagtcacctggtttgaaaattgtaacattgtaataatctctcaatattcggtaaattacgtacagtggtctgtggtcccctactgagccagtaaaaacgaatgcagctcttggttttctgcgttcacctgggggtaactctataatcacatctctactagctattgtttgctttaggatgtctgaaacattcatgattgaagttgtactaccggatgcttttggctcagtattgttagtccattgttttcttaactttttcggtacatttctttttttctttggcacatcaactgttactttttgcatgattggtggaaaatgctcttcgtatttcatcttaaactgactattatatatgtctttagtattgtctgtattcttgatgtcatccactattttagttaaactgtccttcacaactayagttattgttttcatcaacccttgtttaaccttattttcgattcttccttcatcagtgttttcacataactgatcacttattatcgtttgatccacattcgcttgttcagtacagggtatgtactttctcacatcagttaggtaattccaatgctttcgtggtatgcgtcttctcaataactctcttattataatacaccctctaccttccatccccattttggattcacgcggcagggttgaaaatagttcggagtcggaacattcgtgaattcgactatatatcatatcaggtggtatgtctgggcattcatcacttgtgcattctttcgggtatacagcgagtgtgtccatctgatctgtcaatttactaatgtcacgtaaagggacttcaccaattttcttaaattcttgagccatttgtaaatcatactcatttacgtttacctctgtgataattggtagagagttcattggtatcacactatgatcagttctacttaccttttcgaacaacttctccgttaaattgattgttgcatcattacgcaccactgaatctctttcataattcaggaattctggaaagtcactcattggtagtttataccaccctgactgggttatttcacctgtgaattgttccaagttaaaatcggctccaattgtagggacttcgcagctaaacatttttggttctggtgaattgaagtgcattctggttaatgtggtaatttcatttacatatttgaaactaggtgattgtggtgttccattgacaacatttgacatcggatccgtttctatcggttgatcttcgatgtcagcatattcctcgactggttgggtgactattaggttggtatcggttggcattgcactcaattgttcttcacacacttcaagattcttctcaaagttcacataggtagtagtgtctgttccatggtctgtccacaaactacatttattaattatcttgggatctgtgtttccatccctggtcccctcagaatctgaatttaatttatcagattggggagtactacactttggaacatccgcttcgacgttatcttcttgttcgtctttagaatcagtgttagagttgtcatcatcaggaccgtcatcaccaaaatggaatgagtcatgtgtaacctcctctggcgcgttcaaaccaatcaaagtaccatgttgtgggacgatagtgaactcaacatcagtgatgcagtccaagaaagttgatgttatttcggattttctcaccatttcatccacaccatcaaggattcgcttcagaatgttgtgaccaccttgtgctaataattgaaagatacttgagattgtcgttgatttcaaccatcctaaaataccggtatctgatatgccatcattgcccatcaatctctcggccattccggctatcttccggttccgttttgttatgttgagacacactatggcaatcatgtatatatcatgagggttaatttcatcacatatagagataccacttgaagtgtacaaattagtgcttgcttgagttcttaggtatgctactagatcattcaaatcgcatttgtcatacgaagctttcgccattgctttatgaaaagttttctctgaaacaacaacagttccatattttccaagagtatccgctaaaactaactccccacttaatatgtgataattttctatccatttataatgttgtttacgagtagctttacataatttaaatgggccaattgtactaatgacagtatggtctacattggtttctcttaattccctaccattatcaccaattagcatcttgttattattaatttccacgacatatggtggatatagttctgcggtcacaaagaaaacgttttcatttttcaactcaactggcactcctaatccgtagaagtggttggttgaaaatgtcttttcatcagttacatgaatagcctcagtttgcaaatactgcaatcgctctttcaattcacttggtggattatccaagtcatcaatttgtttcattacagcttctaatttgtgcgccagaacttcattaatgatatggacctcatcattgtgtatttcctccagtaataatctgtgattctcatgtccttggtttacaactgtaattgcatccactccgtgtatgcataacttgtcaacattgaacactttgtataactcattcaagaagatcccatgaatcagggatgcaatagtgtcatccctaattccacttgtacaagtgataattttttgctcgtcaaaaatgaatttatcaataaaagctttatggcgaggtattaaagcgtgaggatggatcactttaattgatcctttttcttccgcagtatacttcctctttaatatttcgtcggccttcagtctatttttcaaactcatttgtggttcatccactccacttatgtcaccaagtaattgaaagagatcattcgctcttgtgataaatttattatgtggtttcactagaaatccatcatcttcaaccataacaaaaaatttaagctttgtgtggttcacattcttcatctgcattccagtattttcttcaaactgtttagctagtggtgtacaaagattgttataagttgtactgaaatccggtttagaacaagacataatcgcattacttaaggtgtcaccaccatagattagtctacctaacaattttttcaaaaagtaagttccttgtactgtggaccaataactactattgttcagtatgtcaatgaactcatttattctgtgttgttttccatgtaaacatctcaaatgtccgctcatataactcatcagactaaatttacttgtgtgtgcactactgattgttactatatcattgttgtcccaccgtatgactgctccactaaagaaacaacaaccagattgtcgttcaagggtgaattttgatttattgaattcaaaaggaattttcaagtgactacattcacaatggagagcgcactcacacagtagtgttagcctctcccattccaccaaagataatgggtatgttaccatcaccacattgtcagtacccaagttattttctatagttaccacccctttcttacaatttagrtcttgtaagtttacgcccgacattgattctaaaattgaatcccagttaaatgttgttgaatctgatcttgatgacaccgctgcgccgatgatattgcccatcacttcagaacgctcaacaacggagtcatcaacatagttgtgtaattgcaccacagtattgttgaatttcagcaacaatccttcatcatcccactccattgaatcatcactttgttcatctttttctaatggaagaactttgggatcccaattctgtgcatctgtaaacggtttgagcggcatttgtggttyagytggatcttcactgrtggccatatcattaatttcgactygatcaacgaagggttttccaagcacttttccgtgtattgcatcgtatacatccccttcatcagatatcaaacgctttgatttccttgagaatgacatccttttacttaactttttccaacttgatttgaatgattcaaatcgtttactcttactactagcatgatcgccattacttttgtcatggaggatgaggccctcaaattyttcaccgaggtcaccgtcgtggcactcagattgattaatcattgtttctatgaccatggttgcagaattgtcttgatccagagtttgagttgctacgtcttttgccacttctaactcctcactttgaaacactgtaccatcattgttaactacagagcaacgcactctactggttttaaacaaccattcaatgaatttatctctgtaaatttcatcatccatagctttatcatacaaatgcaacacatgggaagttatgatatttgatttaccacttatgtctagtggttgattgttacgagttactgtcactccagacattgttacttcaaatttaatcatcgttgctgctggtctgaaacctagaaaacttggagtgagattggttttcccgccaaatttgtcattgtaaacataaatatcttcaatgttatctaattctagtcctcttctgataatttctctttctagtgaattcattttgtatttcaatttcaaactgtaccaatctatccacggtgggtatgttttccgccttttcagactttgcactagatcattgtattcttgttcaggaatcacctcattaattaaattgtcattaacttctttcacaccagatccagaaattaaactaagatctattaaatcttgtactgtagatacctctttttgatttgagataaaaacgatcagttcactcgcacgggtcatggcagttactaagtactctcgtttgtttattatactatgtgttgaactagaatcttcgaaatgcactataccaacccgtttcccttcagtaccttggtcggcatgtactttcagcaatcttacatttgattctccaaataaagtcttgagaatgttgaaatgcctattgtaataacagtaaaccgtatcaattttgtgctcagaaactaattttactacactttgtaaattatcacacttcaatatttgacactctgttttccggttcgggtttccggtgatatctggataaagttggttaaggtactttgatactagtggatcaccgaatctgtgagactgagttaactgtctattatctttgaaattcaatgtcaaaatactctttctctctctaactcccggagtgtcaaagaaatctacatttgagacttgcaaagggtcaccacaggcaatgatctgcatatcacaattatgacacatcatgcacagctctaattccgagaccaatgatgcctcgtcaataattaaacatttaacagacactggtacgtgttccatgctcatgaacctttcaacagatcccacaaaagctgctgtggtaccaatgaactgctggtaaccactagataatttgcaaaccacggcacatgtctctttcctctgttgtataatggactttatcagtctggttttaccactaccagctacaccaaccaccttcatatgtagcgtacaggtttcataacgtcgtagacgatctttatagtttgaataagtcaacagagctctcattattgaaccaaaagactctttcagcacaccaatttcgatgacatctttgccacatacattatttaccatcaacaaatgattgtgtcgatacactgtattcttagtgattgatttgtcgatgtgttttaataataaataatctcctgcctttatcattggtggtaactctccgggattgaagattattgggttgttcctcttactaatgggtttccaatatctaatatcattatcgttataaccttcgcacattatttggtgaattcgccgacagtataattttatatttccaaacaattcctcttccactgttgtggtactattaaaagttacaacagtaccaactatacttgggtcaagatgtctataattgaaactcttcatgacggtgtcacccagtaagtgaactggccatttaaagttgtaataaccatcaattggtctgtggatttttgaattagttatgaacaagttggtgtcattaccaacaacttggaagtcatcaccyggacayagaacattctctgaattgaatttatggattaaactcgcaattttatgtctgtaagttttcaattcgtcctcggaacaaataagtgtattaaaatgactaatttgaggagcaaattcacatagatctttatcatcccacactccctgtagtttatcattggttattaatgatttgtccaaattgaataaactccaatgatttacattttggttatcctcaattgcactaccatgacatatcgtcatgtatcggtctgtcatgggacctttccttactatgtgcattgtattattaacggcgtacatgcaatttaagtgcaaattactacaaatgatatttaggtcattctcatcatgagttgatttgtcaccaactaactcaatcaaatcatttaactcatacggacattgcttgatgatgcaatgaagtaagcaatttttctgcactagtattggatccgagatatctgtctttaacaattttcgaggtaatgggaacattatgtgactggttgttgctaaattcgggatgaataattccccatccaactgtacgaataaatcacaagtgggtttggatctcaatgcaattaacgaagggcacttgaattccccactctcacttataattttcccaactttcttcccggtgaaaattttctttgtgagttcttttgctttctttgtgaaatccgctgtggctttcttaactatcctatgagcaacatttattgggcgcaaattgtcaacaccattattaattaccacggcttcgactgggagtactgattttggcgcttccaagcaacattcacataattcctcgcaaccccgtacaccacaacacacgcatgttgtccaatgtgtgcaactattagttttttgtttaatgatacatctgtggtctttcacacatgggtggtgacatttgtgtttttgagtgtgtctggaaatacaacaagaacagataccagagtcgttagctatttgttgttgacaacatcgacatcgtgtggttgtattttgatgttgacaatttagggagtgatggtaacaacttgccaatgttgatggattttgagcaagttgtactaggtcatctctwccaattccatcaatcaacacatatggcattattgtcttcaaatcaacatctactttggatgagatagtcgcaagatcgcgtctaaacagtaattgcaattgctcttccaagaagtcacaaacatgttcataaattgtcggtttaagtttcttaaataaaagaacacaccttgaaactatgaattgtatcatttcttttaaagaattattggcatcaaagttactcaagcaatgcaatctcatcaaactcactagtttacgtttgtcatttaaaatcaacatcacaaaaattagttctgggatcccatcttgaattttgatgtttgaaagttccacaaactttccacccacaacataacttgtgttggataatcctgctatataacttagcatggattccacagatttttgcccactaatgcagtgtattaacaaacgatgcacaagttgtacatttaattcctgatacacccagttatcaccaaaaacccctaaacacttcaacattctgtcagttgaaaaagtgggaagtttcacattaattgtcgatttaccaacaattaaccgacagtgagataagtctttcgtttttaatactcgtactagctggtgataagctgtggattttaatgtttcaattctataatattcatcgttcatttccacaatcgcgtgattggcaattaatcttgtgtaatgtccgtgccacatcaccaatctgtcactcccagtcacgggagtgacatagttgtcattcacgtgatcctcaatcataccacagtttttcggatttggtaataatacaactatattatcaccaattagttcactccattccacatgagtgtgtaaaggccgaagtaccattttaccttctccttcatcattcaccaaagtgtcaccacataactcgtcaaaccaaggattagtgaacaagcaatggcatacatctttaaatgagtggtaaacgttaatactggttggttccagtaccagcgaactaccacatactaataaccaactattacatattaagatttcagatacctcatgagcgtaatatcgctcagcactgattggttgattacctaagtaatttaattcactaaccattgggtcaatattattcagtctatcaaaggacataacaaatctgttattaatgtagaattggttttgacggtttagaaagacagcaatgcttctgttctctaaattaattttcgtctgacatgcatttggtagataagcgggggggggtttgtcttgatayaaacaggccattaattcctttaattcattaccttgaactgcatactcatcaattactttcggyaacactgggtcaattatacatgttaacaactcrgtaatgtcactaccacaattaaaacaattgcctccatcttgtcctgataaaccacatagtaaactcgcacataactcaaattcaggtggtaagttcctcataattggggtcattgcgtcgtaagtgtaatcatcctctggtgggattggagcgaacattatgttattaattagtgtgcatatcatttctttggatacgttcaaatcctcaggtaacgcattcgatccttgcatatatgtgatactatcacatttcctacatttgatatagatacctttatcaaagtacgctacaccgtcaaccgttttcggtgtgtacactacatcatctatgagatttgctctgtatgacatacaggcacatatgtctcttctatgaggatcatactttgatgcttcatgtcttatatattgtctaaattgttgtgtgtatttacgaacactgtattttctatctgataaaggaggtacttccgggaactgtggataacctttatgactggtaattgccattgacttgtcatattccggtttgaaaggtccatccacttcaagtggtactttgccaaaccaaatagcactgatatttgacataccgatgcatttgcagttccaagctgcaccaaccggttcgttatggaataacaactccatataattatctgttttgtatctacaatgcttgagggttaattttggaatatctgttgactgcaatccaacttgatacatacagacatcttttgcatgtatcctcttttttgtataaagggagcgccccaggaggggggcgcggtgggagattgcaagtggcaataccatcggt

SEQ ID NO: 803 - DNA, 11907 bp, Erysiphe cichoracearum alphaendornavirus
  source 1..11907: mol_type = other DNA
tgaattgaagcaatgacgccccgccagtctcagaagtcacgacaaagaaatacaacaatacatagcggacgtcgccgtaatggcggcgcccgcaatgaaattaaattaaagaccctcatgctgtttcaacacggcgtgcaagggtctcatgatataccacccatcacgatgaaacaaacgttgaagggtgataatcaatatattgacacgtacttagcagattgcaatgacgtcgtcaataccaaaagactgggtatttccggtgttatcaacatataccactcgaaagctacttatccagtatgtgaaccttatagtagcatgacatttaatggcaacactagtcacgtccgtgacggcaagtattacattgatgattaccatggggaagtgcaagatttgtgtagtttcgaaaaatatcgcgcagatttgctacgagatatacgaagcagcaagaaaactcatggcaccaaaaagaaaatggagctgatcaattggctaacagataagtccactgctttcccatatggcaacatggctcaaaaacgtgatggatttttagagttgttagatggttactacattaaatgcgcacactgtgattgtttgacgtacctaccattatccacacttataaacccaaatgttactaaagcccaattaacgcaattcctgcgtgatttctccactcaaaaagctgaattcttcccagatgcagaaatctacggcgagttggctatgatggtgcccatgtgtttctcatcatcatcgggttcttgtttcaattgtgatgaggatttgttcagtgaaacaataaatatgatgcatgcaatttatactgaatcaatcgcgtaccacaatactattcgaggcacccatatagaagagatgacaaaactgaatatgctgcagggtgcgccacccgatgatatgccagttgcaacagctaaatacaacgaacttcacaaccggcatgctgccaaagcattggcgaagatgaatatcaatcacatcaataccatttactctttgaatgactccacacgcctagaaatgatgcacgccagagcacacactagaataactaacactgccaggatgaacactaccccaatgtcaatactagagagtgaggaaattttattggtaagcgacctagcaagtgccactgctggcaacctagttcatcaccccaccaccatcacaactaatgcatccttgcgtgatatagttgacaccgtttgcaatggtccatattttgcagacacaggtgtcactattgacataccgactgctgcagctgattacctagaaattataccagcgcagcacgatatggacaaaatgctcaattacgctgctagtggtgcatacgttatgctaattcgcccggatgtgcacaacgtgatagtcaagcaagattccaagtactactataccctagcaacaggtactgatgtaccagtaaaatgggacatcagaacacacgcattactcagcaattgcgctaagctacacgatggtcaaaaccactacaatatacatactatcagtcatggtgcgtatctgcaaattattaaattggagttatccgactcaagtatgcatgctcgcacgctaggtaatcaacccacattcaccgcttccattccagttttcgaccctcttaatccacttgcatcgctcggagtgtttggtacgaaatgggaatatagacaaataaacgtagagctactgcgtagattagtcacattcgcgctgacagcggacaaatctccaggggcgattgaggcatactacgcaggtatactcagcacccattacaccataggcggtaaagtggtagatctaagtaacacaccggtgtctgaaggtgtgcctgaaataatatatgctatgatgatactcagcaatcgcaagctggttaccatgtgggctagtatactacatttgaataattattccagtgtgaatggcctaaagacaatcaccaacttcttcctgagcagattaatccgcgtcgcagtccagcttgccgacaaggtattgccgtggttcgaaggagttctttccaagccaagtgaattcgctaaaaggttagtcaacacggaagagcgtatagacgtcgaaagtgtattcgcaaaacttctaccactattgatcattacgtcagtaaatgatactcaaaacccagccaaaccagccatttcagtatcagagagtgctgtctgccaccatcacacatcagaatgtaatcatcaagttggtgatgttagatgtatatgttgtggagtcctcaatatgaattcaatatgcgaatgctgtgctaagcacaccaagtgcaggcattcctgtaaccacgcgtgtactaataaactacacatctgtaaaaaatgtgccaatggcgagcgatgtgtcatgcgcgcacgatgcccgtgctgcaatgtgtatggttgtattccgtgccccatctgcccgcaattggagaagtttgaagtgtccgacgttcaacccacaaccgccatgtcacttgttaccaaagttgcacatcgcaccatgaaggtacccgaatcacacagaagaccagtacaaaccacaccagccatatctaggcccaacttaggtaatgatgcattgataaacttggcaaagtcacaagccgtgttcaagccaagtgacaccaaacacatgttgcacactgactacatgaatattaacaaacctaatcacttgtttgtcattgaccactctgatttgtacattcctatgctaagtttcactgggcaatactacgtgcccatcaatttacctacaccagtggtgtccaatccaatacctggcacacattactgcgcgtatgcatgcatagcagaccaaactaataacactattgaatcgctcaaaaatatgcatggggatagacacagtatggatgcgcaagaactgcgacacttaattaaactacttggactcaactgcctacttctgttgaatagtaggactgctgaaatattgcggtatgggcctcaggcatcgaagtacctcctcattgcacatggttccatcacagcagaggtaccacataatcattggttcgtaccacacatacctgaatttgtagacatgccaactggttactatggcccacataatttgggtcaaccgtttgaagatatgtcacaattgaacatgtggaaggcatctacgctggaaatgggtcgtatcaacaagaaaatatccgttatgcgccggcaattacagcataacaaacctggcgccacattagaattgcccagagtaacgttgataggcaatagctactatctgactaacggtaagacccacgagccacggattggcaatatacactttatgcttcccccaatgttcgatgaggagttagtggaggcagttaatggctccagctcgaagttagtcaaatcattatatgccaatcagaccaatgaatgggaacaagtagaaacagatgcaataaacttgctcaaactaaagtgctgtgatataaacaatttccttaccagtataaatgatgttgaagaccagaataagtgcactaggcatgtgattgattcagatgaaccgttcgtgcctacgcatgtactaggtaaactgaaaccactagacgtggtgcgcatcgtgcaaggtagtcagagcacgacgattatcgtcgctggtgaagccgcacaaccggtagtgtgcaatccatacggtgccggtgccatgttgtaccagttcaaagttagtctttcatcattgtatcgctctttaataatggtcacgaaggctatttccaatttggataatgtaaagaccatgaagtttggtcgcgtggttgatggtgtggctggttctggtaaatccacactcatcaagtcatttcccaatcgggaaaaaaccacgctagtttgcaaaacaaggtctgcaatggaaagtcacattgatagtggtttccactcgcgcatgaccatggaagcagcagggctttcagaaatcatcactagcaccctcgtcattgacgaagcgtctatgataaccaacgttgaactattgtcctgtctggacagcccacacatgcaagttcacatgttaggtgacagttatcaaatcggtgtgaaagacatgtccagtgtgttaggctcacgcgacgagaatagcctgttggcgcaactaaaaaacgaagctctcacgcacacctatcgattcggccaaccgcttgtggatactatgctgaagcagtttgtgcctaacattacctgccagcccgacgtcacaactaaattaactcacctgacagcagacaattatgacaaagtgctgcaatactgttcagatcacaacgtcaatgcagtgtacgtatttatgcacgccgattacttgcaactcatgcacttggttggtgataaactttcaatcaataaagtacatgcatcacaaggtaaagagtttgatacagttttggtgctacattggggtaatttctcacaagaaacttcaattgtgagatcatctaaattcatttttaccgcagctacccgtgctcgtaaacaccttatttgggtaacacctcccgccgtaaaaatatctctgagcagcatattagacatagcctacattggtagcggctacgccgatgtatcagtgttcgacgtggatagatgcgccctaacacgcaatttgaccaaactggaaatggagctactcggagagatgttacccaaccacccaactgcaaaagagtcgaacagcaaattcgttattaaaccacattgtatcaacgttaccgcgctaggcccacccatactcaataaacggccaacagtatcattcgtggtagataaatcaggcacttatggtacaaataccgtggcacgcatgggcatagaaaagatcaagtccggaatacggaagcatttcccctctagcttcgctaagttacaagctgaaatacaatcgattgagaaccctgttgacatcacaacgcccactgaaacgagcgaaatgtttagcaagatgaccctatcaccaaatgatgctccaagttcagacacaacagacatagaacacctaaaacccaagacatcttttacacaattacgagagcccactatactaagtaatggtagtgaaacatcatcttctgaagattcgttgaaccaattggcggcagaagaacgcaccagccacacaaacccatcgcttttaacagctcaattaaattacatggtgtcaaacttgaaccacaaagccaaagaacaagctgggcaggtccttggcaatgtattggtcgacactgatgatcaccacacaactgcaccgtatatcaacgatagattctcatttggtacgccaacacctattgtggttaaacaaatacatttaaacagcgaattgtggtccagaatgattgtgctagcggatgtggtgcttgcctaccaatgcacgaatgcagcaatcacttggaaagttgacaactcgattttcaaactatccatacacaatggttgctcactgtactgcgggtttaaattcgagttcgaaacagaaacggtcctcattagttcagctcatgccgacgatagtcgagatggagcactcactacgttgaacgcctgcaaccgtcatattgttggtactacaaccgcaatagttaaagtactttcattcttctctgacaactctatctttgggcctgtgtccagaaatgtatgcatgaagacatacagagagaggttgagtaacatatttactgctgtgatctcaaattgcacttttgactcagttggtgaacgattcggcaatagaaatgaggagattgctcaatcatgtattgattactctgacagttggtgcgtacctacgcaccagagcatgacgcacttcatagtgaattcagatactggcgttactctccaacctgctaatataacagttaccggtgtgcatgcattaatcaggatgttctcaggtatacgcggtgaggatgcagtgttcacactcaatcgtgccaacaaagcgacgctggatcgcacactgatacggcacatgaatgcagaagaaaaatttgataggccggtaagcatacccacgcaattaatgcgcagtgagttatgggccccgttcctgcaacaagtcggttcaaatgtgatcacaccggttgccctaggagtaactagcatatccacaatacatggtgcaatgttacttggtggtgccatgctaaaacaaatgttcggtactgacactatgcattatgttggtttaaatgcacaacttttcacaatcaactataacattggtgacactattgagaaagtaccaggggatggcatgatttacatcaaaaatatgttgaaagctaaggttaagagttacacacagcaactagaggtagaatctgacccaagcaaaaaagaacaactgctatcagatataaatttcctgggtgatataaataatgtcttacgcagcaccattcgtggcgttgtgatctgccatccgccatactatgatgcatatgctggtgataattgttacacatgttatccacacacaacatatccgacttgcttgctagtgaaaggcaacttaatagaatcttccgaagatggtactaaattttcagtggatatatcccacaccgtaatcatgggtgtagtcggttcctattatttacacaagaaagtgaccaatttaccaagtctaacagtgcaagcatccgaactagccaacccaaattatagagtattcgctagtaacgttgctggcatggaaacggttaaaatcccagacgccatctttagaaggatggttgctagggcattcgcagagcgtgatacgacgctaccggacatggttgcatatagcaggtcactattgaacaccatgacgtacacttccaagggttattcattcagatacaatgacaatccgctggaacttttgcagtacagtgttgtagttttgaatttcgcaaataggcagcgtaagttaacctcgttcgttggtgccgtattaggtgcatcagctgatgataatagtaataacatcgctagtccaataatcactctattaacggaagcacttaagaccatcggtttacaggtggctcaaggtgtgttcgagcaaccacttgccatactccacgagatgttgacaagaggtacaattaatacacccatagtgtccgatgtgtttgctgtgctccgcgacgccaattaccaagagatattcccaagtgttaggttgattcaacggcatcacactgacacagagtccactatggtggttagtccgcagcacccaggcatggtgacgcaagaggaagtggatgaggtgattggtgaaatgccgaccagtgccacgctaccctccggcttgtctcaattagtgcaacccgttgtgtccaaattcaagaaggacgtggcgcaagtaactacccaaagtcaagtagagattatacgtaacacgagcaataaactgatcaacacttggtatgacatgcgagacgcgtggaataaatacgtcaagaacgatgacaaattccagccatgggaatttgatgcaccaattggtgatgttctattgttatacgcaggtagtcgtggtgacgcacaaccactagataccatagccgagattgcagtgaagtgtggcttgagcgttaaagcactaatcccggcagatttacattcccgcatacccggggtcacttacgtagaatactgttcatcttatgatcacctaaccaatagtggagtaaatggcacactacctgatgtgggtgagttcgctaaacatgcgatggatgtgtatcaacattggctaattgagcacatgaaacaccgtatagttattggtctattcttttctagtgaagctaaccttgtgcacggtacagaaaagaatatcagaataattccgcaactggatgatgagtgggacggcaacaagaaatgtgcgcatggtatgggcagcaatagcatcagggctctgttccaattaccacaacctaaattgacatcgtactgggcggtgccgtttgatgtattagatcgtgcagacaacttaggtttccttataccacagtatagcttaagcatcgataacaatactgatatggcattgcgattcagtaagaagcacaatggtaaggttcgcgtgatcactcttggttcaatgctaccgtccgattttgctgtgagaatagacaacatgctgcgtgcctcagaattaccacccatatttgtcactggcaagatcagtactgcgcagggcacgttctcgtacaaagacatttcctacgaattttcagcccagggcatgtatgaggatatatgcatagttaagagtgtgaactacctggctttaacaggccacgtgcaggagtgccacaaccactgtggcgctggcacttatctcacctttaagatgatgggagtgcgacaagttccctggccggtcgcatttgaccaacattataacgcatactattgtaatgaaactgacgtaaagtccaatggcgcgaagccatccctcagtgtggaagaacaaataaataagagtgccagaaacgtccaagtgatgctaggcgtaaaaggtgcagtgcaaaactatgagttacggttgttgcatcaagttggggagatggtgacaattcccactaggattgattccagtataataatgcaggaagtcataacctccggattaaaaccaattaaaaacaactatatagacaattgcgttctaaatgtggtgttagattgtctagaacggcacccaataatcagccgacaggctgagaatttgtatcgtactcaaacattcatcactgtcagcgacgttatggaatttctaatacagttacctgtatcatacctaatttgccatggtggtacggccataatgtgtaaacgccagagtgacgcacatgtccgcatttacgtcacggaagatatgagccacgcagaggaatttacgtacactggcgtggtgaacgcggccccagttgtggatgatgtataccaggatttgattgttaatggtaatttcgaagacgacattaaaattgcaacccggttgctagaaggtgtgccacaacctagtgtgcaacaaataatcaatcacttagcacaaaccagcatgcgtaaattacacccagttgagattttcaaaggtacgacagcggttggacactttcagaccactgtgcgattaagtgctggttactcctacgcatgcttcacctccgatggggtggtaatggcgttatgtgtacccagtgtgtctggtaatcccatcttgctacacatgcacgatagacagtaccaatgcgctgtggtaatgagaatgaacaaattgattaatatacaagtgggcgtctcacgcagtctgataagatcaaccacccttgtagcaatcaaccactctaccgccactaaattaaagtgcagaggaatatatgtgtcatctgttggccaaaccaatgcagatacactatacatatatgacacttgggcacggaaacaccatctagaacctgagcaggacgtgatcaggagtgcgaaacgaataatgggcgtaccagaggaggataaagcgatgttgtttgatctaactaccaagcggtcactactgttacataatgattatcccgtttgtattgcaaaaggcaagttatacttccgattagaacacggttgtgagcagagtgcagctatcatttcccgcattcgtgctgtcagcaaagtcagcgataacctggccatactgccttattcacaggaaaaggtgccaatggtaatgattgtctttaagtacgatggcactaaagtcacatatagtaacaccagcgatgttagcccacccagtaccttgcaagaactagtcgaccttattaaattagacacacaagtggctattaaccagttgaaaaacatggccacacaacacggttatatgacgttagaggcatgtaagattgagctggtggtgaaacccatatctctacctgacttgagtatggctgtaaggaggaaattgttgatagctgacaccgatatactgatcaatttgaatgcatggcgcttccaaatcgtgaaacaaggtgcagggttcagtaaattcgatgaacttataatcccatcactagacgacaacaaattcaatagtggaagatatgtggtgcaaaatgaaactgaatcgacaactataacaaataatatgccagccctgctaccattggatttctcgcaggctgacgtaaatttcgtcgcacggcaacaactgtcgtatcatgccaaagagaatcaaataatttctgtagggtcagtaggttcggtaggcatggaagtcgatgccattacgcttgatgaaatcccgcaatcgcaagttatggatttctggcataacgaagagctcttggacagtaatattatcctcccaaccaacacttcgttcactgtgtcgagtagaattcacccgatacgcataaagtcaaatgcttatttactaatggaaatgtacccaatgtatgcgcgcccgtcccgcagcaaggcatttgcagaggaattgaatagtatcaccaatagacatggtgcatacacggtgtataggaaagtgaacttagatgtgaagatggaagtgcaaatgctgctggacaattatatgcgagctgactgcaaccagataatagcgcaataccagggcagccagattaattttgagccagcgaaagcccaggcatggattgataagcacaacatgccagctaaggtacgttcagatgtaattgagatgctgaactctgggtgggaacgcacgcccatcaatgcaatgtctgtgcatggtaaaacagagcagacgacaaaaatgaaaacaacacgctggtttgacgaagtcgtcacccgcagcatagtagcggcaccttatgcagtttcagccttgttcgctgatatattcctggaagccaaacagcgcttaaaagcactgctttcagataaggtattctactctgatggtagcacacccctggaattagctgcagtgatccgcagttctgaagatttcacgttctgtgttgaagatgacctaacacaacaagataggcaagttgatcaccagttaattgcggtcgaaatggaattatacaaattactaggtgtaagtggcaacgtgttagcgttttatcgcatgtgccacgaaaaatggtcatggaaggggcacggcattagtggtgtatgggatgcaatgcgcttgagtggacaagtcaccactgctctgggcaatgcaataaccaacatgattgtgcacaaccgtttcatgttgcgaaacaagtcgaagatatgcaaaatgctattcctaggtgacgacatcattttcctgatgaagcaggaggtgacggtcaccaagcacggtactgagaccaaggaattgtacaacatgcaatcaaagatagtgtctcggcgttacgtgggtggtttcatctccatggtagtttacaatattgcgggcaatgttggcatctgcccacatttcaagcggatgcggcataggttctctgtgtgcaattatacatatccagtagatgaaaccgctgacaaagtaaaatcccgtgtgctgtcatatttgtacatgataggtgattgcgcatgggcacgtgcacttgtcgaaaagatggggtactcggtgcaactgccgcagtggtatcacatggatactgcaatagtggccaattcattgtatgatgaagaggaagaatggcaaacacgttcgcatatttcggctcttcgatatatgctagagaatcaagtagtgaaacgccataagttcctcacgtggtcaagtgtttaaataatttaatttcattgtggggtccgatctataagc

SEQ ID NO: 804 - DNA, 12154 bp, Grapevine endophyte alphaendornavirus
  source 1..12154: mol_type = other DNA
gaattgaagcgatgacgccccgccggtcaaggaagtactgtaaaagaactaaaataacacatagcggacactaccctaagggtagtgcccgcaatgaaattaaattacgatccctccacatataccaatatggtatagagggggatcatgacattcccaaacttacaatacaccatacattgaaaggcgaacatcaatacattgatacatatcttgccgatcaaaatgatgttatcaatacaagacgtctgggaatctcaggtgttatagacatatttcaccaaagaaaagaataccctgttgatcatccatatgatgagttgactttcaacggcaacaccagtcacgtgcgcgatgggttgtactacatagatgactaccacggggaaattaaaccgacgtataacttcaacacctaccgcgctgcattaatggacgacatctacaagtcaaaccatgtgcatggcactaaacgcatgcacacactagtcaattggttaactgacaagtcagttgcattcccttatggtaacatggcgcagaagcgatatggctaccttgaggctttggatggctattatataaaatgcgcgcactgcgattgcttaacatatttgccgctttcaactttactaccaccaaccattacgcgtgcgcaacttactcaattcttacgtgagtttagggatcaacgtgaatgttatatgccagatcccgagatttttggtgatatggcaatgatggtgcccatgtgtttttcaactagtaatggaaactgttttaattgtgatgaggacctttttaccgagaccgtcaaaatggcatatgccatctattcagaatcgtttgcataccataacgtgatcagaggtactcaaatagaagaaatgacaaagatgaacatgttacagggtgcgccgcctgatgacatgccggctgctttgtctaagtacaacgaattacacaaccggcatgctgccaaagcactagcgaagatgaacatcaaccacttaaacactatttacaccattaacgacatgactagaacggaaatgatgagtactcgctcgcatctccatatcacaagcactgcacgcatcaacacaacaccgatgacatcgcttgaaagtgaggaaatcttgctgattggcgatttggccagcgcaaccgtaggtaatctggtacatcaccctagcacgctggtggtgaatgcctccctgttacacatttgcgacaccatatgcaatggtccgtactttgctgatactggcatcactgtaaacgtcccaatgtcagttgaaaattacttggaggtcataccggcgcaacactcatttgacaagttgataaactgggcaattgacggtgcatacataatgttattacgtcctgacgtaagtgacatcatcgttaaacaagacgcttcgtactactacaccatagcaacaggtaccgatgtgttagtgaaatgggatgtccatgcacatgcactactggccaatagcgcaaaatactttgatggcgcgaattatttcaatatacaaaccatcacacacggtagtcatcttcagattgtcaaattagtgccagctgataacacttggcatgcccgcacactgggcaacaaacctacttttgaggcgctaataccagtattcgacccaatcaacccattggcaacgctgggcgtttttggtactaaatgggaatacaagacaatcaatattgagttattacgtaggatcgttacgtttgccttgactgcggacaagtcatcttcagcaatagaagcgtactttgctggtatactcagcacacattacaccattggtggcaaggttgtggacctaacaaacacaccaattacagaagggttaccagaattgatttatgccatgatgatactgaccaaccgcaaactagtcacaatgtggtcatcaatcctacatctcaacaacttttccagttcaaatggtctagaaactctaactaaatttttcttgagcaggctggtcaaggttagtgtgcaaattgcagataaagtactaccatggttcagcggggtactgtccaaaccaactgaattcgcaaaacggctattaagttccaaacaccccatcgacgttgatagtgtttttgcgaagttattgccattactaattatcaccaagcaatctgacaacactgagcccattgctccgccgttgcacgtactagatagtgcaatttgccaccatcactcaagtagctgtaatcattccatcggtgatgtgcgctgcgtgtgctgcggaataatgaatgccaatgcggtatgtgcatgctgcgtgcagcatgtgaaatgtcgccactcgtgccagcacaagtgcaccggtaatttgcatgcttgcaaatcatgcatgaataataagccatgcaacacaaaagcccgttgcgcgtgttgcaatgtttatggttgccagccatgcccagcatgccccatcatggagccaatgcagctacatgacgtacagccaagcagcaaaatgagcattgtcaccagattggccaacaacgctatgaaggtgcctgttgctcaccagcaaccaaaaaccataacgcctgcggtacagcggccaaaccttggccacgatgcacttatgaacgtgcccaaaggaggtgcagttttcaaaccgaatgaaactgcgcaccgcatgatgactgactacttgcaaattacaaggccagaacacattttcattattgataattcggacttgtacattccaatgctaagcttcacaggacagtactatgtgcccatacaattaccaaatccggtggtatccaacccaatacacggggagcattattgcgcatacgcctgtatcgccgagcaatccaactacaccgtgcagatgctgaagaacatgcacggtgatagacattccatggatgttgttgaattgagacacttgcttaagatactatcattgaattgcctattgatattaaatgacacacacgcagagattttaagaaacggaccacaagccaacaattacatattaattgggcatggttcaatcactgatgaggtgccgcacgcccattggttcgtgccacatattcccaaatttacggacatgcccactggatattacgggccgcacaatttcggtcagccgtttgaagactttacaaacttcaacatgtggaatgccaccaccacagagatggcaagaattcaacagcggctaaaagtgttgcgctcgcaagtaaggcacagtgacaagttaggtgatttggccttaccaaaggttagactcattaaaaatgtgttttatttgaccaatggtgacgaacacacaccacgcctgggtaagatccacctgccactacccgagttcgttgacgaggaattggttgatgcactcaatggtgtggactccaaattggttaaatcactttacgctaaccaaacaaatgagtggtcccaagtacggcaagacgctattaatatgttcaagttaaggtgttgtgatattaaccaattattagttagtgatgaagcattaatgtcaccactgcaatcatattcaaccacagttgattctgatgaaccatttgtacctgtacatttgctaaatcgggtcaaaccgctagacatagttatactgaagaaaggcactcaaacacacacttgtgtcgttgcaggtgatgcaaggcaaccctgcgtacgaaatccgtatggttcaggtgttacactttacatttgcaaaacgagtctgtcttcgttgtaccgcaatctcattatgtgtgtcaaagccatcaacaacctagataatattaggtctgtagagtttggtgatgttgtagatggtgtggccggttcaggtaaaacgaccttgctacgcaacttgaccaaccgtgacaaagcaacattggtgtgcaaaacgcggtcggctatcgaaagccactacgatagcagtttccacacattgatgaccatggaggccgcgggtatgtctcacattgtaactaacatccttgtgattgatgaagcatcaatgatcaccaatgtggagttgctatgttgcttggataatcctaacatgttagtacacatgatgggcgactccatgcaaataggtgtgaaagacatgtcaaacgtgctgggtaatcgaaaagaaaactccttgcttgcacaattggccaatacaaagttgtatcacacatatagatttggccaaccgttagtcgataagatgttaaaacagtttgtacccaacatcacatgtgagccgaatgtacacacagaattaactcaggtaacagcaagtagttatgatgaaatcgtccagctcacaaataactacaaggtggatgctgtgtatgtgtttatggatgcggactacgtacagctattggagatactcggagataaaattgcggtcaacaaagtgcatgcttcacaaggtaaagaatttgataacgtgctcgttgtacattggggcaatttccaggttgaaacgtccattgttaaatcttccaagtttttgtttactgcagcgacacgtgcccgtaaacacctaatttgggtcacaccgaaaacagtgaacataaatgtatctaaaataatggacatagcatacatcggtagtggttatgagagtcctcatttgttcgacgtgaatgagtgcaggctcttgcgccccatgactgaactagaaatgggtctgattgaaactatattgtcgaaccatccaagtgcaatcgaagcgaacagtaaattcacgattagaaaatcttccataaccgtggaagcccaagtcaagaagtggctgaccaatatcaacatatcattcactgttgacagactaggtactcacggtaacaacttggcgagccgcactgccattgactccatcaaagatggcatcagggccaacttccctgctggctttgcgcagctagagagtcgtattagtgaaatcatgtcatactctgaaacatcaagtggcatcacaagtgatgaagaaaacgctatcggaacactatacgatgctgatgccgagccagttgacactaacactcacactgtatcatatcacagttacaatatatcgattgatgagactgagcaatttgcgactccacccaggcctgacacagtgcgtgctagtgatgacagacccgtcccaatgccgctcagtggggcatctccacaaatctttgaagccgaatcagagcgtttaagaaaatacttggacgacgtggaacagcaacggttaagtgccgcgcctactattagtgcagcagcactcaagaataccgctcaagctacaaccctactgcaagaggcactgggtgatgcctcaattgcagaagcattacctacgcacatgcaacctatactaactgacgaccacaatcccacagactctgcggttgccactgtgttgactaaacagttggcgcacatggtgcgaagcttacctcgcgatacaagaggaacgcagccgacacctgttggtgctgtgttatccacagatctagcagaacccatacaacagtgtttagacacccgtgctttcgggattttatacaagttacaagtgaaacacatgcatctaactgcccagttgtggtcacgcatgataatacttgccgatatagttctatcatatcaatgcacttccacagcacttacctggaagcatcaaggacacctatttaagctgagcattttcggaggctgttccttgtactgtgggttcaaattcgagtacgatgatgataccgtattgattagttcagcacatgctgatgatacgcgtgaccacctgctcaatacactaaacacttgcaaccgacacattaccggcaccactgaagggatagtgcgcgtcatctcatttttatcagatgacactctgttcggtagcgttcccaggaacacatgcttcaaaacgtacgttgagcgcttgacgaacatttgcggcggtgtgttgactgattgctcgtttgatagtgttggtaccagattccaaactgaaaatacatccagggccataagttgtgacagttattccgattcattcatcataccgacacatcaacgtgtggagcattacatagtgacaacgtccgatggtattagattggaaccatgtaacgtaatagtacacacagctaaacaattggtgcaattattcagcggtattcgtggcacagatgcggacttcactcttagtcgtgcgaacaaggccacacttgagaaaacgatgatacggcatctcaacgccgaagaaaagtttgacagacccgtgaacatacccacccaattggtccgttcagagttatggcagactttcatgcagcaggtaggtagcaatgtcatcacgccaattgcgattggtacaacagctgtgtcgtcaattcatggcgccatgctaatgtcagcattgatgcttaggcaaatgtttgctgatgaaccgatacattacatcgggttgaacgctcaattgttttgtctcaactacgtggttggtgacaccatcagtgagatcccaggagacggcgctgtttacatacgtcaaatgatgtctgcgaaagctgccgctatcgccgcactcattgaaggggaatctgacgcagatgagctgaaacggcttcaagacgagttggctattgtgtcagattatcgtgcaatcgttgcatcacctgttcgcaagttgaccatatgccacccgaaatacttcaataggtaccacagcaatagggtgttcacttgttacccatacacaacggacccaacgtgtatcgtgcaggacggcaagctacttgaggcatcggaagacggtggctcattcgaggtgtcactagataatacagttattattggagtggttggttcttattacatgcacaaacatgttgaaaaactacctgagataacgttacagagcagcggtatagcaaatcccaattaccgtgtcttcgcgagcaacgtacccggcatggagaccgtgtcaataccagacaccatcttccgccgtttggtagctcgcgccttcgcggatgcggacactaagttaccagatatgatcgcatatagccgatcgttactcaacactatgacgtacacttccaagggatactctttcaagtataatgacaatccattggaactcctgcaattcagcatagttgcacttaatttcgcaaatcgccagcgaaaagtgaccggatttgtgaactccgttcttgggttaggggttgacactgataagagctccagttatagtccaataataaatctcctagtcgagtcactaaaaaccatagggttgaatctaatgcaaaaccaattcaaccagccactccaaatattgcacgagatgctgaatcgtggcacaatggagactcctgtgatttcggatatatttgctgtgttgcgtgatgctaactatcaagagatatatccatctattcgtctgaagtatcgacacagtgagcgtagcaaccaaacagtcaactcagatacagcagccaacgataacgatgtggattcccaccccaacacagacgcgggggacaccacagatgtgcaaaccacacctgcagtggcaccaacgccaaagcctgacaaagggaagggcccggcattacccgacaacagtgaatacgccagcagcagccagacacaacaaattgccaagttctttagtgacaaggttataactacctggcatgacatgcatgaggcgtggaacaagtacgttaagtccaacaaccaataccaaccatgggaattcaacactcacgtgggcgatgtgttactattatacgcaggcagcaggggtgacgcgcaaccattggacgctatagcagaggtggcagttgccggtggcctaagtgtcaggtcgttgataccagccgatcttcattcgcggattcctggcgtgcactacattgaatactgtgactcatacgatgctctgactacatgcggggtaaatggtacaattccagatgcctcaacattcatgacacatgctatggatgtctatagacactggttgaaagagcacatgagacatcgtattgtgataggcatgttcttctcgtccgaggccaacttggtacatggtactgaaaagaacattcgtataatcccacaactggatgatgaatgggatggtgctgcaaaatgcaaccacggcatgagctctaatagcattaggaagttcttcaagttgccaaaaccagttattacaccatattgggcggtaccatacgacatcctaaaccgcgcggataacctcggtttcctagttcctaaatactgtctaaatattgacaacaacactgatatggcaatacgattctcaattaagcacaatgggcaagttcgtgttgttactttaggttcgatgatccctgatgattatctcgtgcgtataaataacatgctgttggcatcacctctcccagttatacttgtcacgagcaaattgcataataaatcggacaaattcgactatgatggtcaaacattcgcattaaacatgccaggcatgtacaaatccatatgtattgtgccatcagtcaattacctggcattaaacaaccgtatagttgaggcacaccaccattgtggagcaggcacctatttgacattccgcatgctaggtgtcaagcaagtgccatacgctgttgcattcgaccaacactataatgcttggcattataacaaggatgcggtggactcagcagacaaaccacctacaagcatgtccgttgaggaacagttgaatcggtcgatacgggatgtgcaacagatgctggatatccacggcgctgttactaatatcaagttagttgaccctaccgcacttggtgaaataccattcgtggagaggccaatcgacaccaatattgttgtgaaacctgtaatccttcgcggtgtcaaaactattaaaaacacctacattgacaattgcgtgttcaatgtgctattggattgcatgcaggatgatcccgcatgcgcaaggttagttgatgctgcgtgcgcaacgcataccttcatggtgccagaagacgtgatcgagttcctgctaacaatgccatgcaatttcgctatcacattccgcaacaccagtttgatttgtgataagaagttgaatgtcaatgtgcgtatatcaataacagatgacttgtcacacgccgaggagttcacctttgatagctatgaagaagtcgctcacgcaacatccgatgcattcaatgacctgatcattagcggtgactacacacgtgatgtgcaaacagtggttgaaagtatttccacactcgaaccaataaactttgacaaagtgcgccactcactcgtcttgacgagcatgcgcaaactgaggccattagagctgttcaatggtgcatctggcttggcccacataacgtccagcaagcgtttgtccgcaggctatgtgtacgcatgtctcacgagtgctggtctcgtgcaagcattgtgcgttccatcgttgaatggtaatagtatgctggtgcacatgcaacctgtcatgtataactgtgccgtcattattagattgaacaaactgatagacataccggtcggtgctaaacggagtttgattaaaacaaccaacctagtcgccataaatcatgccacatcgctacaattacaaacaaggggcatatttgtgtcatctgtcgcgcaaccacaagctgacacgctttatatctatgacacttgggcaagaaaacatcatttcgaagccgaacaagaaacgattcgcacggctaaacgcatcatggccgtaccagaaagtaaagacaaaccattgacggacataacaccgcaaaaaccaactctactgagtaaggcataccctgtgtgcatagctaagggcaaattctatttcaggtgtgagagcgcaaacagagcaaccaacgacattctcaactcgcttaaattttgcagcaagttgactgatggattatatttgctgccgtacaaatccaaatggaccacactgtttacaatactatttaagtatgatggcacaaagattgaatactgcaataccgtgagtgtagacccgccaacgaacttgcaagagttgtacgatttcaccaaagtagacacaatggcagtaaaactacggttagaaaatctaagtaaacaacacggctacacatcaatggcggagtgtaggattgaacaagttacaactatgcataccattgagacgtattcattggcggtgcgacaaaaattgcacatcgaagtagatcacctcataaccggtgcgaatggttggacattccgtatagccaaacagggcgcaggttttgttcaatttgatgaaatacacataccagaattagaagactcaaaatttaacaattccaagtttgctactccattgcaaccgacgccgtccaccacattgacgcaagacatgactgctctcatcccactagatggtaaagacctttcaaacaactttgtctacaaacaaacgttaaactaccatgctaaagaaaaccaactaatctccgttggtaacgtgacgtcattaggtttagaagtggatgctataaaatatgatgaaataccacaatcacaagtaattgatttttggaataacagcgaattattggacagcaacattatactgccaaccaatgcacagttcacagtgagaagtcgcatacagccaattcgcatcaagtccaatgcgtacttactaatggaagcctacccaaaattcgcacgcccatcccgtagtaaagcttttgcagaagagttaaacagtattaccaaccgacatggtgcatacaccgtcttcaggaagaccgatttagacacaaaacaagaagtgcagttcctgatagataattacttcacaaaggactacaaatccattcttgccgagtttcagaaccagccaattactttctcacccgctaaggcgcaggcgtggatagataagcacaacatgccaaagaaggtgcgtgccgatgtgatggaaatgctagcaacagggtgggaaaaaacccccatcaacgcaatgagtgtccacggtaaaactgaacaaactacaaagatgaagacaaccagatggttcgacgatgttgttactcgtagcattgtcgcagcaccatatgctgtgtcagcactcttcgccgatatatttcttgaaaccaaacaacgcctcaaagccgtgctcgggccaaagatattctattcagatggtagcacaccacttgacctggcagcggtcatacgcagctcggacgatttcacatactgtgttgaagatgacttgacgcaacaagatagacaagtggaccaccaactgatagccgtcgagatggaactctatagattgttaggtgtcgatggtaacgtgttggcattctaccgtatgtgccacgagaaatggtcatggaagggccatggtataagtggtgtatgggatgccatgcgcttaagtggacaggtaaccacggcattgggcaatgccataactaacatgattgttcataacagatttatgctacgcaaccagaaccgtatctcaaagatgctgttccttggcgacgacattatcttccttatgaaacaggaagtcaatatatccaagcatggtaccgagacaaaagaactgtacaacatgcaaagcaaaatcatctcacggaagtatgtaggaggattcatttctatgatcgtgtataacataaacggagatgttggcatatgcccacatttcaaacgcatgcgccatcgattttcagtttgtaactacacatacccggtggatgacaccgattccaaggtgcagtcacgtgtgctctcatacctgttcatgctcggcaagactaagtggaccactgatttagtagcaaaaatgggttactcagtcagcttaccagagtggtaccacactaatactgcaataacagcaaacgcattgtacgacgaaactgaagaatgggtagtacgttcgcacatatctgctctcagacatatgctggaaaagcaagtggtcaaacgccacaagttcctcacctggtcatcggtataactctcacacaactcacaaacaacttaatttaatttcattgcgggatccgatctataagc

SEQ ID NO: 805 - DNA, 14663 bp, Helianthus annuus alphaendornavirus
  source 1..14663: mol_type = other DNA
acctattgactaatagggacatggacatattaaagaaagaacccaaaccaaaaggggaaccctcttcaatacaacacgctggggatggtccccccagcgtgttaaacgttggcgagatactcgccaacataaacaaactggtgagcgctagggaccgacgccgccagacattaaggaccaaaacacgacgcttgaccgagaacaacgagttcaacgttaaggtcgacccacatttccaaccaaagtttgtgaaatgtgtggcaggttccaacaaacaaagtatgaagaaatcacctcacaagtggcaacacaatgtgatggtatttaacacaataaacctagggaaaagggatcctcatgagattgccaacaagctactggcctacggtgccccagcgaaagtcaaggactgccagtgtgcgagctgcgtgtcagtagataaccaacggtccaaagtagccatcaacacccaggccactctaggcatgtggagcataaccaaagatccatgcgccctagagggtatagacatcatcaagtacaggcccaaagcgatacatcagctattaagcacagagcaggaattcaggaagacattgtgggatttcaagcttgagaaaaccttagacgaagtcgtcacaggaaaagatcaattcaaagcacacatgagacgacaattcactaaatacctgaagaaattttctggttatcagggattgattacagaggctctgacacaaaccacgcggtgtgtcccatgggcacaggtatacgacattagaactggtgaacctctggctaaccagtttagccacaggaaaccgacaccagaagaacggacacaaatgatcacatgtccccactgcaaatgtaccaacagtctaatagtaccacgagatctcaaacctaagttagtggatttgacagatcacagatgtggtgcatgcggacggccctttcaagagcagatgcatgacccttgggcggaaatattcgatatctttgacgagtctatcaacccaaacgtgggggcacagactgaaatgatgaagttgatgggccgcctagacatgagcgagatagatgaagcatacacccttatggacatagccgagaagcatgacaccaggctagtgaaatcagcgctgagcaggcttcagttggatctggttgacgtgcccttaaacatggagaagtccaaactgggggtcctagatcaactattcggcggtttcgagttcgtcccgaaacccggcctggtaactgacacacctctagaagacacgttcagaaatgcggtgatgactatggtgaagaagaccacaatgagcgagggattctactggccagacgcataccagaaacctaatagtagcagactgaatgtggtgaacccctaccaatgctgtgggtcgctagagtgtgatcattggatcaagaaaaacaccttcatcacactagagtcactgtcagtaggcttaaacggcatcttgaaaatgatcgaaaggagtggaaaggaagcatgggtgtgcctgccaacggaaggatacaacccaaaggccgattcaggccaattcgaaggtggagaaacacactaccatctgagtggccatgttatgaagttaacaagacccggacacgattacccgatgatagtagacaagactgattatgagaacctcaccgaaggtgacatcttccatgggagtacgggcacttatatggccacgaccatactgaccggctgcggtcacaaagtaagaataatcaagaaagtggaccttaacataggggagataattcccaaactaaaaccaacgaaagcgagaccccagacattcaaaatacccacagttttgcctgggagcttgggtagcataacgggaatattgacatctagtgtgaaagaagtgaccgtggaaccaacattgcttaagagtctaatgatcaaaaacttagacgccagcatgacctttgcagaactactagaatttggaatggccttcagtttcacaagataccacagaggggaaaaagtgatatcctatcaagacctcacttccacgcaagttatcgatcactgtgtcatagccttgatactaacaaggagggccatggcagctagaactatgatagtgagcgcgacacagaaaaattcagttatggaggtcatccaaagcgctggtctgtctgtggggatgacgacagcagtcacactcctggaggggatcaccaacaccacgattaaatccagtctcaagaccctgatgagtagagttgatgccatatctgtaaactcgttaagggttataggggagcacccagtctgggacgacatacaacgatggaccactaaggtgaccctatcaagctatagaatcatagactatcgacctctgagagccactatcaggaaagaagtgacatgcccccatgtgctatctgtaatagaacaaggagatcagcaatgcttgtgttgtggccgactggcaaggtctgatatgtgcaaggactgtagcccttgcgcaaacaaagaacatgcatgtagtcacacttgcgtacatgatcataaaggtgagaagaaatgcttatgctgccaattgccttctgaaaacaaggtatgcacgtgctgtaaggtacactacagcgtcgctgacatggtaggacaaccaacaaagaaacctacaaagaaaccagaacaaccaaaaagggatagctcttctaaacaaaccaagccggagcaaaaaccgggtccaaaaaccagagaagaagaacaaggacaatacaatgatgaagacgaagtggtgatagaagcagcagagagagaagacgctttgatacaacaaacttctttggattttgtgactgccctgctaagcccagaagcctggccaacagaggccacaaagaacccaccctgcggggatataccaatgggaagccgcatcctgtacgttcccatgggattgactataggggaaagtaagtctgtaaaagtgaccagccacaaggtcatcccaaataaagaggggacgtgtggactggacgccttgaggcttggaatgggagaacaagtcaccatctccgtaatggaaacagtgactaagaagaccagaggctgggatgtagatgatctactaaaagtcggtaaggctttggggaaaaacgtactagtgctgacaggcacagaggtgcacgtaatgaaatccaactctgaggacgactaccacacgataatacattctactgccctgaataaggaaggacaacattggtacccaggaaccgtgcagcaagtgggggtgataagaaaggaagtcgtgtacaacccgactatcaccatgcaaaccatgcacaaaatagcacaacaagtcacgagaaagaaggtcaaccattacgacgtggcactaatggaaaggaaagaattaatcgaccttcatgtggctgccgcgacggtagcagagaccatcaaaattcacacggtggttgacaagaacttcagactggaaacaaaccaagatgaacagtacttggtcaacaacaaagagagagaacataacatccgtgaggggaagatatgcgttatcgtacccacatatctcttgagcgtgattcgacacctgacaaggttgtctccagactcaatcagcaacgacgacgtcaacacgatattcgataaggatgaccagataccagagacattgaacgcttggatcaagagtgaagtggctgattgcgtaaagaccatattatacgccctatgctacgacgtgatacctaaatccacgaacccattaaggatcacatatgagaagtttgacatgatacaagatggaaccaggacagtgctggacgtctccagaacaaaattaaagtccttagacgtcatatatttgcaccaagacgggaagatagtcccaacaatgatcaaccccaagatgggcaagatagcaatcaccacagacaaatcctaccggaacaaagggatgactataggtataccacagatatccataggcagtgccatcagaaacctagcgagcctgctgacaatgaacacacaatcaacatatgccatgagcaaactagaagatagtgttatggtgcttgcaccaccaggagcgggaaaaaccacggaaatcatgaaattgttaaccgagagcagtttggtggtggcatcaacaggcggagctttaaacagcctgagacaaaagaagccgccctgccaggtgttatccgtagaggcagggaaaaactacgacttacaagtggaccacttggtaattgacgagtgcaccactgtcgggtttctagactacaaggccatagtggacaaagtcaagcccaagaaagtatttgcttttggagacacctcccagatcggcctcaaagacatgagaatcagtgcaggcaccagagcaatacaaggactgaacacataccacaaatcgatcaaaaaactaaaccatacctacaggataggacagccactcagcaacgtgctaagcgaggtgtacaatgacttagaatctaaagcagaacacaaaacggatttcgaggtcatttggagtagccactttgacccagagacagtgtatgaaaaagctctcaaacataactatgacgtcatccttgttcactacagatcacacaaagcagcgttgctacaacagctcaacataatagcaaggggcaacactccacttgcccaatgggccaggagagttagggtcgagacaatccactcataccagggacaagaagcagataaggtcatggtgatacagagatctaatcaggcaggagggtcgatagaatttgatccgcaatacaatatttcagcagcgagcagggccaagaaacacttaacttggtatgcggtaggggttcactctcccaatgtggacttaggaactatattgagacccagcaagaacatagtgggatacgggttattcgacatgttttccaggttccacaccgacacaatccaggaatcagtaaaacaaccaaggttgaagaaaagaaaaggaatagggagacaattcctgaaaacgattaacaattatctagacaggaagtacaaagccaccgcgacgttagtggaaacccacgacagagaagttctgaaaatcaaggtgagtgtcataactatggcagaggtaaccataagtgctgatggaacaattaaggaaggcttgaatcgcgtaggtgatctcagccagttaatagatctcatacatagtaacctagaagataaacccaccatgacgtgctcttgtaacaccataagtaagatcccatctcataagacaatgaaccaattagagtttaacacttgcctacgattatgtaatcttaactgggtggcatgcgaaatggctatggtaggggaaactctgagactggcagtaggagataaattatatgattttgtcaacccaggggaatgtcatgtctgttccaagacgacgattgtgcaccaggaaacggagatagtgaggataaatagatcccaccacttccacaccgacgtatcaatagagtatttaatcccagaagagaacttattagttgagcattttgacctcatgaacaatctcgggcttgatgaacagttgatcacacatgaaagaagaccagtggacagccctttactgaccagactcgcaaacacggaactaaccataaacacttatgtgttgcagatgaggaaatcaatcgagactaccctcaagagaactggcaatttcatagtggacagcttgttcggcttgaaacacgagaccatcgacagtgaaacttggtgtcaaagtagaggtctcacctgtctggccactatcggaaacgagatgagccgcctggtcaaggtagaagtggacaacagaatagcgctcatgttgcccatagaagactcccctatacattatttggaggaagaagggaagagagatgacaactgtaagacaatggaagaattcatcatggaatacataaacaccctaaacacggacgggttactgacaaaaatgataagcatcctcggccagatgaaggtaggaggtagggatgacttggttaactttgaggggttaatggtaccctacgagagacacatggcaagaaaagatagagtctggcacaccgtcgtaaacaaactggggaaaatgtacgtggaaagcaagagaggggaggacagcatcctttacctatcacaaacacaaataagagagcaaggtcgactgatcaaacaacagttcccgcacctagcaattaacgaacacagatacatgatggattctgacgactacggttctactctagaacagctgataaaccatgtgttattaaacgattctgtaggcaaggtggattatgtgacatacaggccacatttagtgatcctgaattcacgaatcaattgtagactggtcgaacccaatcacaaccggttattaacagccaggtcaaagatcaatgagactttcatggaaggcatgtgcaggaatgtggaggaagccatcctaaccatggcctcggaaaacgaaaaagatgaattggtagcaataacaaagcaaaaattggaattggcacagaagtgtatcagacagaagcaagggaattggcacccgtccaagacattctcaaaagacacggacttaatatgcctgggagaatgcggtttatcctatgaaccaagtcaattggcccaactagtgatggagaattcgggaagaagaataataatatgggggccaaatcccgcactcgcaaaacttgatcaactagaagtagaaggtcaggagtacctcaacgtagtggacaaaagaacaggtggccactacatcatccacagtgggatatgggatagcatgaaatatgggctaccaatagctcaggaagagaaaaccagcgtactcttggcatcctacatgaccatcggaggtctgattgtatacgacgtgaagatcaagaggccccaagacatcgaattgtcttggtttgcgcctctagactcttcaaaaaccaccggtttgataacgatagaggtgccacacattcacagggatgtcgtgaaattggccaaggagggagtaccaataatttccaccaggaggattgtcgccgacgcaagattactttcaaacttggcgaagcgcatgttaagacccacgacatttgacgagttgctaaactacgccagagtcttagcacacggcaaacactatagtctgaaaggattcacatcagtgtacgaagaaacaccacaggaattacttgacataacgatgggtgtgtacctaatatacagtagaacaatagaatccatggaaggtatgacagaaggtatcataagcaggagggatcaagatctggatacattcaaagcggtattaacagagagagtggcagacttcaaaacaggtttgttaggcctggtgagcaaatacacaggattagatctagatttaagcgactggttgagaatactatcatcagggtcaagggaccacctgtcagtcatcagacaaatgatcacaactcttaaacacactagagctagattgttagacgacaccaggaacatttttccccgaccaacggtgggtagtgcaccagaaagtaaaatagaaaagaaggactacagcaacaatccattccggttcttagaattggcaatagacaacgtcaaggcattagccaaattgacatttgacaacactcatgggagtttcaaaacagcaacaaaaccagcaatagacaaggtcgtcccccagcggaggatagctgactcacaccccacaagtgattatttgaacatgatagagaagtctgccatgctcacataccaaaagttccaacaattaccagagtttgattacggagaagcttacaagaaaaaactcatggagttccaagaagtgctcgaacatgccaagaaggtcaatggtaaaccaaacaggaaaattagaccagataacaagctaattaggaacatcaccaacctgttagaagaattagaggcagaagactggcaagacagagctatggaaattgtggaagaagcctactcagtgatggtgcaagtgataaattgcctacaaggagagatcaaaaaatcaaaagctaaaaaatttaaaatacttatgatgacaatgggatcatctggcgactataaatacttcaggaatgctgccttgattttaaacaaggcaggagctcagacggattacatagtgccccatgaaggagcaaaatggttcgaagaggtcggagggaaaatatacacttgtgagtacaaagtaaaagagaagctagataattgggatgcagcaaggcggtgggacttggaagcattgctcagtggaatggctgaaggtacagagtgtttaaccaccaagaggatccaaacggaagtgttcaacaacaagtatgacatggtcattggcacaggaattacgatactgggtaaaacaatagccgaatattttgcgtgtccatacatcgagttgaacgcacaaccttggttcgtgcagttgtacacgcatgatgaaacactcgcgggcaaaaccaaaggtttactggacaaaatgggaaaagcaaacgtgatactggctaatgcaaaaggtattagagatttgagagccaacttgcagatgccagaaggagacttagcaagcgacgctctcattgaccaaccgtcaatctactgttacgaaccatgcttaagcagtgacagaatgtatgagtcctggccgattgtagggtatctgggtagatcactgatcagaaaagaccaaccagaatgccagaagtatgacatagtattcacaatgggaagcatggtgagtaagaacatcccgatacatgccgagacggtcatgagctacagtaaaaaacacaaattgaaaacgctgatacttggaggttactcatccgacaagatcaaaccattacatgacaaattgagcgaaagagacaaagaactaatacattttgaagtgtacgctgagcacgaagatgtgatgactgaaagaaccatagtcatacaccacggaggctgtgggacaaccaaccaggcattgataggtgggtgcccgcaagtcattataactgtagcctttgaccaattttattgggctcataaggcgaaattgtgtggaatctcagagcacatggacgtggatgaaccaacagatctactaccgggattgatcacaaaactcaggagtgagtcatatgcccaggcggcgattatgatgaagacaaggctggtcacaggggttgcgaaaaatctaataataggactaagaagtttggcaacacagatggatatgctgagaaccaacccctcaacatacgaaaagataacaaatttgagcccgcctcttgaccaagaaatcttctcaagtaaatcactaccccaaagacccgccataacaacgcaagggcccaccttcacagacgatgtacctaacaaatctaagtactttaagctacaagaggaaatgaaacccctaatgaaggagtggaactttgaaatcacggagccaagaagaatacactacacatgttgtggatcttacggatcaatagacgtcacattggccgagaatagcgatacgctaatagtttgcaatttggaaaacgtaaggaaaccaaggtttgtatatgtggcaaaagaacacactataatccaacccgtgcttccattcgacaccaatagagggccacccagtacagccacattagcgtaccatgcacatggagagatacttcacgaacagatgaaaccatacaaggcaacagagattaaaacactagcaggtcaagaacagataatatcggagtcaaagtggttatactatgccgcaaagaacactaggaaagttgacacagactacggaaacaaaagaaacggtagaggaatagattgcaggatatgctataggaggggttggaaagctcacccagatctagacatatgcacatgctgcttttccaaactagaatttcctcagatagggaacacagcggatgaggaaaccatcaagaaatacacaatactgaaagaagggggtctaaaccgacaaaaccaattccaagctggcataggaaacgccttaagcctcacgacctcagtaccacaattaagtgtaggactgtatcacggaaaatcttacggttatagcacgaaatttaatcctcaagggccagatggttgcgtcaagaagtgtatacaggcgtatgtcgaccttaacacagaagcaacccgaccagtcatgaaaaataatcgattgaccctaatccaagaccaaccatctatcatagtagaagagatcctgaaaactttcaacatgccctcaatgacaccgctagaacacatagaaccgtattgtcacctgctaggtttgagtacaacattggtgataaagggtaatgtgagagttacagtcttaccagatgccataggtcacatagagttgctaataatacagaccaataaactgctacactgcgtgctggtgacaatgaacccagcctacttagaaacattaatcagacaagaaactccaagattaagttgtacggtgcaaaacagtgactccttaaccacgtgccaaatttgcgagcaacaaaccatagatattaaagcggggaaaggattgcgtgtgtcaacccaaggaaagtgtcatggtttgcatgcagagtgggacaggtatttggtagcatgcagacggatgataatgggagagatggtggacaggggttattggtcagacaaaacagctaaccacgtaaagtcagtgcaccaaagaataacactagagaaaatcacacacgtgtttagaagcatgacagagccagtgatttttagtcccctgagcaccggaaacgattatataatgatagaaaaaccccaaacaattaagccggggcaggtaatgatagcaaacacggagaaagggataatcataggccacacgctacaatacaaagatagaatgatgttagtccacaacatggggatagtagaaccgttgtcgcaagcggtgatcaacttgaggacaacaacattacccagggattacgatcccaaagacacagaccaaggcaaagaggtcacaagttacaatctagccacaagacagacgatggaacaaatagattacaatttgaggtacctaccaataagcctaaagggaatgaaagttatactaactgacctccggaacagaaaccaccacaatgagatagtagcagtgaacattgagaaagccaggcaattcctggtagaccaaactatgaaacctctggaaccggaagtcatagagtcactgaaatataatggacccatcgtgttagggctcaaaaacggacgattggagtaccagcacaatttagtggcctccggaccagtgtcaggatcaatcatagccgatgtggaaaaacacctaactggtctaatttcaatcaaaccactagagaagatagacaaactaaaaaccatcaatccaaacatgtttagatgtttgggcaatgaatggacttttgaagaatatgagtccgagttggaaaaaccggaaatgggaaaagacataaaagacatcggggagttgagagatttattgatgcagccagggtggaagactaggttgcgagtagaccaactaaccccagacaatttcccaatatctctaataaccagaggggccgtcattaagaatgcaatgagagtagacccaggcgtggaagtagcctacagagagcacatactacaagtgctggtgtgtgaggaggacaatctcctactaaaagacaaattacttgaacgggacgtggacttcaaactccaggctgcacaagatgcaatagcagaagaaaagagaagattcgaatccagaccattcaaaaccatcataaactcagaagaaacatttgagacagtgaggttgctcaggaagaggaacacagtagttgaaaccatccaataccaagaatacaaacaaggactgcaagctccggtacaggaagttgacttgacccaagacaagagatgggaagacatgttgagtctaagaccacccactaatgaggtttacgtgctcactagaccagagagcactcagatggtaaggaggttactggaagggaaagtcacaccacagtttgacacggtagaaggtaaagtgaagttgcatgtgatggccccaaacccgaccagcgagttcatcgacttaaacttggactattatatgggcacacacaaatatcaggacaatatagagggcttgatggagtccgtcatccagatggatgacgcgggtcaactcacatcagatatgcacaaactagtcaccgtacccagcacgctgggacacgttaaaaacttagcgcggctaacaggggtaccagaaacgcccgaattggccaaactagcagcagccattctagaggcaaacggaaggaagggtaagacaaccagccacagaatggtgttggaagacctaggcgaggaggaactagtacagttgctagttccagaagaccccgtagtgatagacaaatcaatatacagcaaaataggtggagcagtctataaaccagccagtctggtcgggttcggcctcaaagatttccaaaaagaagcactcactaccaggcaattttggaacgagaatgaaaccaaaggcaaatacaagttaacagaaacaatgacagtagaaggctataacaaactacattcaaacaaacccaccataccagtcaatgtcaccagccagggccaacactctacaagcacccaaacaaacataacgactcagaccaccgaaaaagaaattttggagaagtacgccacaaatgaaccaatagtggtcaaccaggatacagtaaccaaatacagatcgatgaagcccaattacgtggaacccgggtgcctagagacagagtatgtaaaaccaagagatattacgacagatgcccacgattctagtgtgaaggaaggagaagcattaggaataatcaacaccaattggatggaagaagataaattactggaattactggatagcaccacagaagataagagcgcaggactgtgggtggagaaagtcgacatggatcacaaactagtggcggaggacatgaatgataagatcaatgtgttcacaattaatttcttcgaggataatgatatgacagacttcaacatgatggtagctcccactcagggggtgctcaagtcgaaagaaacaccctgtagagtgatggaaactaggaaagtgaccttaaccaaaagaccaacaggtagcagaccagtgtttaacaagttggcaaacgcggaattcatggcggtcagcaggagattgatgagcgtagtaaccatgagaaagtaccaactagacccaaaacaggaatgggacagattcgacaggaactacgtctcagtaatgggaaagaaattacttagagcgtataaggaagaccagatatacttcaactctgaagaaattaggaaatggatatccagcagaccagacagtgtgaaaatagaccgagaactggaggagatgttaagtacaggcttcgaaattaatgccatcaacacagccaaggttcacgtaaagttagaaagtctactcaaggaggattatgagtcagtgggtaaccgggagattgaacaccggataatagtgtggcaacggaaagcctggtgcgcgatattctcaccggtattcctacaagccaaagcaagattaaaagccatactaagcaggaaagtcctgtatgcagacggactaacacaagaggagttatcttcaagggttaatcttatacatggcgactgttggtttatggaggatgacctgagcaaacaagatagacaaacggacattaatctgatacaatgtgaaatgtatatatactcacaactaggggtagcagatgacgtgctgaacttatggagacgaacacacgaaaactggaaattcagaggaacaaatgtgtcggggatattgaccggcatgagactcaccggacaagccactacagcagtaggcaacgccatagtcaacttgttagtacacagcaggattttcgaaaccaacaagaatcatattgagttaatgctattactaggggacgacaatcttgttataagcagaaaccgaatcgatagctcgaagcagtcaaaaataagcaaagattattacaacatggtcagcaaggccagtcacgatagagaccaaggaacattccttcaattattatgttaccacaacccacaaggagtactggagtttggcccagacgtaatcagactagcacaaaggtacgaggtgacaaatggagtaagtgagtcgaacaatcacaacatgttggctagaacgatgagctactgtatgttgatagggaaaacaatgggaaccaaggctgtggtgaccaagcatgggttaccaatagatttaaaaaccacctgcagcatggcctcagctagaagagcttgtgcgattaaaaggaagatgactcttggagaggtggagagttacgagagttatttatacagaatgatgaaagacctcaaaacacacacctggatttttaaacacctagcgtgagactgcaagtagagaattggagagggatttccccccccc

SEQ ID NO: 806 - DNA, 16614 bp, Helicobasidium mompa alphaendornavirus 1
  source 1..16614: mol_type = other DNA
gactgtcgcaatggacagtctcatcacaccctccactcctaacaccaccacctctaagacaactattcacacacacaacaacaaaaagcagctgctgctacaagcagcagctgcttcaaaagaacgattgcaaaaagcaactaaggcaattatcaaccaaacggttggtgatgtaagccaagttgcgccaatcgttcgcggtcaccaattgggtggccaaaattacgtcagcatcacaacttccagtggcaggaaggatcagcccacccagcgtgtgaacgttgttgaagcaggtgagactggatcgagcatcaatggtcacttcaacaggctgaccaacaagaacaggaaggccgtgctcagcaagaccaaggaactcgttaaatacgttccgaaatccagccgtagcgttgggaacaagaaggaaaaagcaaccattcaatgcaagaccagtcgaaatatttatcgcaagctgggcatctacttccatgatgacaaactcggagacaccgcaatgggatccaccgagatgactgtcaaccagcagtacactgccgctatggacgatgactcggctcgcctgcaatttgtgatgaagttcaagtcttggatcccgactgacatctttaacgaattcatgtactatgtggtctatccttctcacgttagcgactttgtaacggtcaccaaatgcgcaccacaagttcaagcttacgccgcaccgctccgcaaaatcgacaacaaactacttcgctatgtgagcaggtatgacaagatcaccaaaaagacttctaagcgcaaccggaaggcgattgagaagcaacgccgcgccaattccattcgcaacatcggaaaagatacagttaacgcacaacgtcccaaagttgagcgaagtgtgaacaagccggttaaaaagaacaacaagagggctaaaactcaaaaagctagtaagacccggaatgtctgcatgcgcattatcaaagacgcgctggagagctttgcaccaattgctgacgctaagacactgtatctcagtcactttagagaagtgctagtcgcagaacaaataccattatacatttgcgtgaacggccgtgtggccaaaaccaaccacgcgtcgctgtacaattgtgaaggtgcgttgacttacgaagcgtggaaccaaagcgggaagttcctagaggcgaaagacacaacaggaaaagtttttaaattccagaagcgtaccgtctttaacatggggcactccctctccatgatagctccctgggcagcagaggacgatgatgatgatgatgacgaatttggccctgtggatgtgattcacccggtttgcaaaaacatgtggcatgcgatgcaaaccacggtgtatgatccaaacatcggcgatgccattgacggattagcaatggcccggatgccaggcacgttcatttgggataacagcaatgacggtcttgttgaaatgtatgaccatcaagcgccggacttaacgacatggttctataatgggcaaccagctagccctggcaagaatggtgacgtggatttcaatgcctctaccaattcgagagttagacggccaggcccatgcgctgactgttacaagaagttaactaatgtgcccaaattctggggttgggccgaaatgtggcgcaacaacgcaccgaaaagttctttcaggagcgaaggttacaaagagccgaccatggggaatggttatgaagcttacgttaaccaaaaatatgatgcgctttatgccccaatcatcaatgccaaaacaatactgaaacctgggaaactggtttctgtgcgcactgagttctgtgcctttgaattcaacatggaacaccctgatcgcaaggctagagagcacctgttagccacagcagctctacactatgctggccgtgcttgggttgatttcgacgataccattcaaccgaaacaagggacatgcaggaaaacattgcgtcacatagcgaatcatttgaggcagactaaagaaaatctgcaaagctttgccggcaaccatttctatgtcaattgcccacgcaatggtatgatcttggctcgcactgacagatgggtcgaaacaacgtgtgaacgtggccacagcaatcggatgccgtacttactagagggcgaattgccaaccactctgtgtggtagatgcggtggcagtctcagcaccagtgacgccataagcggaaacactaccgatataatgaaaggtctcattgaccagcttggcgtaacctccaatttctttgatgacatgacaacttctggcagtaaagagtggcaatctaacgtggaaaactacgattacagagtggtggcactcgctctccataacatcaaagtgttgcacatggatgtacagtatcgcctccagaaagatgaattggcacacatgaaaggcatgtttgtggacctcgaattgacgtcatccggtgtgagaggctcactaactacaggcatgtaccatgcagtccgggactgcctactagttcaaaccttgaaatcagcgggagagagagaagtggaatactacaactgtgctgagaatgtttcacggactgtcggacacatcgcggtaccgtcggatgatagcaatgaagcagccatcgtagttggtgattgggtgcaacagtgcacattgagtaacataatgaatgagaaaaagaaaaagattatcgtcgtattaccaaacgtgccttctgacatggatagggtgtcatcagccgtgaccgacatgggtgaagtagtcaactacgaagacaatatgattttcacgtttcacgactctacgcatgtcaaaaccatgcaccgaagcatgtatagcgatttgcggcgagcacggtacctcactgcatcagcaacctatgtcagcactacagtgagagtcactactgattgggtggtattagtgttggatcggctggacaataaagagaacatagaagcttcacaaccgttcttcaacacgaatagtactggtaccatgatgaaattcacactgcccatggtacatggcaggggcgtggcaggcttaatgggtggtttcaacatcgagctcaaggaattcacagtgaacaagaaactgttgaggatgttactcactcggaatatctataaaggtgatataagcttctctgagatgaaagttgcagccattggctacgcattccggaagtacaatacagcatccagaacgattaccaacatggatgtcggggcagatgatgttatgagtcacgcatacctggccaccgtgctcacacgacgtgcaatcctaaagcgggaatgggtactggatgccatagctgaggaatatagttgggctgctgtttgcaaacaaattggtgtgtccctagttaatgtgctgatggtcacagcaatagagcaggctgggattatcgatagatcaacagttaaacaactggttaacaattttgatcaaatgacggtgactatgctaacaaatgctcttggaaataataacttcaatgaactggaagattggttagagacagatagcactgcagaggggatttggttaagctacaccccattagagctcagcgccatgccgacttgcgggcaccacaatggatactgtttgcatgtaggtgacaatatttgttcttgctgcggcaaaccaacaaatgacaagatgtgtcagtgctgcactcaaggaaaatgtgtgatgcagcacaactgcacccacgcatgcattgggcacggtgacagcactggaaccaaatgcacttgctgtggggtggatagcgatggggcattgtgtataagttgtgtcgagcattccgctactgatgaggtggaagcttggccatggataagtatagacaagatcattgaggaacgtgaagtcttggcaaagagtggctctagcagaccaaatcgagcgcaaagaatggatgaggtgggtatgaggactaccaagcgcgagcctggcacaatctactggcataaaaattttaacctgtgggtgatagaaccacggacagaatgcacttttacaaaaggatcagaacaccagcacatttgcgcggtgaagatcaatggcagggaatgtggcagcttgtaccagcacacccacgcaagtcgcagaaaaccggagtcattgcacccccaattcgtgggagattgtaagagatgttggccgaatccagtagccacaatggacccagatactatcccgatcccaaatccgttccttgataaaggtaaaggtcgggagaagagcgacgaagggggcacacaagtgccaactaatgcgcctcggacggaacctcttacaaatgatggacctgtgaccgtggaaaaacctgaagtaaatgaatggtttgacatgggcttaaccgcacttggcccgcgatacatggcagcactattagagcccagcctctcagaggcattcctgagtgatcaaaacatgccacaaggtacgggcagcaacttccgttacctagtacaatgcaggcagacaatagagcgcgctaatgttggcataatccacacaatgttaaacagcaacttgggcagtgactgcggttacaccgccttgcaaatgctattcagtgacctggtgcaacctactctactctcaagagtagttaaaaccaaaaataacatgactgatgaggatatcttacgagttgccccactgatcggatacaacataggtgtgctaactgacgctgggctgacggtaaataaagttagcaatgatgtacttgtgtattgcgtgatgtaccaagcggccaacgtcaacacggagcaaccagcacattggcaaccagtgttattacagcatctaaaatggacaaacgagttgatttcatcttctgtattagccaccaagccaatcctagatgcaacaaccaaccgaatcacaaaagggacgaacccacattggtctcgcgacctcctaacagaagagcaaatcgtcctgatcgagttagcactccatgacacattcgtggcattcgaattggcgagtcattccaatgaattagaaataataaaggttgggtcagactattacctgccaaacaacacatccaggaaacacatggtcaatacaggtttgatacacatccgaataccgcagtgggccttgaatttaatgcttacgttaaccgagccaggaggaaacgaccaccacttgttacaagcggactggaatcgtgacagcgatttcgatctatcaagagatgcactcggacacttacaagcggccattcgcgtgtacaactccttcagattgctgcccaaccagtgggggggaaagatgcccgcgcacgataaagtgccaatgtacgtgaatagtggtgttgtgccgattttgcaacttccaccaggggtttggaaagctcttgaccgcatatactacgtgaccaacagtggtctcatcccggtgaaattgagcccaactttcattgccggagggtggagctcacccgtcgctcctgggatattcaacaccggcactgtgcaaatgatcacactcaagcagagttgtggcagcgccatacgaacaattgtgtctctgatgaaagaaatgccacacgaatcaacttgcctggcaaagatgcgagattcttacatgtttatcggcccaggcggagccgggaaaagcacgagaattgctgaagcttataagaagggtgacatagttgtcagcgccacaagaggatcgatcgcttctcttaagaacaagatcaaggtcaaagacaagaaaataatatcttttgaaaatctagctagtggggtcaccactattgaagcaacagtgaatacaatcttctttgatgaatgcacactactagacccagtattgttagcgttcgccatagagtccccctacatgccggaaattcgattctatggtgacaatacacagatagctaataaagattttgttgactgccctggtactagaatggaaatcagcctcctggacttctgtaaagctactgagaccaccaacgtgcaatatcgcattggcgagggccttgccacggaaatcgacttggttcgaccaggtggctacaagtcgtcaccaggacataaaggcactaccttcgccacgatggacgttgtgatggtagatgcaaaagaagtaatcaatgctatcaaagaacataacatatccactgttcttgtgttctacaagaagcacgctaaaataatgaaggaagcattagccggtgacgcgtctttaacaaaagttgtgattgaaactgtccataaattccagggcttggaagcaaaacgtggtatgattatacaggcccgcatgggcgacagagtatacatcgaaaatgacccgacttattgtatgtctgcagtgactcgattcagtgagcatcttgtacgggtttccgtggacatgcacaaaggactattattgcgcaagcgattgggggtgtcagccgttgcaagtggtttaaatatatttagaagcgttggcgggtcctgggacgatgtgttagccaatgtccaaaccggaaagaaacaaatgcactttacatataatgccgatgtggacacagacactcttgatgttaacaagttacaaaagatagcaaatgaccgtgcacgtggtactggggtagtgatcaaacacacactttcagacgacaaactaaatacagtgagcatgatgtttggtcgtagtatcatagagatagatacagacctcagcaccatggattccaaggtggtgagcgatacaatgggcttggtcgaaacttatgatgtaatcaaagaactgcataactctatcaaggaggcaaaaggatctgaggaagagctagatatgcacgatgtggtgcatatcagtcacctgaactggactgtcctccagggactggtgggcgctttgcatgctatgcaaggggttttcgggacagtggcctgcactattcctaactacaatatcgcgagcaatggtaaatcactctctgtttactatagggcgcaacgcgtggcagtcgtaagaatgacagctgctgagcaagttgtggacttagaatggagttctgcggacattcaggttcaaaacattctggtggaattaggtttagatccgacacatcgtcctaacaaggttcatagcctcatatcgaaccacccgtacgggaatttgcatacgtacatgagtttcaacgcttggttgcgtaatgcggacaaggcagtgaacgtgttgatcaagaaattagtggccatggatggtttgcataatttaacacaccacgtcaaccagaaatggttggacaagcttgatacagcggtgcaaagtaacgtctcaagtttgacccgagtgaccaaaacatcgagcgcagacaaccaggtggggacacccatagtttacgtgaatgaggcacgttggcccataatagtgacaatgtccaccacaaacgatatccgcatgagccccctgcatgaagtattagatctcgaatcagactttctcctgacagctctcgataatttctttgacagcctagccgaaagtggcattgggttacttctgcgcgggctgggatacaacctgaatacaagaatggcagctggcatcgaaggcctcatcatgccactagaccaacacaaagagcgtggagataaagtgtatcatctagttgccaacacacaagggcgtcttgcctctcgtgccctcaaatcagtagctaaaccaatgggtctaccagttaatttgggcaccgagatcactaatttgttgaaaactcacatgcctggcttgagtgtgcaattggtacaaagcgccgctggtgtggaccagttgtatgtactagagcagagtgtcttgatgtcattgcaccaccacagagacgaatacacggtcgtcaccaacagaccagccaccatcatgatgtgtggccaccaaaacagtgtggtgatgatagagccatggcaacataacggaatgaaattacaccaaaatggcatcaggatattctcggaccatatcgccaacttgttgaaccttcacgtagaatatgctaaggatgacagcacaaaaccgaaagatgataacgctgcatacaacctatacttggtgaacagtgcaaagaaaaacataaaagctctcgacggtccttgggtaacaaggagtggtaacatgcgtgatcaaattatcgtgtcaccggagtgtttgccgacagatgtcacgagtgtggaaactgtgctgcatagtggcaacagagtgtatacctgggtccctgacttaaatccactattaaaggcggatgcaatcgaggttgtcacagctggtggcatctctcatattaagaataatggtatatcgtgcgttgtcagtctacccacgatttggtatgatatactcaccgcccgagcggtacaccacacgccaaagggaatgttatatgctgaaacactcttcacccttggccccacaagagtaatccaactcaaaatgcaacgacaccgcttcctactcacagcgccattagatcatgcagtggggctagggatggtcaaagtgagggtgccagtggtggatcttgacttaatctccgcagctggacacaaaggtatattaacaacgaggaccttcactacgccaatgcgtctaatacgtcatctcagtttagtgctagcccgcgacaaccgtacatttgaagacctacgtgcaacagctcgagtgatactgaatggtgaaactttcaccgcacacaatatatatacgagggaaagcactagtccctcagttgcactggacacagcattggctgtaatgttataccagggccgtatgatcaatggtctgcaaacggcaatggcagagctccaggctattaaatatgacgcggcacatgctagttacgaacacgccgctgcaaatgttactggagtattaggtaggttgatgagtgcttctggcctgaatctcgaaccgcgtgaagttttgaacgcaatagctgaaaccaccccaactcatgatttgaatatactacgccaattgaccattgaatgggataaacttgtggttcagcaaggacatgtgagtcgtgaagtgaggcaacatgaccgtgtcggcaacactacaagcctcactgatattcgaatcgaccacaccggaacagttgccatgccggactctattggccgatttgtgtacaataacttacgttatatagctgtcacgaccaggcacggtccaatcactgacttatacgagtacccaacaataacagcgatccgaggacctacagccacactcgggcacaagaaagcgacatcaaaggttttgcaacctatggctccgcagttcgttaagacaccgcaagcacccccccctgcagcgcctgaagtgacctacgaagactttgaaaacatgtggacaatcacgctaaacaaaatgagcaagacgtttaaaatccgccaccctagacataagctctggttcgacagcatattaccaacaataatagctggccgggacgcacacgacggcgcacatttacaagccgctgtgaaacactttgaagaagaagtcgaagatgcattggacacggcgggattgacagaatgggaacggttagtgggtcataacctctggctgatgaaccttaaaatgcctgacacagtttgggtggggaagaatgaattcaaagatatgttggtcggtataaccgctattggcacgaggggtgacatggtcccaacgatcgcaatagccagcactttgatacaagctggcgctgacgtcattatgtacatcccacatgcgtgggtgcaggattgtatgaaaattgtgcctttagccacattaagaccgggcaactgggatgcagctgaaaaactggcattagcgttcaaggcgaacaactataacctcgaagctgtcaacacaatattaaacagcggtaccagtcataatatattggcagatgttgactggaaagaatctggattcgtcgatgcctggatcggcaccactgcaaacccgcaagctagattgttgagttgggcacacaacaagccttacttacaagcccaatacttaccagtgtttgccaatgaaactgaaacagaagaatggtatgtgacagcataccggaatttcatgactaatcaaatcacgctattgaatctaccaaaattagaacaactataccaagagatacggggtatcaaattggacaccaccagattcttgagtgcacattacggcaacgctattatgtttgaagaagagctgtcgggcatggaacgtggcccgaacaactacagagtgggtagcatgtcaaggccattactgggccaaaatctcaacacactcagcgaagcgacaggcgtgctcctcacgtttggttcaatgctagacggtgtgccagacatgacctacatgttgatagcagaggccctcgtacggaccaagcaacgcatacacgatttacacctgattaatctgccagtcggaaggtttgaacaattggggctcgtagacacaattgggaatgaaaaattcttgaatggtagaaagattaaaatacattcacataacaacgtggatctgcgatcggcgaccaaaatgggactcataatacatcacgggggtgccggcaccaccattggtttcagtgagactagggtgaatcaggtaatcattccagtcgccttcgaccaatcaggatggggagaatccataacaaagcacaagatgggcacctgtctcaagatgcacgggaaaatagaggaatatatcgctgcaatggactggtatgacggaaggcacgaccatgctgtgcaaccaaaaccaggcacatgcgaccggttcttggctagtttagtttcagaaattaaccgtggtcgttcaaaccatgacatcctagcagtgccacacgtggaagatcaaaatgtattcaacatgacggcaaatgtatctgaaaactggatggacttaatgcgctatggcctgagacccacagactggaggcaccaacccgaaatccctctcgtgccagtggggtggcacgttggctacgctacgagcgacccttctataaaatatgatcctgccgtagcggggccctgcaccttgcatgcaatcgcgtatgcgacgaaggaagagttgccaaagctggagagctttgcaaaacgtattggtctcaataatttaacaacgggagccttgagtcatgatgtactcttaatgtgtgccatacttggtttcacaggagtggtacgagatggtatgagatatgagacaatgaacctaaataatggcccattagtctggttcttgaatagagacggccattgcatggttacacacccaccagatgttgggtcaatcaaatgggtgcgtgacgctttgctaccaactgcacccataaccagtgtgggcacatcaaggccagacagagaggtgaacggtgtcaccatgccaaccaccgcagtcagttggtcacatagtggagccacacatttcggagctaatccaaggcaaacattaagcgtgttgcgggcattttgtaggaaaacgattgagcaactacgagacggaaatgactctatagccacgacaaagttaagacaaacacggaaaatgatgcaacggatcaatcgtgctgagtatgtaccaacagaattcaccacctggggagtcactgaggcagatactcatgtggtagttgacaaatgcaaaccaggtgccttgtatattggctgcgaccataatggaggggctcattggttgattggggcccatcataacgcagagttcatcctaatcaaggacactgacgtcaaaatgttgccgttcttcttcaccacgtaccaacaaatagtaaggtttgacacgacagtgaagcatattgtcggtaaaagctacgggaattctttagcacttaaccgccaaacagccaagtacatggaggaactcactggtgaggtgatcaatgtagtggggtcctataacgtagacaagccagtgatagtgacggactttggcaactatcaacatcacatgtaccacgatagagacaaattaatggagcacgtgaatcaaatccattttgtcagtacagtgggcggtgtggtaacactgaggcaggatccggaactagtgaaccgtttgctacacaaagggatagtgtccaccgggttactccgtggcaaagagatgttcgtctatcacggcagatcgtctcaccaaatgcacgagttcttgaagcaacatgatgcttcaacacaaatcaagatgaacagtgcttggttcagcaagccattgagtgataaccggctgaaatggctcgaggcgcaacatgattggaaagatgatggtgcggggaacatggtgtggcaacccaaacctcaacgcacaccaatcaaaagacaatatcaccatcaggaattacaactcctggcagaacaatgtggttcgttgctggcggaaacaatggctacaaaaattaatgagactgacaccatctcaatcaccccatattacggtacttactcattagaaatagtgcatgaactagaagatcacgtcatcttcaatgattatggcgacttatgggaattgagatgggaagctatgccactgctgttgaacacagacacattggcaacgatcgcaaaactcaataacaatactctagacatcaaggtgtgttatgatgccaacacaagggttggcaactcaacgcttgtgacggcagacaaagatctacacttaaataacccacacatattgtattgcgacggtactatagcagaactaattctagaagcaaagcgttcaggcataaccatgacaaaccgaaggtgtgagtgtgcgaatgcatcactctacaataaattagctgaggccttcgacgtcatatgccctgacggtgtgaggacaggaagagagccacgtgggtccctgcatttcaccgaagattctttcatgacatcaagagacccggaaaagatcaatgacttggaaacacaagatcctgcaatgcaggaaataaatctgctacacgtacttgaagctacagcgccttgcccgcccaactatgtggacggggataaagtcttctcaacaaattatagagctaacgcaacagatttacaactgtttgaaagcataaacacaggttggttcctccacactcgtatactcaacccaaataaagtcgagaaaagagggcgcggtgaattcggaattacgaatggtaatgaacaggactgtttcctgtatgaacatgaaatcaaagaaatcagtgaactcaaaaccaagctggttatccgggatgtgccccacactaatccagctatcatacccttgcctcctgaagattggatggacgacaggggaatgaggctgccatgcagtccattcactataaccggtcttggcaacggcaaaaccattattggttatgatgcactgttaccaacttatgaatggatggatatgtggtggcaacctggcgacaacaagttgcccaccgtgctcgctaatgatgactgggcgaaagagcttgacatgcgcagtaacgtggacacgggacagacatgggcaaagattgtgaacaacacagacaatgggtggccgaatttattgcgcgtgagagatgagttgaggcctttccccagcctgctaggtgccacagtgggcagccaatgggagatacatgcgacgccagaacactgggcgcaagacatggagcgcggcgtgtgggaaggttggacaaaagctagcaaggtcacagtgtacgtcaacactaccagttctcctcacactaaagtggcattagcacacaactcgatgtacaccatgaaccccccttgcgtagtttcgaaaactgtgatgaaggggcgcacagacgtcgtgaaagaattgatactcaatcgtcagtacaagcgggaaagaaacacttgggatttccgagaacaccaggcctattggcataaggcaagcgacacaggagaatacgagcagccagaatccaacaaagaattccaagtcgatttcaagataggtcaaactacaaagccatacgccattggcgccccaccgggtgcaggtaagacgcatttgagtaaattaatgcctgggaaatttgctgaccatgatgactacctcgaccaaaaagaacatgcaagactggtcgctgcaggagatatgattgaggtcagtaagttccataggaatgtcagtgtgccgacaaataaaatgttactcacatggggaccatttgatacaccaaagacacatcagttcatcgggtatgtaataccaacccgcaccacgcacagcgtgaacgtggcaaggcaaacatatcaacgcgcagcaagagtacggatattaacacagacagtgtatccagttgtaaagatcgatagggtacatgactttggtgcagctgtgaataaactggtacaagtatatgaaggcaggaaagagaagcctgttactgactacaccttcaacggagtcgagtctttgggtagcttcatttacaaagaagggactgagccaccaaccccacaggtcaaccattgtatgtccaagaatccttggctaccatacattccaccattgaacactgaccatggtgagaatgagggcatagctgatgaagccatcccaattcaagtgatgaatctgtgggaagaacgcgatcaaaccgataaggttgtgctatttgcccccggcatggacaacaagctgcaaaaaccgcacagtgctgaacagcccaataaaatcatcacaaccacaaaagtgactctcaagaggtaccctgtgaggtcacgccccgttaggactaaaatgttcgccgcacagacaaaagcagctatcctccgtatggaaaatcgggttgtttacaagaaagatgaattggatgtggatctggaactgaaaaggttcgccgaagcgtacttcaagactgggtggcaatcaatagtggaacgctggcaaccattgtactttgatcctgcagctgtgaataaatggttacatgaccatccggggtcagacaagttagctaaagaggtgcaagaagttctagctactgggttcctagacgacccactaaatctagcaaacgtgcatgctaagttagagagcttactcaagagcaaccctatcatggactggacgaaagaacaagtgcgaatcattgtatggcagtcaaaagggaaagcggctctgttctcagtattcaatgaagcgaagaacagattaaagatgttgctgaatgacaaaacaatttatgcggatgggctatctccagatgatctatcggcacgcttgcgagcagtacctaatgatggagcttggatattagagagtgacttggaaaaacaagacaaacagacagaaggtgaaacattggattgcgaaatggaaatttacaagagatacctaaaggtacactatctggtggtcaatttgtggcggagagtgcatgatctatggaggtataaaggaacacacatccgaggaatgagtgatgggatgagatggactggccagataaccaccgcactagggaacgtaatagtttgtatgttggcactgatgctgatggtaattttgatgtggtcatcactgctaattattttattcttgggtgacgataacctgacgataacaaaacggccccctgacgcgacaagtctacgctcatacattaaaaatcattggaatatgttgtctagcgcaacagttaacaaatatcatggcaccttcctacaaatgattgttgcaccaaattccataggcactttcgatatcggaccagactgggtgcgtttaaggagtcgcttcgaagtaacgaacggcggcagcagtgacccaagcacaacagtgcttgagaggtgtgcaagttatgcaatgatgctcggtgacactgatgtgggtcgtagattaatggataaattgcaactagatttgccattggtagcttggtatgacgtgcccagcataactttggctatacaacacaagtactctaaaccatacgagtgggtgaggaacgagctggcagagctcgaggccatgatcaccgaaccccatctatattaccaggaatgggaacatttcaccacagtttaacaccagttgccccatgggcgggcagggacattccctgtccaatgctcactttacaccatgcccataccgggaaatggccattaataatgactttgaaagatagcatgaggttgcacttcacgcaacggggatgtgtggtggacccaaatggtgacttgtatgaagctggtagcgtactggtacaactaaacgaaaaggcaccactgacgacaatggaaaaacggtcaacatctggtggtagccatgtgaacgcggtttcaaatcactataccacagcaaatgcgcgcatcgcagtacagagccacttggatacgagcaactgggcacaaggtgtgaccactagggatgtaattagcggcactgatgctcatggtctgtcattaaccatgtgtcaggactatgctctgaatgatgatgagctacaacaaatcaaggacatcgaagcagacctcaataaactggatctatatggcgcagtatcg

SEQ ID NO: 807 - DNA, 14243 bp, Hordeum vulgare alphaendornavirus
  source 1..14243: mol_type = other DNA
gtcaaccaaccatgtacaaccgaacagtacatgagacaggcaattcgtcaccaaaacaaaaagaggtcgagtggcttaaagccactcgacctctaaaaagagacgtgaataaacgatggaaggcaaagctgggaaaaccaaaattgcgacaaaaaccattaagattgaagcgtctcaaagggcaagtggtgaaccgatccaacaacatgaacagccaatacgacaacatgaaaaattattacaatcaaatgacaaaagtacgcatattaggtagaaccatggtaccctgtgcattggctttgcaatttcccatgtccgaaccattggtcaacaattacatggaagcaagttacattgccacatataaactgatgtacaaaaacaaagaaagttacgaagggttgcacccgcatgaactggctgcatttataaaaggtgttagattaaatgtggaagacagtttcaaccatgctggtaacaaattattctatgactctgtcgaacaagaggtgtcaactcacactatagacacaccaaacgatccaatattgtggcaggcaattagagagatcgaagccaaatacggaggggccattggcatgcaataccaagctctgcgcaactgttggacaagagttccgcacctggccaaggttggtggtagacaccaactgttgatggtagatgcagaaccatgcggacacaggcgttgcgcggagtgcggaatcatgaatggctactggatccctggcgaggatggattatccaatgcacactgcggggcttgcggcacttcattagatttcgagagacaaactccagagcctctcgacacaccgccaaccgaagatttccagcaaatcaaccaacccatgggtgccttcgaaatggcgcagatggaaatcattgaacagttagacggagtaggagatttggagggggtagcactgaagcaagcaattgaaaatgatgaaagactgataagagcgatgatatcaagggcgaacgtcaagttgagttttgttgatccgggcatgacacctgaacaacgtaaattggtaggttcaagcttcaaaaattttatcttgatagacaaggtagggccaataaacgaacatgccatgattgcagcagaacgtcagcttatggcacaagttatgtatgacatggcagccggaggtcaacccatagtggacattggagggcctagccccggttggacggcagtcaaatcgtaccagacggtgagccccatcctatcaatcaaagacataaaacggttcaacaattacgacaagatgccggtgcactgcacacacaaactgaaagaatgtagttgtcacacgggacaagcaccattaattatgagtgttgacagcttgtatgatatatcaccaaaagatgtcatgaaatttatgttactggccaaatcaaattacatagtttactgcctgagcacagccacactggaccactccacaaacaagggtgtgctgccttgggatcaagggctgtggataaagcatcaaggcaagttggtgacaacattcaatgggtcatcttcaacgtatgaaaacaattgggcccaaaccttatggtggaccaaggcagatgtgataatagtgggggaccatagcttatgcatacaaaccctaaaagtgtgcggaaaccacattctgcgtgtagccacaatatgcaacgattacaaagcacagtttttctcactaaataaacccgttataatgagctcatcttccagtgtatgcatgccaatacctgtatggaaaaatccaatcagtcacgttgtcaagaatgtggtggagtggaggacggtggccgtggaaaaagaatttcttaaattgctgttagtaagagcgagcgcaggtcaatgttcttatgatgatctggtcaaatatgcaatagggctgggttatagcaagtacacactaaaagataaggtaatatctatgaattatataactgcggatatggcgttaaaccatgcgttaatagcaaaggccatcactgatagaaagctgctggaatcaacttacatcatggcacacgacaaacaattttacgattggcataacatgagccagacggacgtgttacaaaccatgggcacgttaatcttcgaaattacaaaacacttgctctcaaagtggtctgcatccgacgacaaggttcagtttgtgtttaacaaagtagttgacggtatatctgaatggatagctgatccagcatggtacaatctggtggaggcgatcacattcgatgacattacaaaaatgaacatcattagagtgaacacatccagtccggacacaaacgaagccatcatatgtgaccatcacagcgaccattgcagtcacactgtacaactgtcaccacattattgtcaatgttgtgggttgtaccccgtcgtggccggtgaaaaccgttgtggctgttgcaaaagcgatcactgccaccacaagtgtcaccacaagtgcacaaacagatcggagcatctcgcgggcacaaaaacaacacctcgggaatgcacctgctgtggtgtcgagtacgatacatatgtgtgcgttgtctgcaacagacctgatgggtacagtgtcgtaacggacgcagaagtgaggaaaagagtgcatgaggcagagttggctgacaagcaaagaaaatccaacttaaaacagtctaaaacacaacagtcactcgaacaagagggtgacacgggcagaggcaaatcagcaaccaaaactcacagcgctgatcccgacccaagtaccgccaacgcgaccaacgtggcgcatgcagcacccatcacggagccaacagcaccacttgcggacccatcgagtgaccagcgtaacaccgccacaccaaccgtgtacgatttactgaagctgcacatggacgacttaatcgaaagctccacaccaaggctgtattcagatgtgttgagttcatccaccgcggagtcaacaccccaggttaacgaacagccgaccaggcaaggccgcgacccaccagcagttgaaactcgggagccgagcattaatgttgtgaaaccaatgatgacaatgagtatcaatcacccaaccgacataacaaccatcacggacatcgaagcgggcaatgtcgagggacgccttttccttgaactggttaacctcacaagcttggaatttgctaaaatcatagctgacaatgagcgaggatgggcatgcgttgaaagtgaaacagaagtgaatcatactaaaggtttatctcaaatcaaatatgttgggaggaatattacggtcacaaccccaaataattttgagatagttgaaatcactgacgttagtggccaaggcaaccaatgtggttataacgtcatcaatgacaccgtgggagtggacaatgacgtgtggacttcaattatcagttcacgacaaatgtacagcgacatggaggtgcagcaatactgcacaatgatgaacctaaatttgttgctattgggtaggacaaacacctttttccatcgcccaaacacagcatcagacacattcattgtcatgcgccattgcagcttggacagtccagaaggcactccaaaagagttatggttcaaacattggcagcgcgcgaatgtaaaagttaagttttcaagaccatgggtcccgattttctacccatggttggaaagggctgcctgggacaggttcatgcttgacaacagaattaacgaagacttttggcaattagcaaccgagcaaagactacaattgatggttgaattttacacaaacaattttgtgtgtagcaacctaaaagaaggatatttggccatgctaacaatggatctaaaggcatgcccgcccgtcatttacaataactcattgatgatggaccaaccagacacacacctaaaaggctgtgtggtgagcaaacaaggtgcggcaaagttaccatacgctctgacgcagcaccagtccatagagcaagactcaataatgggtgcccccatcaatcagcaaccaccaaccaatgagtcagaactggaagtgtggttgaacaatgaaatcaagctagagtgcattgattatgcatacaatatggagcacatgatgttattggaagaagagatgcattttaaagagtggcagacagtcaacgtaaagttcgtaggtcagcgtctacgattttcgaaaggcttgttcaaaaaaattaaaacaggtgacataatcatgattaaagtggcaggttacaaaatgacaacaacggtgaccatcagcatgcgccaagtgctttgcgacaagccgtacaccgggccgacaattgaccaggccctggtgggcgtgaacaaacaaagccatgcctccaaaatggcacaagtgatgacgttgttgagcaaaaccctggacgccaagcacatatgggataaattgaaatcagcaacagtgatcaagggcccaggtggcagcggaaaaaccaccgggctgcttcgtgaagcacacaaaggcagcataattctaactaaaacaaccatggcaaaaaccaacatattgaaacacaacccaccctgccccgtcatgaccctagaggcataccacaaaaaagatgaccaacatacaaaaatactcatagacgaggccggcatgttctcactgctagattttgccaccctaagaatgcaaacaaacacacaaataattatgagcggagatttattccaaatagggcaactaattacccacgtacacccaggaattagggattaccaaccttgtatcaattttccggcaaacgtgaccacactaaattcaacatacaggtacggcaagtctgtgtgcgatgtgttgcacacagctggcatgaacgtgacgtcgttggcaccatatgacacaaccataactctattagacattaaggaaatcagattgggaacgattaaagagttagtcaaaaagtacaccccggacgcagtattgacattttaccaatcacaaaaaaatctggtggaatcatggcagctggacccagatacccacaccgtacacgaatttcaaggaaacgaatgtgacacagttatggtgttgcaaggcccacaagccacagcaaccacaggaatatggaataaaccagaatattgtatttcggcactgactagggccaggaagcacgtggtgtgggtcacttttaatgcaaccacgggcatgaacatggtacaacgatgtggtttaagcccagaactgagggccacccacaacaccacatcattgacccaaacttgggcggacatggtggaagaagaccaaaccaaagaggcaatgcggggcggtgggctcaatactgacgggctaaccatttacgttggccgcaacaccaaccacgtcacagatttaaagtccatgaccaccattaaaaacaaaacagtagtgggggacgaagaactgtttgtagtgttgctgcagagcgactggttaatgggcatggttgacgagaacaaatattatctggtggccggccaagaactagccaccatgaaagagccaaaaaatgtgaccgattggaggcgcttgctgtctgacctcacaattagcgagcaggcaccatccagattgctgcaagcagccagcaatttcttctccgcaacgatgattttcaaaaacaacatggtgcatctctctgaagacagggccgtgttgtacgtgccagacacacaagcaaaactaaccgagttagaacaaaaaataagggctaaaaccaagctagtgcagataacaagaacccacaaagaattgaaactccactttctgctcaccacggtggggaccataacaattactgggcgacacagaatagaagtgtttggtaatagggcgctcaactacttgacaagtcatgttgatcaagttaatgacgctcaattcaaggcatgggttgcacatttgatagacaacttcagatgcacagcgtgcgcagcagagatgtacattgatccagtggcattaactgagcacttgtcaaatccaaacagtgatacacaatggaccgggtgtagcaggtggagctgcgaaaatttcaaagccccaccaagctccgaagaaaactcaatcgaagacgtgatggacacagaatcgtcttcgtcagaagaggaaccggacaaggaacctgccaatggcggcactttgctaggcgacgaagcagccacaggccaagagtgtgagcatgaatcagacgaagaatactatgacacgattgacaccattcacgtaaaccccacgaccgtctgcaccacaccgcacaacagaagtggccaagacgacgttaacaacgaaattgttcaactaatgtcaatagcacagccaagtggagggcagaccgcagaaaaccaaacagcaacaacttcccgcacacatcaatcatcaccaccacccaacccccaacaacaggagcgcacattaaataatttggtggtgtcaaccttgcataacaaccaacccagacgcacatcaagagagagggtgatgcacctcgtcgaacagtacgcgcaacacaccaccgggtggattatctttccgcgatgcatcagcatcaggcatatgcaaacagctctattacatggctgcccaatgcactgcagatggactctgcaacgaaacgaaatgtgcaacatttttaccctcatggccgggctgactagggtgctcaccattgcttttaatagagcgggcaacgtggttggtcccatggacggaagtgtagcggacgatatgtacatcacattggtaacacatgccgtggaccaatggcggttggtggcttcgggtcaaatggagctggatgaagatttagcattggaggggttgaaattcattaaccaatcacgattgtcaccgatccatgtgcataggcatgacacaattgtcattgatgataccgaatggccggcatggatcggcgcctccgtgaaggaatatgagccatttatgaccagaccaagataccaacaatccgtgacacaccacgcaataaagaccatgctaccagaattgcccactgaagtgtgcgggtgcgaaaccaaaattcttgacgaaaacaagatatgcgccacatacccctggttagacacgtatctaatgacacctgatgaacttgcaagttgcattagttggatccaattcgtgcagtatcgacaaattgggggtctgaaaacccacacagttatagatggcacagtagtggatagcacaaccttcgggggctgtgcactgtgcgcagggctgaagatgacaataaatgaggaaattacaatgttaatcaatagtagatccggccccgaacccggaaccatgtgggtcaacatcaatcatgtaatacaatatccacatgtgatctcagagctgtgcaaaattctagaaatgcctggcatgatcatgcattacccagatttggagctgtattggtccgtcaggcaactgaccgaaatggacggcatgatacaagacttcggccaagccatgtcgttaattgagcgactcagagcaggagttgattgggtgatagaaagggtcaccagcttcagtttacaatggaagtgtgaccaatataacacagtcaattcggagtacgtgaccatgctgggcaaagcactgttggacgcaggggttgatccatcattacactgtcatgcaatcactcatacaggcacactattggtggggctgccaacaagatggtcagcctcgggccaaaccattgttatatcaaaattcaagggcagatttcactgcaccagtcacgcactgtccatcacgcagcgatgggagtggcaaagcgctagtgacatgctagtggaggcagtaaaacaccgcatgctgatactctttgcaaacaaattgagtggccgcagagagttggttcggtccattttggaagattctgtagccatcaacctggaagaagtaagaagggccatgggagcagttaagctcaacttgagtttggattaccacagggagcacaacaccggggtgaacgctatgttgaacgatcgcaagaacaaactggtgcagggacaactcgtgggcccccaccaggcaatgtacttgtcaccaaatcaaatccggatgtttggcagagatattaatagaacatgttgcacgcacaacttgacagaacacggcacctggctacccgacgaagggttatttgccacagcggaacaggtggcagcgaaaataatatctggctggtgtgggaaaaacaaattgtgcacatactcgggtacatatagctatatacctttagtgaactctagctggaacatgaaaagtgtaaaaccattacgtagtacaccgctatacagtgcgtgtgcactagccatgaatggggctttaaacaatttgatcacatctattaaaaacttgaaagataaagcagaaaccgtgaccgggtttgcattgagtgataatgaaaaagccctgatagccatgtgtgacaaggttgcaaccacaaaaacaaacccttggtgcagcagcgagtcagtcagtgatggcgacaaagccatgttgggaagtgagtatttaggcctggactggcattcgttttgtgagcaactggtaaaaaccagtgcaagggaaacattcattttggtccccgagcaagacaatcacagcggtgattactacaacatccatgacaggcaagagtattttgaatgtcaaggggttgcgagcaccacattaataaccctcaaccccaccacatggagcaacctgcttatcaagcacagcatgaggtacaacaacaaaataatacacgcagaacagctaatgtcaatattaggtttgcggcttgtcagcatagtggtgacctccccaacagtgtcagtgcctggccattattcaccatgtataccaaacaacagcaatcaagtggtctacaaaatcaataccccacaattgtcatggaatacatccgttttcagccaccacaagacaacagtaaaggtggacaccaaaatgtaccgccatctgagctttagagttgtgtctgatacgtgcagcttcgaagatttattgtcctacgccagaacgtacatgcaaactaccacctacactcagactggatactacagggagaatttggaccaaatcaatgatttgcatctcatttgcgcgtgcgtttatcatgaatatcagcagaagaagacaagctggtgcactctagccgcgaaacattgtgatttaccaaccatggatgtgggccgggtaatgacacatttgaacaccaatttgacccatgccgcatttaagctgatgcaagcatggaagttgaatgacggaactttgcatgacattaaattggcttccaaagacacgataggacccgagatgacagacataatcaaaaatcttgccacaatgaacattgagaaaaaagaggtgagccggcaaatcatggtacaaaacggagatcgcgctttgccagacatcacaacaaattgcccatgtgagaggcaaatgactagatccaacgatgtagtaatgccaatactgggcggattggtcaatgacggatcattgctgacagagtttttggcggaagaactacgatcaaactcaagttattggtgcttaatacaatccagcactgacggcactaacacggccgtacagttaggggacggagttaggcgttcccacaatttgtcaagtgtaaatctcaaaaagaaacgtaggtgcaaacaccccggcggtgaaataaaccttacagagaagtacctacagcaaaggatggaaatcactgccaatatgagcagcacgaacgacactcaatcacgtgagtcaactggcccacctatcacaggcacatacagcacaccaacaatgaaccgatgcaagaccagtggccatgaaccatcagtcggcaacttacagcaacctgcagcgagtaataatgaggacgagggcaccaccgaaagtacctggagactaatggaactatcgcatgtcatcattaaacgagtgtcccaagccgtcaccagcagggtgggtgaatgccggcaaaataattgtaaggccagatccaaggaaatcaaacgactgttgaaagatttagcttcagcagtgtgccacaagtgcaatacctgggcagaggagcattttgcgaccagcaagggccacgaagagtctggagccacggaaccgctgaatagaaccacaacacccgagccaacaccaggcagcacaagacccacaggcggagaaagagtgtgggtgttgatgtccccaacacaacgcgttggcatcgtaatgcaagaattaaaccaggcccacccacatgccgagctctcacaattgagaactgtgactagtgacaagagtcatgacaacgacaacatggacagtgcgatacgcgcaaaggccgaccaattgaccgagctaatggagagtgggtttttatcagaatttgacagggcgaacaccattagctcgtgcgacgataacatcttggaatgtgaagagcccacgacgtttgttaaaaagcagtggcagcagtgcaatgtggactgtgtgatcacagaagagtcccatacccaaagcgacctggaggaaccacagttgaccaccggagcctccgagccaacgtcgagcgaggcacaatcacataatgacaaaaatgcatacgcacgcatgtgcgacaagacccacaagctgttgtgtgatacaacggctaacaatgccgggttgatggaagattacattgaatcaacaacactagagtggttgactgaagaagcaaggcaagccaatcgtacgtgttggtgccatgtgaccatgcccgaatgtttacaagagttagtgggaattgatgcatgccatgtcgttgtcaaaccatatgctcacattacaggtgtggccaccagatccaaagaaatatacaatcccaacacagaaggaaactgcgtggtaaatagcctgaactatcttgagcaacgccatcccagagtagacaaagtgatggaaagggcttgcggtgtgtacgggaagaccatgtggttgacggagtccgacgcagcagccatcagctggttgtgcaacctagaaacccgttataaacacaaccaaactgtgcatgaattggctactgggacaagcgctgccccgttgtgcataaatagagtggcaggggacgcagtagaccattgcacggtgcacaacaccactgtcagccatcgcagcgaaaagccgatgcaaattagcatattgagcagggcaacaacaattgaaatagagcaaaacatgtgcactcacttggacatccaagttgggctcacagaattgctacacgatttgaacgaattagtaaacttccaaggagtggatgagtttgtcgctaaatacagaagcagtttttctactcaaagggaattagaggcaaacttgcgattaaccggccaagtgcacaccatcaggaccaaatccacaccaatcattccaggcgagtgggtaaattgcgccaggctaaaatacttcaaaaacaccagcgacaaattgaaaccaggagagtgtgtcctgtggacagatggcgtgcacatgcattgggccgctgtgatatcttcaaatagacacggccagtacgtgtggacaccatgccccatgacgaccgcagttcctgtggtactacgaatttccatgaagtgggccaaaccagcaccacagtcacccatagcaacaaacacaatattgggcgagatccagcatgtcacagcactcaatgaggcgaccgcacggcacatggtatcacacaagctcgtggtaggtaaaccaacaattaacaatccacatgcaacagtgctggttgtagcggattttgacaatcgcaagcatcataaattcgacgacagaacggtcttgcgttcttggaatagagaaaatattgtggtgatcaataagtgcccaggaagggtgccaactgaagtgttttttgaggatagcgacatgatgacagcagtgttgtaccagggcgaccctgagattcacatagtgacagaccacacctcaactgcccattgggtcaagagcttcttaatgagaaacaagacgagatcaacggtgaagcgtaacgtggtggtaatttcagattcttggcacacgttgcaagaaaagaaaacgcaggaaaggcttcaacctcacgtgcacaagatcaatgacatgtggcacctaaacaaactagttcctgggacctttactattggcacggaacaagagttgtgccaactattgcaaattactgaaccggatttaagtgtgacaggcctgttagctaacctaccgttgcagctaacaatacacacagcattccacgaacccttaatgcacaccagctaccaccgaagccaattaataatggttcgcaacgacaaatatgtgcggtccgggttcgtcaacaaaatacaaatcaaggcagcccaacgtggtggttcttggatggaaatcccagcaggaacaactgcaggaaaatggtgggaccaagaacaggacgcacatcaactgccaaacattgacgtgtcaataggtaaggtggaagccatggttggtgcagccataactaacatcccatccactcagaatcgaacatcaacgcatgaagggaaaaccgcaataattccttggatggactaccccatgtacgtcgacaccagcatagcggacacaccagcattagaattggttccagcccaaattatggacatgtgggacaccacagatttgagtgggtatttagacagatttgcaccagaaaaccagttcagcatcaaagtgaaaactgtgcccacaaagttggcacagtcgataaagagcacactagttaaatacccaatatacagcaggccagtatacacaaaaatggccaaccaagaatttaacgcagtgacaggaaggctgggtaaagtaacacagtacagagtgggggattattgtgcaatcagcgaggcaaacggcatagcaaacacatttttccaaaaagattggaagcatgtggtggcagaataccaaagcaacacaataacttataacacagacaaagtcaaagaatggttgcagggcagacctaatgtggaaagtatagtcggggaggttaacaacattctaacggaaggatttatgaaacacccaatcaacaagctcaacgttcacctcaaactggaatctctgttgaaatcacaaccagttgtggatcataggcaaacaaaggccaggatcttagtatggcaagcaaaaggcatgtgtgccatatacagccccgtgttcaaaatggcaaaagacaggttaaaatcactgctaaacacaaaaactgtatatgcagacggattgcgtccggaccaattagcactgagagtgatgcaagcggatcctgccaattacatcatggagaatgacctggaacaacaagataggcaaaccgatgacaaactgttggatgtggaaatggcaatttaccacatgttgggtgtgcaggaagaactgttgtcgctatggaggcagtgccataacaactggaattttaagggaaggtcatgtcgcggagaacgaaattggatgaggctaacaggccaggccaccactgcactaggcaacgcaataaccaatttgtgcgtgcattggcggctgtgcagcaaattgggcaacgattggaaactgtttgtgttattaggagatgatggagcgttattgaccaacaggacattgtcaaacaaggaggtaaaaacccacggaaaattgttgtataacatgataatgaaacccaatacacacaataatgtcggcacattttgctgtttcaacatatacaagttgcccacaaaccgatggaccatgggccccgacattgcaagactgcgaagacggtttgaagtaactaacggggcgtcagaggccacccttgtcaatcatcacgcaaggtgcatgtcatattgttgtatgttaggatcaatattacccattcaacaattaatcaaggagaggggttacaccgtagagccaccaatgtggtatgattggaactccaacgcaagagccacagaggacaagtaccactggctaccagggaaaagtgacacagagctgcgcatgctgctggatatgatgagacaaacaaactacatcgatcataaactgttgcactgggtagaagcaacccgctagtgctcctacccacgttttggtgacgaacaagattgcccccccccc

SEQ ID NO: 808 - DNA, 14729 bp, Hot pepper alphaendornavirus
  source 1..14729: mol_type = other DNA
gtaaaacaactaaggttttatgactactaagttgtctagaccttttgctttacagttattgggtggctctcgcctcccgaaaactcaaactcttcatgggtgtactggaaacagtatacccatgaagaaaataaataagaaaaacgattgctccgccagaaaagcattcaggcggagtaaatttaaatttaaaataagtaaacaaaagactatatgtcccgcagttatggcacataggttggaagaagagttggaattcgtacaatttggaccagaagagtgtgttcctgatttgaataaagtggacattagaacaattagaaatatgatgttattgttcgaacaagaacattgccacgttgacgtaactgaggaagacgttaaaaagtatttacagcaaagtcaattgcaaagcactgaaccattttatggtggtcccagtaaaatgtattatgcaaattgtaggccaatgctattaccaccctcaaagatagatggtacaaagactgaagcagcatctagtctgctaacaggtctaatacagaaatttggaggtagtgttataaacatggttttattggactgtgcaaacaattactccatgacaccgcatgtttataagataggttcttcatatggatataaagctatggaactaccaaatgtggaagcagcaatgacctgtgcgtgttgcggtattgttaatttggtgtggctactagacgaaactgaagggcttacaaaatcaaggtgcggtgtgtgtttgcaaccattactaattgataaaatgctaccagaatgcatagcgtggggtatgttagaagtagtagatataacacaactgagagttggtgctattgagctcaacaatgcagagataacactgcaactagatgggcaaccaccattaagtgcagccacgttggcgaagttgatagaccaagatttgaggaatttaaggtcagtcatgtcacgcgcaatgagcaaaacaatttacgtgccaaatggattgacagactatcagaagaaagagttggccattgcggttccagcttacaaactcttaccgatgtctggaactccaaacccacatgccatgttagctgctgaacggagagtttgtgcagtgactatgggcgacaaacttaagcgaggaaagaaaatcttggacatagggactagggccaatttaacaggcaatgatagttggcacggaatgggaccatgcctggattggagagacgtggaacgctaccataacaaaccattgacagaaaacacctgcgaccacactgtaaaagaatgtggatgtttggatggagaacaaccactgtcaattagcgtggatgcaatgtatgacatagacccagcagatgtaatattattgatgaacaggactggtacaaaacaattgttcttttgcttgagcacagcggaagttgattttgacaggacgaatggcaaattggcgcatggtcaaggggaatggattagacatgaagacaaattggttacagtgttacgaggtgatgacagaccatatgtaaatgattggaaattgaccaaattgtggtcaacagccgatttaatacaggttggccataacgaaataagtgttcaaactgtgaaagttttgggcaatcacataattagggtagccacactggttcctgatggtatggattgtctgcggaccaggcaagtgggggcacagaacttaacacatctggatattgtggtgcctatgattgatgtcgaaagctggttgaacgtgttgggtcctccaaaaatgtgccacaaaaccatgaaactagacttggcattgtacagggcattgtactctaggaatttaacaggaggattatcatttgaaaaattaatagaatttggattgggatatgcccacgccaaatacaccacaaaaacaacaaccatatcacatcaacatgtaaccgcagatgacgtcagaacacatgcattactggcctgcgcagccactaggcgtaagtttgcttgggtctcatcagcattaaagctaaataacaattccaatgtgtttggattggatcctatagaagtgacgaaactaatatcagttgatctagctggcactctagtaatagatttatggcaaaagatgttgccagaagggttcattaaaaataggatagatgacttagtaactcaggtgacatcatggataaatgactcattttgggacacattggattcactgagtgggcagagtaaagtatttaccccaaatgtgtatgtatggccatcaacatgcgacgagactgtcttaaattctgagagggtttgttatcaccatcagcaatggtgtgaccaccctatagcattggaagatttatgtgaatgttgtaggttggtaacatccttgcctaactcatctagatgtgaatgctgcacagtgggcacgacctcgcatgcttgccaacacaagtgtcaaggtgggcacataatgataggagaggcagcagcacacaagtgcaagtgctgcaaactcaatgcactaactgacccatgtaaatgctgtgcaagcaaaataaccaagcacccagatgctcaacaaccaattggcgctcaagtgtacgcagaaccacaaagagatatggcaaagaaaattcaaaattataagtaccaaggtttaaataaggttactagtttaccaaaacacacgcaatcggttggtgcaaccgctggtgaagtgcaagaattggatgtaccacaatttgaaccaactccaaccccgtcatcaattataggtttgtggaaggctgaaagagagaaacggtcaataccaacaataatggatggtggtactacaagttcccctggttacatggcaccaagcgtgagacctactgaagacccaaccactaaccaatcaggagaagatgtaagcatcattttacccaatgacagggaattccaaaaggtagtgctagagctaacaggattaactgattttagttatgtgagcaacttaagatttggttacacagaatctgttgcaagtcaattggcattacccaatgagccaaaccctgaggacagaatagggcttagtgagttaaagtactttccaatgggtatgcagcaacaccaccctgatttgttgacaccaataaacacacagtcagtcggtggggatgggttgtgtgcatattatgcactagaacatggctgtggaattaaattgtcattggaacacatgcaatcagccttgaactgcaagcaacaattttcaacattgcaaataataaagtacggtaacatgttaggttacaatgtggcagtattaacagaagaagccataataacgggtaaagtggacccaaccacagataattttgtgtgcatacttcacacttttgaagctgagactggagcaccacattggcaaccttgcaacgttgtacaaaccggggatttggaaagtacaccgtgttacaaaggaatgttcaaacaatcaaccattaacaaacaattgagtttaataccatcagatgtacaaggaacagaactaaataaagaattatgcaaaattgtgttacaaataatcaagcggacggttccaaaattgtcgcagttaaaattcggtcgagtggaaattaatatgaatactgtaaacggcgtgcacatgctgtctaataataggcttgggcgacatgacccaggtgcaggtttgtttagttttgcagtaggtgaacaagatgttgggctagttgaatgcctgtgtcacgattcgctgccattgcatgagttggatcaattagaaagcccattaaacataaccacaatgtataactgtgacataaatgaattgagaacttcattaatgcgcaacactgtgattcagcttaggcaaacgttgatacaggcaaagggtgtggaacccagatcagaagatgcttgggtaaaagtgtttgcactaacgcacaaaattggaaaagatacaagattgctaatgttacaagacacaaaaataaaatctggtgatgtgatttcagtagacaccatgtttggaatacaagacagagtagtgtggaaattcaatgatggatttcaatgtctagattggttgccaccaacaattggaacccagacaataaaaatttacatcaacaaacggagtttcaaaagtggactaataaaattgatgaccctgaataggccacatgttaagtttgatcaatttaaagagttagtaatgtcctcaaattgcataatagggccagctggtagtgggaaaagcactatgatcgccactaattggactgatggcactattgcaatcgcaaagacaacgtcagcggtaaagaatttacaaatcaaaataggtggaccaaagaatttggtgatgagtcatgagaaatacgcgtttagctgtttgcccattcatgatttggttattgatgaatgcagcatgttcacatggtttgatttgtacttttcattggtggatttaccacgctctttaactatgtacggggaccctcatcagataagtactattgatacattcatgttgggcggcgaacgcatactggacaacatcacagattacgttataagcaaacacacgcttaaaacaacatacagatatggtgctagcatctgtgcactactatccccaatagtgggtgaactgtcaagcaaagcaaaacatgacacaaagctagtggatttaaatttgccattgtgggacaatgatcagcttaaaaagattgtgaaagagcatgacccagatgtgattttaacccaccacaaccttaccaaacaacgattggcaggtctatgccctaataaaagagtggaaacaatacattcatttcaatctatggaaccgaataacgtgatggtagtgcaatataatgaaggtggaaattcaaaaatatttatggacaaacgatatgcaatttctgctgtcacaagagcaaaactaagcatggtgtgggtcagtatagaagtgtcaaacaaaatgactttattggacaaattacggggcactgagctagacatcaccggaggaggtgaaccatctgaggaaaagaaacaaagtgaaacattacaaaagaggttattggaagccctgcaatctggtgttgatgaagaagcaatggctaaaccagtattcccagaagtaggcgaaggctccaaatctgtacgtagtcatgttgagtacaatttggatcaaccagaaactaagcttgacaatgacaaattcgtgactatgaatgatatagacacaattttggacaactacaacatgagcaaacaaccgctattaatttatgatggatggcaagattttgttgaaagatggttaaacaccctcccgaagcaagcaagaatggttgctgacgagagaacgggcgtggtgacaatttctgtgttgggcgtgaaattaataatagttgttgataaagaaagagagtattacagtttgcaagtggaaagtccaaggtggatgttcaacgtgaaaaacagcgtgttgtacaaatacaaagcaggtcttagagaagaatgggtcaagcacgcatttggaaagaaatactcggaagttttgttgttattgcgtccagctcacagagattggtttaaaacggtgttgcaatgggaaccccacttctcaattgtgagagttgaaccaagcaaccaaccagatgacaaggggaaaaggattgcacgggaagtggattcagatggagatgaatgggaggatgcattgagtgaggaacttgtagaggaaactgtcacaaacattgagacaaccacattggcacaacttgaaatgaaccggttgatacaagacagacaactgtgtaaaaattacccagcattggcagaattgaactatgaacaaataagtactctactcaacccgtcatcaccaatgttttatccaatgaaatcaacatcagtgttggcactagtgaatgccactttgccaaatgtgagattaacaaccataattaaagaaattagcggtggatttgagttaaccataagtactacagctcaaattgtggccataatcactgtcacagggcacggattgcagttaactgtgacaggtggtgagttaagtaagaaggtacaagaatctatattggagttgaaaataaagtcatacaacaaagtcgcgccatatgcaggagtgtggcaaactgaaagaaatttgacagatgaacagacacaattaatacaacagtggtacccttggttgacgttcatggccgatgcacaagaaaaatttggtggaaatgaattaaaagcactactcaatcaagacaggtttgatgttccaggaaaactaaacggtttgctaaaatcaatgcgagaaatgcattggatgttaaaggaggagggcgtagttactgaggatgacatggattatgtgtgtcaaatttgtgatgaccaatgcatgcattatggagaagaagtgaaactggaaagtggcagtatagcattagaattgcacctgagtccaacctcaacaagaatactgagattgtgcagcgaatgggcaacattgcaatatgatataggtggaatgtttacattaaacattcaaggagaaaaagtgaaagttgccgcatttggtggctgttcgatatgtagtggattaaaatttacttgtaataacattgagttgcttcgcatctcgcctcagcgtaaagtgggaaatgtcaggaagatcaaaataaattgtgttgcatacccagttttgttgcaaagcataatgtctgccatgcatattagcgtagtggaattaaacgcagaaattgataatgaaccactctatgtagatttattagcggagatggacgaagctttaaaatgttcttggtttgaattgggaatgttattggagcgtattagcgtggctccacaatatttatggaaactattacaaacaggagagtccagctcagcatgtaccatttttgaacatgaaaacgaagaaatcttgaaagaattaaccttgcatgcaccaaatatcgaaattccattaaagtctagcaccccaggacacagatcattgaggggtcgtccgataggtgtgaaatacaagggtgtgaactttgtgataatgaaactcggtgataagtttagttgtgataatcaattgatggcagcaaaatatgcatggacctacgtcccaacaatgatcatggtgcagcgttacttttggatgcaattaaataggtggccatgggtaatagctaaattgattacactaaatgggaaacttgcaaatgttgggttgggccatgattttgacatgccaattaattcgttaaatttacctttaagctatcatgaagccaacaacacagcagtgaatagatttttggtggaaaagaggggtgaagcagtcttgagcacaatgaagaaaacatatcacatagtatttgttagcaagttgcaattgcaaaactatggtccaatgttgcaacgagattgtgatggtatgccaatagaagaacagggatgtgaaacaattgatcagggatttgacatgttgactgagcaaatatgtctcaagtatttttataatgggctgtctaggggagaagtgagtcaaatgataactgattacccatatctgtcaatattgacgtcgagttgggcgaacttttgcacacccccagacaaaaaatatgcatttagataccatcaaaacctagctgattgcaataacatgatggaaaaaatggaacactcttatggtattggaaagcaaaatacggatggttccaaagaaaaggatgggaatggcaaacaggacattttggaatgcattgagttgcaacacaaggaaggcaggggaccatggttcactaaccaagcagatgaaagggtgaaaattatgtcccaaaatgtgcttatgggactggtacaatgtcgtctcaacccacatgaattagcagaattaatgaagaatggaaacaaaacttgtgtgcatatgataatgccacaaatgatagaacgcaacaatcaattatttggagtggccagcgaagatggttatcagttcaaattctggtatcacaactcaagccacttaactataattaacaggcaattgttgaccatgtttcaaaccggtcaatgtgttacaactccacacggtacactagtcatgcattcagcaaatcgaatactgggacattgcatggtaaaagtcctgttactaccaaatcaggctaagttgcccaaatatgttagaccaaatatgcatgataaccagcaaaaattagtaaagttcaagatgccagaaattaaaaatttcaagcaatttataaccactggtaaagcaatagagtacaaagaagtaaacatgtcattaaaactttatagagcgttatcattgagaatgttgcgcccaggtacaacaatagatgatttgttagcgtatgcaagaacctacagccatacagttgcatacactattagttctagaagctcgcagcaaccacaatttgtgactgaactgatggagtgttgtgtgtgcgtgtatgttgaaagtgttaaattgaatagtgcagctgcacgagtaatggacataattagtagcacagaacaccccatagatcaattggggaaaataaaaaatacaatttggtttgctttagttaaagtgttggctgactgctacaaatggttgggactcgatacaaccgttgaaaatttgattgaattgttcacatcggtaggcaaagaaacagttggaaatgtcattaaaaacattgagaaattagtagttgttaggatcagcaaaattgacacagcagaccccattatatgttatcatgatgacatagaccaacatgagatgggcaagataactttggacgacacaagaagaaaggtaaagcaggtgctgtcaactataaaagatagcatgtcatggggagaagaagttaggagaaatagagtggaactggttgataacaacgagcagcacatgcgcaacccagtgtcaacttcatatttaacgagcaggttagcaagaagagttggtaaggatagggatgaagaactagcaaagttagtgccagaaatgtcacagcaatacaacagtagcgaaatgtccacagccgtcacaagggtgattaagaatgtggcgagaaaattggagctaagaacgcaaccaaacattgtgacgtgtgtgggtgatgaccgatggttaagtgaagaaagcttgattagaaaaggtaaagaacttatgaatgattgctttacattagatgatttgagaaaagagataaatgaaatgcgttggatgtaccctgacgaatgtcgcacttgggaaaataaattggtaatcttcagcaccatagggagtagaggtgatattgaaccatacatcgcttggagtcaagtgatacgagaactgggagcagaatgcaaatttttagttcccactgattatgtaggttatgtgaacaattttggctttgaggcattagggctacaagtgaactctcaggatttgataaccacatgcataagtgctgaacggtccaaatggaacccggtgaaattgtatcaggtgtggaaaaagatgtttgaattaatagaaaatttgtttaaattcaatcaccaacagctgatgcagttcgtgaatggtgctgatttggtggttgaaacaccatttacacacattggggtacaattggctcaaaagctgaaagtaccctgtttgtttgcaacggcttatccatgggaacaacaggctggaatgacaactagggctgacagcatgaccataatggaaataatcgcaggtgtagctgcatttgctccattcaaaaaacatatacaagaatggaggcaaaacatgttacaattgcacaatgaacgtggaataatggtacatggtgttggtaacccaatggtatacctacacccagctaagactaaatggtggcgaacatgcaaaacttcatgttgcatgggttatgccaacacaatgacagattttattcaggagggcgacaaagagctctgcattctcgcaagtgaaatgaaaagcattgctgtatgctttgggtctatgacaggcaaaactagagcaaatttaacttcaaagttaatagacaaactggacagccaattcaaaatgatagtggtggatgggagctatccacagccattgaacaaacctaacgtcatagtagtgagagaggcaaattacaatatgttgtttagttgtgttgacattgtgattacacacggtggaagtggcacaacacataatgctttgcgaaaagattgtgttgtttttattgaaccacattttggtgatcaattagcctggatgaaatctgttagattgctagaatgtggtgaaagtgtagccaaattactgtccatgccaatagaacaagtgatgcagaagttgccaaattggacaagaaatgcaaaaatagtgggtgcgcaagtgaggaaagagaaattttatgtcaatctgatttctaacagcacagtgctatggcacaaagcggccgagcacaccacaaatttgttagccaatataagggagccaacacaatcattagaagtaaacacaaacaatgacgtgagcatgctgaaaagagccaaactgaagtggagtgattgggaaacagaagcaacattaacaaccagactgctttcaaaggttcaaccagaaccacaaccctgtcaccaacatagcagtggacaaccatcaacatctagtgacaagggcaacacaccccaagggcccagattgcaaaggccggctcggaaagtgtatgaatactcatatggaggtgaacaggccggatttgatatgcccgagcaaccatccggaattgaggttatagagaggcaggaattaagaacgcatctcggaattaaggctcatggcatgggatcacaaataactagggagttgccacagttgatagcgggtgcaaatactaataataatgacaaaagcaccagcgatgagagcagctcatcacaaccaagtaatagagcaaatgagccgccaacaacaatagaggacgatcagaccacaacagatgtggaagtggttgaaattgcaaccgccaatccagaagacgagccacaaattgaacttgtgacagttgaacaggacgctcaactcaccacaacacaatcagaagaaactccggaggtgcactttccaggtttttcaattgatgtaactgatgaattgacaacaaaaccagggttaatactcaacatgttcgatttgaagccaagtgacgattggggtcccccgatggaggtcatatccatgaacaatgtacgagccatattggagcccaaaagtcaattcgaatgtgccaaagaagtgttaacaatggcaatcatggtgcaatatgagctaactgaagaaaaagcgtcacacattttacaaaaatgttaccaatggttaaaaattgccacaaccccgagggtagaagatatgagagccataatttgtgcattggacttgacactgggaataaaactaccagatggcaaattacggttcgaacacaaaggtcccacaggagaaaccggatttgctgtatttatcactagtggtgtcagcttagggcactgcatattaaaacaagtgaacatattgggttctaaaccattgaatttgcaaaaatgtgtgcaaatggagttgagccgagaaacacaaaccgaattgaatgaattgtttaaaagatatggaggttgtggtgattggactcagcagaacttgccatcattgatattaagtgaagatttagctggacaagtgtgggctgagctggatactacttataccagagaggagtttttatacaagttacaagggacaaacctggtgcacactgcagatcgaatggaccagccattgacaattacaaaatgtaggcaaagctggtcagctgtgttttgtgaagagcaaatagtgcccgaccgctggtattgggttaacgatggtggaacatggcaaggagcaatagcagtgcaattaaagaggcacaaagtattgctagtcaatagtgcggaacaaagttggggcaataaaatagtcattcttagaactgacatccggttaggtgtgatgaaaccaatgcaaaagaaaaagccaattcacaagaaaataatagtacctggtgactgcaaagtgacggcattgaatcaaagcacattgtatgaatctaacttgaattattacggaattgcactaacaggtatacaggatgacacctgtgatttagtggctgtgtatgaatatgacaacagagcacaccacaaatatgatgatagagaatttttgactaagatgggtccagaaaaaaccattggatcaggttttgaaatgactgcagaactatggaacaaaatcacaaatagggagatgccattgcgccatatgattcataaaggaaagcacaaagtggcattggagttctcaaaccaagcacaaagattgacattcacggcagtagcaaatagcagtgaactgagctatgttgtggaaggaaactgcgtgtacattgcaatgcacacattgcaaccaatcaaacaacaatgcttggaagagtgggccacatacatgggtgcaagtggtggaaaagtccctcatgtagacgatgtgctgaccaagtattcccagtggacaacacttgacaagtttttgcaagagcacggaaatgatgtaaatcctaaacacgtattgggaaatgtgaatgttgagcacagtcaagtcagaataatgattcaacctggtaggtctacaacaaaattaacaaacatagtcaaggttgagatggaatacgacccgccagcattgatccatagaaacctatgtgtgactctggaggtgatggttaaccgaaaagcgggtggagtggatgaaccagagttctggaaatttgctggagattttaagcaaaacagtgtgtctcgctggtgggatgcagtaacagttgagaagccaaaaacgaagttcgatgctacaagattcacgcaaattaacacggaagcattgataagccatggtgttactcacagtgatttttcagggtggagcatgccaggaggtgacacaggtgatgcatcaaacatgccatatgtggcagtgagagagtggtcaaatgtggttgacaatgaaatagcaactgtggaaattgcaagctatgacataatgagtctatgggaggacactgatttttcagactggaatgagaaattttgcccgaaaaatgaggcgattgtcaaatcaaccatacctgccactcaattgaaagtcactaataagtatacgatggtacaatatccaatttatagcagaccagtcttaacaaaagcggcaaaccaggagtttaatgccataacaggaagattgcacaacattacaacttatagaagacagaattacaatgtggcgaaagagttgcaaaagtttgttttcacttactttgatgcaagtaaagcagacatattggcatctttcacacaaaataaattaacttatagtgatgcaaaagtgttagattggttgcgggacaggccagacagtaacaaagttgcagccgagttggaggtaattttgcaagagggaatgcaattgcatgctattaacagattaaatgttcacctgaaattggaatcactgttgaaatctgaaccagccaatagtttaaaacaggtaaaagcaagagcattgctatggcagtgcaaagggtattgtgcaatatttagtcacatattcaaagaggcaaaggttagactaaaacaagtgctcaaacccaacatagtttattctgatgggttgagagcggatgagttgtcagccagggtgaggctaacaacaggagtgaaatatctcttggaaaacgacttggctcaacaagacaaacaaaccgatcatgaaatcatcagatttgaaatggcattgtacaaactattgggcgtgcatgaagacgttataactctgtggcacaatagtcattttaattggaaatacaaatcaaaatcggttagaggagaaggagatgctatgcggttaacaggtcaagcgacaactgctttaggaaatgcaatcacgaacatgttggtgcacagaaaattggtgaatagcttagggaacaatttaagattgtttttagtgctaggtgatgacggattgatgttcagcaatgcaaatgtggatgtgagtaagctaaacaatgaaacgaaaataaaacacaatatgatgtgcaaaccacatgtaagtaacactcacggtacattttgctgtatgatagcttgtattacacaagaaggaaattgctcattgggtccggacgtagtcaggttaagaagaagatttgaatgcccaaatggagtgagcgaaataacatcagacaatgctttggctagggcgatgtcttactacatgatgttgggagctactccagaagtgatgggagagattaaaactcagaatttacctatacagccaatgcggtggtatgatgtggatagtattagatcagctgtggctgataaatacaatatgagtgatgagcaagtgttgaatgaagaacggcaactattaaagatgttaagagagaggatttattataaacatgaagttctgcattggtttgaaggaatgtgaaaggtactaaccaaaattagtttgagttttcgggaggggagggcccccccccccc

SEQ ID NO: 809 - DNA, 2273 bp, Jiangsu alphaendornavirus 1
  source 1..2273: mol_type = other DNA
gaaagtcataaaaatttatttattgaaaatcccataagtgatgttgaattcacacctattgacaatcgtttatatgtgacaaatctttatggttatgatagagaaacaattaataattggtttgaattaggtaatattgaaaataattcaatttcaatttttaaatattatgatgaaacattaaatatagaaaccagaccttacaaaattgaagaattattaaatttgtttaaaattgaaatagaagattggataatcaatgcaattaaagattggctagaggatcttaaactagattatgaaactacaacattaattaaaactcataaacctatgaaaataaacagatggtcaaaaattgaaaatgatagattcaaattaagtggtgaatatatttattttatagacaatttaagttgttttgaaattaattataaaggtagtggggtgaatgaagctacagcatggtctcaatttgaactagattataaaaagaaaaatgaatatgaaaataaaatggcttataaaatgccaaatgtggtggatagatctactgaaatggaaaagaaatatcctgatcttaaaaatttaccaggattatttatagatgaaaattgtgtaaatccaataaatagtacattaactacatctacacatcaaaaaattttaattgttgaagtttaccctaatacaaattttggtatagaggtacaaccaattaacttagatgatattcctgatgttaaaacacaagattattgggataattttaaagaacaaacagatacaactattatactaccaactaataaaaattttaagataaaatgtaatatagaaatcaattcacttaaaatgtgttctaaatttgctttagaacaatatccaacaatagctagaccatctatgacacaaaaatttggtgaagaatttaattcaataagtagtagacaaggcagcacaaaggattatcaagaaggtaagaaaatgaatccattatatgaatttgaattaatcaaatctaactattttagacctgattggagagatattgttaattcatatatttctagtccaataacttttgatttacatgagtctttaaattggatttcagaacattcaagaacagcagaagtagctaaagagttaaaaaattgtttagaattagggtttgaaaaatatcaattaggtaatgtagaagtgcatggtaaagctgaacaaactacaaaagtaaacaaattttcaagatggtttgatgaagtgattactagatcgattgctgcacaaaattatgcaatatctgcattattttctccagtttataaaaaaattaaaataagatttaaagatttattgaggaatgatattaaatatgttgatggaatgactacagagcaattaaatcaatatttatctttatatccaacttgtcaatttatagttgaagatgatttaacagcacaagattgccaaactactactgaaattaatgatacagaaaaaataatgtatgaatttttaggattaagtgattcaatttcaaatttatatatgttatgtcataaaaattggaaatggaaaggacatggaatatcaggctatggaaatgcaatgcgtttaactggtcaagttactacagcattaggaaatgctgtaacaaatttaatagtacataatcaatttgttaaaaagaataaaaatcatatcaaattattaatgttgttaggtgatgatataataatgatgtgtgatagacaactaaatgtaactgcacatggtacaataacaaagaaaatttataatataataagcaaagtatcacaaaaatatagagtaggtggctttttgtctatgattttacatacattgggtgattgtccacaactatgccctcattttaggagaatgagacatagattttctgtgtgcaattattcatttaatgacaaagaaagagtaattaaaactgaagcaagaacattatcatattgttttatgttgggtaacattaaagaaagtaaacaattagctaaatcattaaatgaaaatgttgatataccaaattggtatgacgtgccaaatgctattgaggcaaattgtttatatgataatataaatgaatttgctgttagaaatgatattggatatttaattaggttaatgaaagatagaaatttaattagatataatgcattaatgcctagtaatttacaatggaaatcatttaaaaataatcaataatttaatacaatttgacaatattcttttat

SEQ ID NO: 810 - DNA, 15088 bp, Lagenaria siceraria alphaendornavirus
  source 1..15088: mol_type = other DNA
gtaatggcgttctccattactcgaattaatccatcttatagtctgcaagtaaacggggagagacctccattttggaggtctttcctcaaaaaaataaaatataaggagcaaatgcagtataaaacagatgcaattactccttatagacaaaaatataaagatcggccactacaaactctgaacaaagaggtgtcaagtcacctgcagggttggattagattaccaagaaaccaatccgtcacgataaacaaaaacccttggattagaagttttgaaaaactatttaaacataagcccgatcaaatttttgacaaaaataaaatgaaattggtacctgcaataagaggtgaaaggaaaattagagacacagtcggcacagtcgccacaaatgtaacctatgatgatggactcggtaacgtgatcaatttcaatgaactgcacccattagatgtggtgaagatactttacaacgttaattgtcttggaatcgaattgtggaaatcggactgttattctatacaagatttcctaaccaaggtcaaacacatggaattagatgatgatgaaaaagacgaagaagactttttagacgaggatgatttggacgataagttaatagtaaaaatggttaaacctggaagaggtaattgtacaaatgaaatattacaagtgctagacaaaatacttaaaagatttggaggattcgaagggtattacaattacttcctagagaaccatttcaagcattttggatatttagaacacaaagatgatggatcttatgacttccacagtgttaaattcaaccctttgaaaatttgtggggtttgtggaagagtgaaccattacaatcaattcaacagaggtttaagacaagtgcactattcattgtctcattataaacagaaatcaaaagctctcaaagaagattttctaacagaatttgacgaacataataaaccaataaacatcccatggagatgtggttattgctttacagatctcaactacacggtaatagtggagaaatacattctagttaaaatgatagagtacatatgtaaccatttattcgtacttcaaggagacattgaacaattgctaaaattaggctatggagacatttacgatgacttagatattaaggataaagaagcaattaaaagccacgacgaaatagtggtgaacaactacttctatcatttacagagaaagattataactgtggggcaagacttcgatcaagccagtcacaaaataattaatgaggtgttgggaggttgttacttcagaccaactagcaaattgaacagcatcaaaccggaatttattgcagagttatcgacattttctgaaataatagaaagaactctggtgggcagagacatagcatgtctaggaaatgtgttaccaggcactagtagagctaatatccataattggtttcataaccagacttggttttcgaaggatccggaagtggcgtgcagttctgagcacatatgtggtcataataaaaattacttcatatacggtaacttgggattaatgggcgaaccattacataatgtgttaaacattgtggaagcacagagaaccttacaattcatctcacccatcatgacgacatcaagaacgttaccagacggcacaggaatgttccagagaacggaagacaatctcaatttttacctggatggtaaccctgtacccatcaactttaagaccgacacttataacgccttgaattattatcagattattaaatggggtaataaactataccacgtaatcgaggttaagaagttgagtctaacaagactaatggtgatagtaggtccgttcaatgaaaccgtggattacccgcgattaatggtggagaatgaacgtggaatcaagattcaaattaagttgccagacataaacagtttcatgggtggggtgaaaaacttgaactaccgtccaaatatctttgaattaaatgtaaatttattcaggtatttatgtatgcgcaatttgaacggaaaagtgtctcatgataccttaagatcttacgcagtagggttctcactcagacgatttgttgtgcacaacaaagtcatttccaacccaactatagcatacgaagatttagacatgcatatcgtactcagcagagtttgtatgatgaaacttaaaaattgttttgaaatcagttacaactatagcaaagcattaaaatttctaggaccttttagaagcatgataggagacatggaaagtgcattaacagcatcagtgatagggttaatgggcgaggcaatggaatctaccttcggtttgaaatgggagacatttatgaacgttatagatggagctagactacaatctatgttacaaggaataagtaagcaagacttctgggaacaattattacagttaacagaaaacattaaaactacaccaccaagagttctagatttagaaaggaaagcggaagaagaactactattcaacttgcaaagttgtatgcatcattctgtgaattgcaaccatatccatgctaaaactgagaaccgttgttgttgttgcaatctaccgataacaacagaaatattttgtaattgtgtaaaccacaaccaagtacaaacgaacttatttcacaccgaacattacggaagagaagagaatgtgcacgagcaacaaatagtaaacactaccacagacaaaacactagacactattgccaatataattatgttagccatgagagaaccagaggttacagcgagaagggcaccacgcagggtacaaactcaacaacccaaaataaccactacggagttgaaccaaacccaaactggtatagatcaattaagtttgaaatctacaaagttagacaaagagaaggagacagttgattcaccaaaatccaaggctagcagcttcaaatccaaaactagcagcataaaagaaccactagcagaactagatgattggaagagagttctacggcgagggcgagaaaaaccggatgatatggccaacataatattagataacataatgaccagtgctgagcatataacaatatctattgataatgtagaagctatcaacattctaggttacgattttgttagacattgttgtgagactgttcaatacgagaacgatttgaacgacggagtcaatgaagtatattatttaccacatttaccaatagggtcatcaacactaccacgcgacagttttgaagtgatagacaaagtgtacatcccaaattcagggccaatgacttgtgcatttgatgcttatcattatagcaatgatcctggtagcctccaagaaatgattgacattctgggagcacagccgcccttcagtactgaacatttaggattgtatgcaaaatggagaaaagacaacattatggttttgaccgacaaccatgtccacgtagaaaggtataatgagactagtaacacattcgcagtcattttgttcgagcatggtgaaacaaatgccgacataggacacttcttacccgcaacaataaaaagggttaaaccaacggacgtttattactaccatagagacccaaattcaattgcagaaagggatcatatcatcaagaagaggtacggagccatgtatagttcctcatgtttgccaccctggacaccaagagataatcttagttgtgaaatagcttactataacataacggtagatgtcagagtcagtgaagcaatgcaaccaataaaattagaacagattgacggagagtggtttttaagtaacaatccagaaatacgacagcacctagtagaaaaagagaaaattcatgctaaattaccaaagatatttgaaaaatacattagcaagattgaatacggattgaaacttcaattacctgtgatggaaatagaagagttcagacatatagataaagagttaccagacaattatgacaaagagttagaaagtgaattattggagatactaagagtttttgccagattgagtgagttaacaggaccagttaaattcagagacatcaaacaatcacataatggttatctaggaagttggtttggtaaatccaaatttcatataccaagtggaaaaacacacaaaatgaagaaaatggatgtggttatggtgcgtataaacaacaaattcattaaagcaacaattgttggatttgacagaaacaacccagttctagattatgtggcagtgtgtgaacagaaagcgactctcatagaattaaaagagtcaatggggagtcagattagagaactagtggggttatgtcaatcgtatatagatatgaaaacactcaaagccaaactcgcggaatcaaaatttttaaccgggcctgcaggttttggaaaatctacaaaaataggtcaattggcaatacccggagatttatgtgtagcaatgacaacttctgcggttaaagcattgcaggcaaaggtgacgaagggagttaaagtaatgactttagagaaagccttatactctcactccaagacagatcaaactctgtatgtagacgaagcgaccatgatcaattggttatttgtcggattcttaattacggaatcagctaacatagaattattcggcgcagaaaatcaaataggcaagagagacatgagcaaaactcctggaatcaggtacaacattacaatatcagatttcattaaaccggaaaataagaaagtggaacattacacatataggataggagagccactggccactttactcaaatccgtagaaccaaaattaacaacccgtgctagccataaaacaacatacactatcacagttttggatcctagtttaatagagaacatcagcaacataattaaagagagaaggccggaagttatcattacaccatactcttataacaggaatttaatcgaacagtgtatgaaacaggaaagagttccagtagttacaacccatgcttatcaaggtgtggaagtttcgcgctcaatggttgtgctgaaagccgatgccggtaacaaatgggacttaaatgggaatccagagtatttgaattctgccttaacacgagcgaaataccacgtggatataattatatacggtaattacacagacgtgacatcgttagaagatattatgactcaagttggtggtatggatttcgactatcttcagtattttgataatacagaagagagttcaagcataattgaacagagacaaaaccaagagacactgggagaacaacgtaaagaagcacaaatgcaaagcaaacatttaccagaaaatatcacaataaataccatgcacgaattgagtgaagagatggtaaatcaattgaacgaattgcaaatttcaatgcaaggcgcaaaattgtcctaccaaaaacttaatggtgggacaagtgtgacggcacaatttgcaggttcagtgattagtaaggtaactaacatagaaggtgtagtcacagtggaggcaaatccactcattagagggaaaatcatgcaaaatttggacacaccaatagacataccagaattagtcaaggaccattgtgacgccgacagctattcagtagaatgtaaaatgacactgagacaaacgaacaaaattcgggaattaacttggattttagataagacaatagacagggaatcgactcgtacaataaatggaacaaaaattaaaatgacaaaaactgcaagctgtccactgtttgcaggaattgtgtttgaaactgagaacgaaaaattagcaatatccaacggttggtatcacataacaaataggaaaataacgctaaataaagagaaattttacccaggcttaacccctgttattaaatggttacaactcaatattaaagagttgatattggacagtaacaataatataggttggctacaaatcctaaaaggagacatggctcacttcttgtggcaacttaaagagaaaagccacgcaaatacactgtggttattgaatttcctgacagagtctgacagcccaaagtgctattacaataacataataaacacatcaaaatacaacaaagcagcgagatcaataaaccagcccatggtaagcaaccacccttcagttgcagatcaccagaattacataatcaagaaacagaaatggttaaagaaccaagagatctacatattaacagatgggaaccaagtcattctagatgtgactacagaagaagaaggaacaaaatgggagatatttgcagtggaatgtatggcagacatggtaaaaacaggcgcaggtcttcaaggtatagcagccgctgagctagacataccaggcttaatgatcccgctacataagcatttggccctgggaacgacggtacaaaccataataaacaataacttattgaacctgaacaaacagacacggcccggggtgtacgatgtggtaagattagataaacagaactatggtatgcataaacactacctcaagagtcgtttcccaaggatgacaattacaacaggaaactatgaaattactaactcaggcatagagctagcactcgaacaaatattactaaacatgagaggcggtttaacggaaaatagtaaaggtatagtggcatattgtggattgtgtccaatatccatttgcatgactggaaaatattacataaagattgtgctgcccgatataaattcaaacataagatacatgtacgacatgcaaaaaccacagattgattctatgttggacaattttaatgctaaaagagatgctaaaaccgagttatactgggatcatgagactaaatgtgaaaggattttagcaggtacaggaatatactcattgacaatagaagagataacaaaacttctagataaaacagagtgcatgtatggatggatacccacgcatgcgaaaaacacagatgaatacatatatgacagacaattgaactgttatggatacagaggtggaagaattacaaacaaagtgagaaatgatataataaataaggttaataaaggggaaccagtactagtgaggtatgacaagagtgattacttagaggccacaatagtcacagaagtgttcaatcacagactaatcaaactacaatacaagccaatccctgcatgtaattatatagacaggagacttgggacttacatggacatcaacaatgtgataaaaattaaaataccttggatagaccttgacttattcagagtgttgaaagacagacaaatagtgaccattaaagaacttgtgattaacaaacgatttctgagaaacatcttattgagactaatgaccggagatgacacaccacacggagccctagaatacgccaaaactctggaatcaacacaagtaatcacagaaaaaggtatagatgatttaacggctagtaatttgctaataaccctaaatacaacttggtatgcaatttacatacataacagttatctggaaaaatttaagactttaatacattacttgaattacacagatggcaaacctgtagcagtactcatgttagaacaaatcttgaccggaataggtaatctgatgggggtagtgtctgacaaaatatcagaaattgcagaacaattcattacatacctaaatcgaaactataaccttacaaataagatggcagattgtattaaagaagcagagaaaacaaattggactccggagacaaagcaagtttactttaacagattttatttttcaaaagatgaggaattcacgctaagatcatggttaaattgggaagatgaacccgagaacgaagatgaacaattccaggatctagactatgaagagtcggaaaacgacccaagcatcataaatgtagatcctacatccttaccaaatgttgcatacaaaacaaatgaaactcactcacaggaggaaacactagaggagaaattgagtagcgcaactacagaggcaacatcatctgatactagcagcggtagcacaacaattatgactatttgtccagaaaaaccgaaaaagaacacgaaaattccaatacaagtaatgaggtatatagatgaaaaaggtagtaccataattagtagaaaacaaactgtgaaatcaattaagaaattacaattatatggagactttgatgaaaatcaattagtaacggctgctcaaataattgacaaggagtacatggaatttaaggatttgttggatacaccatggaatttaaaaattttgagtgaaaagttggaacaagcgttaaatgtacaattagaacaaaaatacgaagaattaaatccaaacacttatcaattaaaaaattattacaaaactaaacaagatcattttgaagtggaattttccgagcatttcatggtgccaaaaataatatggttctactggcactctattgaagctcctgaatttataattaggtgtattaattcttgggcgactcacaacaaagattatagaattgtactgttgacatcagaggacctggacaccattgttcctatagatataaaggagagaattcaaaacactacaaccacgaatttatatctgactgggtgcgaacttacgtattatctagataatggaggcgtatgggcagacgcaagcaccatatgcacaggtgatattaaagagatgatgtacaagacaatacaatcaagaacaggtttactgcaaataagtctaggtaataaaaacacaaaggtcaaaacaagtgaaaactggtttataatatcaagcacctacaatcaaattatgttgatgtggaacaacttgttgaccgatttgatgtgtcatacaagtgcaagtggagaaagatgcagtgaatggatcaagaaaaaatacccacgggagtttttggaaatagccaaaacgatggcctctgatagtgtggattatctaagatcttatatactggagtcaataattaaccaaattacaggattatatccagagaacatttgtagaagtgaaggtcaactaacaacctttgacagcttacctcattcagattggagtaaactgttgcaaatatatttcagtaaacagcaaagaccgcagttgattatacccttggtcaaaataatagacagccacagaacaatgataatggatgaattgctagatgatcccgaaatagaggaatacagtttattacatgatatatataacacggaaatcacactaaatctaaccacattgagtgacataatgaagtcaatggaaaaactacacagagaaaattttgaagatgtcaagaaggaatatgaattaacaaaaggactgaaagtttttaaaactgagtttgcttatggtatgtcaaaattaactagcatgttgtatgatagtttagcagtagctgaaattcaaatgattaaaccagccatagagtttctagttaaaagtggctgtcacttacacctagaaaaagaagatctaattatattgtcaggggttctaatcgggaaaatgaagtacatgaaagacttaagagaagaactgcagatatgggcggtacaagaacatataagtgaagtgaaacaaatagaattagagagctggtttgagacaaatgaaatcaaaaccatgaaattaaatgtcagtacaagattaccaaccaagcctgactatgtcatctataatgatagaaggattccaaaaataatatggtcttactggaacaatcaagaggtggaggaatttcaaatcaaaatgataaataattggcattatcataatcaggattatagaataataatcttgaatgaagaatctcttcaaaagatggtcggcaaaaacacatacaatttgttatctaaacagaccccacagtttcgatcagattgggtaaggttatttgtgctgagccattttggaggagtttgggtagactttagtggtttatttgttaaatcaattcacaatttagtggagtctacagtacaaaatgaagcaggatattgtcagatatcattgaacaagaaggaagagaaaaatattgtactagaaagttggttaataatttgtacagaaaattgtaaagtgatacaagattggtttgaagaaacaaaagaaatgacaaaatttgtagatccatcaggccacaacgctttagaatggatgactcaaacttatggcacagagtaccaagtggcaaaagaattcatactaccaaatttaagaatatatttgcgcatatatattatacaaataattgtgcgtctcagagccaaagatgaaccattgatagtacatagtgacgaggcagaagtctcaatgtttcataaattatcagcgaatgcttggatgaatttatgggactacgtagcaacacaaccaaaaggatccattgaagttagtataccctttattaaatggatagggattcaaagagacataataatgagccattacaggcaacacaaagggactatcaggccagcaagtctgttaggtgaagaaatggagtaccctggtgtgaactataatgtaacttccagcgcagaattgagttatcccattagggaaagtcaatcaactaaagagacaacaaatataataataaataaatattccagttgtagaactctattaatctgtgttggcagtgttggagatattttacaatttaaaaccttgtacgatatagccgaaagcgaacagcaaactccagtcataattacacatagggatcatgaaaagtttttcaaaaacaagagatcacattatataaacgtagattcagaagaattgatgtcattagtcaacatagtcttgaatgaagtagatttatggactgatattaaagccaatcatttagtcagacaaatatcagaagaaataacaggtatcgccaaaaattatgaacagattgtggataaagtggtggttaacagcgctgttccgaatttgactgaattaagcgacatactgccatgtgactggttggaggtatccacttttccagatgacgttgtgtttaaccccaaaaagaaaacaggattgaaaggggccatattgaaggccaaagaatggatgcatttcaacataattaggagcgaggtggatagaagtaaggttagatcactttggagaacttgttcaggatgtccatggttttatccacaaatgagatcacgctgcggaccattaacaatatggagctcacctagcaccagcaacgaaattaaacttgatgaacaagatttattaatcacctttggaagttgtgataatactattgcaacaaaagataaaattcaattaatagagaacttcattaactgtgggtatagagtaacttatcacgataaatacaaaatagcgatacctgggtctacattattcaatactatggaattatatcccggaaaatttggaataatcgagcaatatgatttcaggtgtattaaaggaggtaaattcacactgttgactcatggtggacatggtacaatcatggaggctttagccactaattgcaagataataattcaccctataatagcagatcaattccaaatatgcttcgtaatggaagcacagagaatggcagtgcgcttaaatgacataacaaatttgaatgactgtaagcaagcgattactaatttaaacaggttgatggatacagccaggattattaaaccaattataccattattattcacaccgttatgtgtctggtttcaaatggagcaaagacaggatgacccagagaacgccatatgtgtgtttggagaaggggatataaaagagcttgagacagagttaccttatggaatttataaactattagacgtcgaacatcaaatagtatacaatccgcaggttttaacaagatgtgtaaccaacagttttgaatcaatgctcactaaacacggccaagaaaaatacttgacatgcaacaccatagcagccatgaagttgcaacaacactctgtgaccgaacaggagttaatagatggtattctgagcatggggctgaacattacgataatttatagtaatggaacagcactagttattaaaccttacaagagaacaacagtttatttttacatagataaaacaaaaaccccctggcatgtgagcgcagccaaattattaagacacggggatcagattcagctcttgaatcctgatacttgtatcaaagacctaccacatagtatagaatatgagataaacgagttacacaaagtatattcttgtgccacgttatgtataccaaagttgatggcacagcagtttggaaagtcattcttcaaaaatttcttagcacgaattagatccacaaatctgcaagtactttcatcaagatcagatttgcatgtgacttacatatctatcaaacaacactttgatgcatgggtcggggacaccatctacccagacacaccactgggcgtagggtgggtcatcactgctcaaggttgggtgctggtaaattattttgtgaaagacggcataatagtggtcttttcagatgatggaatatttgaacaaaccgttttgatcaacttacatttacaatatcctgttaagagatccaaaccggtagtactgtccacaaaacaagaactggtaagtctgaataagccaacaattatgtacacgacactgaatcattgtgtgccaaggtcaagcaacctggtttccaatttccacaaacaaaacactttaatagtggctgattttgacaatagaaaacatcatatgtttgatgaaatggatatgataaaaagagcagccaaggtgatttttcataccaataaacaaatcaaagtggaagatctagccactagccataatgcaccattgaatcgaatgattattagacaagggaaagtgttatatgagcatgaattcgaacagaatgaggcaaagacaaatagtcaaattattcggaattatgtggttagcgaacaacaatgcataacaaactcacctttgacagaagaacaaatcaattacatacataggtacttcatccagagcgataacaaactcatagcaatagacaatgagaattacaatgacaaagaggtgaagccaaatgactgggtggtcacactgattcaaaacagtgaggtaatgtcgcaagatgtgattcaaaatttaaccaagctggtcaaagaacattcaatgtggcatatccatgatcaacacaattatgagttaacttcgacacaagctggagatgtagtgactttagagcacggagatttgtgggttaaatcttatgggatagttctagtatatgtccgggttggtggccaaagagaaagattaagttggaaactagacacaagtcaccaacaaacgagtaatccgaagccaggagactggtggggcctagagaagaaagcacaaacaaaggtgagtagctcgtttaagaacgtgctagcaataaacgaattaaaataccatgaaccagagacactattggtggatgggtcagatgcggttgaaagtgacgatttattagacatgtacatcccaccgtatcattatggatacacaggtagcgtcatcgaaccgctgttagattttcctgataacatagctatgcaattgtgggaagacactgatcaaacagattggttatctttgtatgcacccagtaatcagtgtcaacttaagtctagagaattaccagggaaaataatccaaacggaaaagatcactttgactaaatggccaatacgtagcagggctgtactaactaaagtttgtttcgaagagggtagaagtatcctaggtagaatgaaatcagtagcattcataaggaccacgacaccaaatccttacaaattggtgatggatatggcagacacttattttatcaaaggttgggttagcaaggtcaatgaattcagagcaaagagattggtaattctgccggaagatgtaaagcgatgggtggaaaccaacaaagatgcaaaaagaatagaacccgaattattagaattgttaagtggtgaaatattagtcaaaccaatgaatgacgtgaacatccatttgaaattggaaagtttattaaaagataacacgacaattatgacaaagcagcaacaagctagaattatagtttggcaaaggaaagctgtatgtgctatatactcaaatttgttcgtcaaagtgaaggatagattgaaatctatattacatgataaaataatttacgctgacgggttaagaccagatgaaatctcagcaagagtgaggctgtgcaaagatatagctggtttctttgaaaatgacttaactaaacaagataggcaaactgacgcgccaattataactacagaaatgtacatgtatgacttattgggagtacaccctaatgtgatagcttcttggagggaaatgcatgaagtttggagattcaaatcgaatcactactgggggcaaggtcaaggcatgagattgactggacaagcaactacagccattggtaattgcataaccaatttacaggtgcaccaagaatttgtcaagaaaaatttttctattttagaattagctttatttctaggagatgacatgtgcatggttttcagagagaaaccagacacaaagaacttaaggaaaaatatcgcaactaaattcaacatgcaaagtaaagacgcatggtacagaaacggagcaacgttctgtagtatggtcatgagtcgcacaccaacaggtgcagagctatgccctgatgtggtcagactcaagtttagatatgaagtaaccaacggagtgcatgaggcgaacgcagaaaacatccttatgagaaaggcctcttacataatgatgttaggtgagggtccaaacgtaaaggagacagtcacaaggttaaatttgccaattaaaccattaatttggtacgattttgagtccatgttgcgagcagttggagacaaatatgatatgacgcacgtacaagtgctagatgtatattataatctgttacagatgattaattcggaaaagctgtataggcatacattcagacatttttcgaacatagaagcaaaataatggaaaataaataattttttgaggaaggtgttttaaaacccccccccccccc

SEQ ID NO: 811 - DNA, 16483 bp, Lily alphaendornavirus
  source 1..16483: mol_type = other DNA
tgccaaatactgcaattcccaagataaatggtataaaatgtaatggcttctcacatttaattaaggtgctcccagaactacgttcaggagcaccattaaaaaataagatgagtgaaacagacaaggagttagttattacgcgtcaaaacgtaagtaaactacccttgtctaaaaaactatataataagatgatcaaacggaaatacagatctgaaggctgcacgtatgtgaagcccgtcagcattaacaaacctgaccagatccgaaaattaagtaccaacttatatgtagttaaaagccacactggtgaagccaagataccgatcatgccagctgttggatttggtgaattttacgaaatactagataatggaataccatgggataatttaaatccatggggagtttcaatgctcgccgcttcaataagcatggggggaaggatactatgtgaacaggagattagccaagatcaatgcagcaatacactcttagaaagcgagtacgccatgcaaagcctaattaatgaggaatataaaagatggcccaatatatatcaaattaatggcaaattacagctcaagagaaaaatcaagcttaaacctgacacttatggcctcactaaactaagagatctaattggaatgagtcctgatttctgctggattcctgatgaccaagttgtgggagacaagttcaaggatgttactgtaatggttgctgaggaaattgtcagaaactggagttatcctaatgattttgctaaaacgctagccacaggagtgtacacacaatatgtcgtgctaaactcgcctggttgcagtaagaaagatctggtgaccagacacaacacttttactggactgttcatttgcccagaatgcggaattgtgaactcgtcatatgatcctgaagtattaatgtgcggaagatgccttaagcagggcttacagattaaaattgatgtgagccaggtggaatatttggatttagcgttgacagaaccatcagcatatgaatacgattattctatcaacagtcaattaacgagactgctaactcaaaattacaccgacggaataagtatgaacctcccggaatcagaagaagcacaacaaaagctagatgtgctaaactatgtgaaagccaaatcaagattggatattaaaacgcagtacgtgtgcagtaatttgactagtgaagaactaagctatcttaagagggagtttaagactttggaaataacaccaagaacaacttggaatgacctttatgggttgatgcagtctgaatgccattgtttggcgaccacagtgatacaaaggaatcaggaagacaacatttctattaaaggattttcaccatcatatgtaaatagttgcagatcgtctgtgactttcgtgaaaccggatgttaatacgcattggactgaaatgggcgccataggtggatctgactgtgatatttacaattttaattcattgcccgagcttgaaacactgatcaaactggccgacgtaaaatcgaggtacttaatagtacctaatattcatgaccaacacaacgggtttaccaagaattacagctatgagattagtaaggagtctggcctggttaaaatacttgctaacggaactaccgtagttttaaattatagaatagaaatgttaaatacattgcttaaaggcgacatattaagatgtggttccaagttatatagattagaatgtattaaaaagaccaacactgtaacgcttgttaagatatccaggattagtggaaagcaaacaccaatcagcagcgataatattaaggcggttcgaacaaatgtttataaaacttttattttatctctgccagactggcagcaaaatgtgaaaggaatccagttcggtcctttaatcaagagaagagtaagatttaatttgcctttcttagcacacctcaagtcaagatgtgagtcatggccagttagctatcatggattgcgtgaatatgccatcgtatccagcttttccagggtggaaaaagacgacaggaattataatatctttgacgttgattttgaggatattccggatcatgtttttgcggcatataacctgtaccttagagaacaaatcagttctcagacagtttcctggttgaaccaggaaaggcctttaggattagaagggattctccaaggcacggccgggggggtcgcaggtatagtgaagaatctggtgattgacagagacggaagatcttacctaaacactataatcgagaaaggctctgacacgaactggttccttagttcgcagtgggaggacattaaaagaacactcgagaaatgggaagcggtgccaataagcatagttgacatgtcgtcaccaatagattccggcgagataagccaacaaagtgaaaggtgcgtgcacgggtcactgatcgatcacttccctggtggttgcgtctgctgtggagcgattagagaaagtggtcaatactgtgaaacttgccgtagtgacacaaactgcaaacacaggtgctttcatagctgcaaaggctggaaagaccacctttgcactaacatcaacgtaggcaaaacagtcactttaaaggataagctgccatgcggccacactgtaacgcagtgttcatgctgcggggtcttatcttgtcttgaaaaatgcatgaactgctttgactggaatagttatacagatgatctagaccaagctgtcgtgaacctactcaagagaagcaaatcccagcctactgaacaatcatacgcaaaaattgtcaaaaaagcaagaaaggactacgattatatgtctgaagaggagcaggaacaaccgaaagaaactagtaaacatgggggcaagccagatagcacaccatggggtgcccgggttaaatacaggaaaccatccttgaggaaggctcctgtccaggcacaaaaagtgaacctaccgtctgaacatgataaagctcaggggatatttgaagaatatcaacctattctaacgcatgataaagctgaagaggaaaaggacccttattctgcagatttcatggatgaaaacaaaagcccgaaacacacgtcggacgaagatgaaactcttagagaaaataagtcggaaagtatcgttgatgaggagcaaatagaaaaggaaaacgcaaatgttaacgagatgctagccagagcgtattgcttgagcctgacagacgaaacctacactggcctagtagtagacccgagcgcgacaaggtatcaggatcctaattcagatttctttaacatcaactattgttacaccggagatgttatcatagaccctgattctatccagtccgtagctggaatagactattcgtacacacccgggttctgtcttaaagacacgctggcatacttcaatccaggtataaccgaggagagatgggaggaggcatgtttaacaataggaagcccactctcatggtgtgattacaatgacattccgagatttgctgactactttgaaatgaatataatatacgtgcatatcattaataattctattattcaagtaagatgtttctgcagtgatcctacggccttattcagttgcattaaatttagcaccggagagatcgacgtagaaaattataacttgcttggacactttgaaccagccttgattaaattcagaaaagaacccattgtcccgcccgtttacttagataccttaaccagggaggacgtggacgaactgttttataatgtaacaggtgacaacatgctgtcgaactacttgcaaaagagcactctagaaaggttgactttctgcaatgcagcaaacaaaataacgagaatgacagatatatcagccgaagtacccgaactgaagttcaaggctagaaacaatggattcacagtctcaaacaactcgagaggtttaaatgatgccaagtgtggccacataaatacccacattccaggcgaattggctgggatgaacttttccttacccagaatttataacaggtatgacctggagcagtggtatatggaaaaccttatcaaagaagaagagctagatgatgaaaacaaagtgttcagacaacgcctactaatcctaatttcacagtacttggaattaatgcaatcggccaaagaagttgaaagcaacaagaagaatatgaacaatgcggtagcattcactttaaaaggaatcaggcccaggaaaaagaaaaaagttatgtatatcgaaaacctgtcaataacggaaaaggttaaaaatggtgacctagtgacaatcagggccggtcccaacttgaatactgtacaagttgggaaggacattaagaagctcgttcttcctaatgttatgaaaccgggattggaatttaaggtagacctcaccttttacaaaattagttacacttccttgatcatagagatgagctccataataaaccgacaagtatcgctggcgagagtcaaagaactcttaaagaacgccatatgtcttgttggatacccaggaactgggaaaactagaacactaattgagatgtggaaaagcaggaaaggcatgctagttggagtgactagaggtagccaaaacagccttaggtatgaggccggcagctccaaggaagcctacataatgtcggctgagaaatgctcgattaataatgctaactctgagattgtgtacatagatgaagctacgttactaaccctgcctagactttgcactatgctgggcccaagggttaataagctagtactctcaggtgacttgttgcaaatacctgccaaggaatttagccagatatgcggattcgaaaccaccaattgtctggaatatgcaatgcggtatagcaaagaaataacgaagttgaaggaaacatggcgattcggggcgcggctgtgtgaagctattaatgaggcatttgacacagagatggtgtctaaaaagacaactgataccccaatgcatttggaacatttagatggattaaccaaggtaggactggaaagaataatagaagaaagaggaattgataccgttctagtctttaccggagaaacggaaaaaaggataagaaacctgataggtgaatcgactggagtaaaaataactagagttcacagttctcaaggaaacagttataagcgaggactagtagtgcaagacttcaggaacggaccatacagaaattctgaagaaatacaattcaagagtgagtacatgatggtagcgatgacgagatgtgaactagaagtgactttattgtgtacttataaggcctgtaactgcagagaaaatacaataacaaacctagctaaacatatgaacagacaattagggatacccactctgatgatagggggtgataagccgcagtcagacttaattaaaaaaatatcattgttggcagaaacattcatgaataagctaagttcattagaacctaatgtgattctagattggtttgagaatatcaaatcattaataataagtaggaaggtgcatcatttcataaagtcaatacaaggcatgattgcaaacaatgatgaagcggccttgttcaatttgctcagtgatctgagtttccctttattggaatccgtgcaaatagagaacggcaaagcttttgcaattttggactataacaaaactaactggggcttcttcaagaagaaaattatgcaaactgcgtacaagcgccaggaaataaccattattaacggcgaagtaaacataggaggaataactcttgtgagtgaacaatcgtggacgacagtggaaattaatcccaaaggattccaggcatgggaacaaaccaagatgagcaaagtgcatttcaaaatacaagggttcaagtcgatcatcaacttgaacaacactcacaccataaacatgaacattaggctaattaatcatgctgcacaattggcatggcacggggtcaagagatatctgtgcataaagttcaacggcatggtgttttcgataagccctaccgtgggatgctcgctatgtggtggaatagaaatcaggaatgcaaagaaagaactgatagtattcatcaataatacatatgatgacacatccactagagaaatccaatacaaggatgagagcaaccctataacgcaatatttaattgaattatggaaacccgaaagagacgacgacacgttctgggaacttactcaactaatcagccctgatgttaacctaaatttactacattgtctaatgtgggtggaaaggatcgggaccggaataagagggttgtttaaaggcaaaagcattaaccctgacgaaggacacctcttcagaaacgacctggagaacaatgaaattgtacacacaagatacgttaaaagagctcaatccaaaggcatcaagataataggaattaatgatccatcgaacgcatacatgaagaacctgtctttcctatggctagcaaagcacggtgcaacagaacaactagtgtactttagcaggcacaaagatgttaaagtaataccgataaatacgtcgccagagaataacttgcagctactcaaaacgctgtggactcaagaactaatgagattgccatacaacttaagtgtattaacggcgaatactgatttcgaaatactaggaatcaaagaaatacttaattctctggaattagacatagaggagcacaagcgaagaaacactaagctggtgcctctaatagatcaggaattagtatcacttttggctaacagagggatcacctgcccagacttgtatatccctcaggaacttttcgatgacgctaagacgctaggcatacaacctcatttcaacctatccacagatagtacagtttcctgcggaggaatgtcgtacattactgatagctatttctgcaagatgtttagcttgaacacagccagagtgagaaaagcattccatagcagattcataaacataagcttgagacaagacattgagcagcatgtgaaaatgatacgcgcgtccgggccgctgatgaacttaatcacatctgaatgtgaagaagattgtttcaatagaattaagacaaaggtgagaacactgaaggaactggcggcaaacaagtctaatgaagacaaaagcaggcctgatcctaagtcaatagaagcacttgagaaaatgctaactgataaaaaattggattctttggtagagcccagtagcaaaaattatgaagtggacattctaggattcggaatgagcttcattgaacttactatgaatgaaattcgcaagatagctcacgacagaaatgctggatccaattttgtacttttcctcccagatttcaggaaggaaagtgtcaggtgcagctttaagaaaaaaggagatcacatagtaggagttggggagagcttagattacgtgattaacaaggagtggatacacctgataaatggactatttgaacatcaacctcatgaggtttggcaattaccagacagcgttaaagtgatcggcagcggagatctttacctgacaataacatcaaagacaaacaccaggaccggtcctaatgctaaagtaatggaaagaattagcaacatgatacccgtcaactaccgtaacgatgaaatgattgccaaagttcctagaatgaacagcattaaagcaatcaaagaaactggagagttattcaacagttgtgaggttgtgcttgataaagacaccgtaagccgcctagtgagaagagcaatgactcccggctgcaccttaaacacgttacaaaccatcgctagaaacaggatgcaaagctcagtaataacgaaaggaggaagaagaggggcaggaagaacagacttactaagagatatcaacttatgtgcccttgtagcacaatacatagcaaacaacaatgaaaaccagatcacgaagtacatggaaaaaattgacactttcttgatggacaataaggactggaaaagatccactggggctttatatcacatgttaaaactcgaaatgaacaccataattggacaggctctagacattaaaataccaatgagggacttgagcaatgttttaggcgacttgatctcagtgtctctaggaggaaatactggtctaaagagtagtactaaaataatggtgatgccccagcctcacagaataatattcggtgaatattacttttcaggatccaggtataaagttgatacttacataaccacgggactcgaagtcataggcaatataattaggaacacatttgggcaaattttcaagaggcctactattcgaaactactggaggaaacccgctcagaccaatgtcaaggagaaactggatgaactaatagaatcaggagatattcatgatttcgagataagagtgtatgaccttagtggagggattttcaacatgatagacaagacgatgaaaaaaaaatttaacatgaacaaggttccacatacttcggtggttatagacagagcagaaattagctatggaaatggcatcaccgtcaagagcaagtccactaaagatccagccgggtcttacaaatcaatcccactaaaatgcccgcaaattagcaagtcatcgatagtagcagtgttgaccaaggagcaagaatattttaatcccacagcatatagtcccattgggaaaaattgtaatttgttctccacacacttagcaagtgaaataggagctctagatgaattgttggagaattcagaggagttcaatgaaatagtggaaatagtaacaacagttagtgatatgggcaaaaagctcaatgatcgcattgttaaccatatattacgcgctgacaggaatgttaacggatctgaaagtctcacaaaaataatcaaaaaggcatttgatatcataaaaactaaacctagacccaagaacgtgactgagctgaaggatatcatatggttacagtaccagttactaaatcacgacgatgataaaacatactatgaggcagcgatgaatcagaacatttcatattctgaatctgatgaggatgaagatagggaagaaaaagaacaattccaaagaaaagaaggacgtggccaagacaagcatggtgaacctacgacccgggattcatgtgaccaggacactggagcgacgttggtatcaacggagcaaactagatcccacctcgccccggagagcaaggaattcagtaatattcctgaaactgcggaagacagaactaggcaattaatagcaaaattcaagaagttcgaaatcataaatgatgatatcattaaactagctaacaaatacagagaagtagcatcagcaggacacatcaaggaaaacatgaattacccggcactaatcaaactaagaaatgcatgctggctgttgcattgcgaactaagaaaagataatatactggagcaactgagaatagaaatggattatgagaaacatctcgatgatactgataaactatacgaagtagactcagaccaaataaacgatccaaataatgtatatttctcaatctctaaattatccagggttgttgataatgaagtgtctaaaagtatcatggattggatggataccaaagagtacaaaagcaacactattattaaacctcccggctatactaatgaaagaattattcacccaataccaccatccttatataaacagttcgtcgaaatgcaggacaaattgactgtactgatgaacgaatgggaaaagatatccattgatgggaaccttagtgagcaaagtaagggagaaagcatgcacaggctagtaacaacaatggaaaattgtttaacatcaattgataaaaacaatatcaaaccggacactgtcaccgtggttatccattcgtcaatgattaaaacattatacaacgaaatgattagcaagaagaagccaaaggacaaaggcaaacacgggttactaatgggaaagaagcatgatattgttagcgaagaaaacattagaaactcaatgataagagagggattgtacaagcacacttcggaactagacactagaattgacgagtcattgaattccatggtgtatcacattaaactagattcttatatcaacggcaaagaagacttaggaataaagtctggtattattaagaccactacagaaaacgtaaaattcgacttattattgcaggatgtcatcagcaaggttcgcaacaggacccgatccagattcttgattcaaacagtagatttattaaacactaaagaagggaccaatctcaataagctactcttagaaggatacatggaccctgaaactggcgataaaccagaagcaggtaaaagtgctgaggacctgaaggataccgggggaacgggcgttacgcaacaccaagctgagccaagtgtcatgcatattgaggaaatcgacgagcaggaggaagttttccatgatagccggactgagcacctggtggcagaatcaaccgagcagctagaggaattcccatttgatgcaagtgcgtcaagcactctttcagaggagaaagccggtgaagtaactgaagaaaaaccatccgagaaagagactgagaaggaaaaaatgattcctatggtaagcacgccagaagaaattgtgaactccatttgttccaagatcggcgacacagagaagctaggagtgaaaaaggagctatacagcattctgtgcaagtgtgtgactgacctgggtcttagcatgggagatttaatgagcgttaaggagacaagtgaaacaacgatcaatattaagaccatagcaaataattaccttaatgacgtagatcctaccctccaaactgaagaagctaacaagtttgacttccaggttcgcatgaagcatattaaatcaggcaatatacatgaaataggcaaagaactcaatggtattaaaattttactagtagcatatggcagtgccggagatacgataccaatacagtcggttgccgagaaactaaaacatctcggagcatggatctgcctaataacacaccctgacaacattaaggttaacaggaattgctacaacaaaatcatgtatttcgacataagccagcaggaaagcacaggaaatgccacgtacgatagcgtagaggaaaatgccagggcacatctaaaattcaactatgaaaccgcaacagttgtcaataaggccgtcaacaactacaatttcgacatagcattgaccagccctatagttcctgcaaccacagccatcacagtatcagctgggatagttacctgcgagatcttctgtactgcatgctgggaagttggtggtactgtgtcaactagtctattaaatattccagaaaatgactacgaaatcgtaaagagcatagcaaactacatcaatacctacacggcaccagtgctatggccagcaatgaggcaaacgttggcagacagaacattaaacttaatgggcaagaaaagtgcagtagtgaccaatgtgctcagggcactagtgagttctgaatacatacattcggacaaggtgctggatgacccgttgacaattgtgctggggtacgcttccagctatcaacccaccctagcaatgagaacggactataaattaagaataggattcttctttggcagtatgagaataagagacaaagttcaggaggacttaataaccctgattagtagcttaatagcttgggaagtttcaatgctagtgcatattcaagactgtaaaattaatcatgaatataggactaagctttctgcaatacaaggcgtagatgttctggaggggctgataaaccaaacagactacctagtaatgtgcgacgccgtttttacgcatggaggggctgggaccgttcaagaaatactgagatgcggagcggtaccgttcatttatccattgttcgctgatcaaccttacatcgcagagaacattgaacagaaaggattgggattctacgtacgcagaatggatactagcatattgcacaaattaaaacatgtaaatagatacaagaaaagaattctagaactgaaatgggggcaaaagaaagtaactcagaatctaattcaaatggtggtggacatgatgaataatgtcaagtcaaaaagtattgaacatttacaacaagatgaccagagcgtaattacagaagaaagactagtaataagagaccaggaaatattcagtccagtaagcatcagattcgaacccgggatcttcagcacgagaggcccctgtagtgaagaaactgtcattaaaatatcggattcttacaccggagaagactgccttaaacaggcattcttaaatgctctcgtatcgatggaaccagagagactggcaagaggaacttatatacttagatatcacaacatcaaactagcaagtgatctgccgactttgacatttatatcatattacacctattgtaacattcaactactagggaaagtaaaccaaactgtcatatttgacaagacgtggccattgatcagcatattcataactagaccccgtctggaatcaggcaggcacgttgcccatgcattcggaacagaccacagaatggatctagtaaggaaaaaacataccatggacagcagcattagcgtgctggacaaggttgataaactgtaccttctgcaaaggacaaaccatgcttacaggggtagccttagcgacatgctggataccatactgtataagacggggtcagacgacactcaaacctgggacaaatacggggggtatctaaacgcatgctcgagaatgaaatgccagaacctggacagcattatagaatcaaaccaaagactggttattccagtcattaaagcgaccaggatgcgagatggggtttggtacaagatgcagacagtaatgaacattaatataggagatctagcgttagtttgcacagtcaaaggcgacgtttgtggaataattgccggccagagaggagaggatgtgtacgtgtatacaggactaaccttagacgctttgccagtactgatatgcctaaggttgctaagaaccgcgagtcagagagtgctagaactaaacctaaggaacacaatacgcgaagttccgcaattgtacgtagcgttcaactcaacaacactgaacttaattaatcaggaatgccccggggctcatgtagcaacatggaggcccgggctagaggaacgttgtaaagttctatgttcacattttgacactagaccacatcacagtgacagatccaagttggaaagaaagtatttgctggagaacttggggaccaataagcttaaactcattccaaaagaactgccaatagccaaagtaagattggtcaaggaaagtcagaaagcatactttaattacgcagacggggtcatacagctaagcctagagtttagagacgcccgcgaatgtgaaatagcaaaaatgttcaccaagctactggttaaggctagatttacaacgatgaatcaaaggaaatgcttaagaataccagttgatgatgatttggaaataacagcactaatgaccgtgatagaaattctgtacaatgtagatgaaacagatttgattttaaaaagaagcaccacagagttacctggacaaacgaaggagatttccagaacatacctggaagaaaattttaagcttccggataacgccgtggttgagactgtccttagcactctattcaagaacaagccaactctcactgctacagtcatggaaccgactgaacatgctcacacgataacaaataccttgaagctgggaatacagctagacccaggacacaggtggttagttatcctaagcccatttactgtatattacatgaccgaactgaagggaggaggcatcgaaattggcagctcaatagccttacccgatttgatagaagaactagaagatgggacgggccattccaatttagaacctggcgacatgatgatggatcaaaatccttcgcaggtagccggtcctaaatttggcaaggagacatttaacaccttcagcaagtggataagacaaaacaaatggacagatttcaagctagcatcggctaaaaacatatcaaaagctgaattaacgaagaagaaaatggtatgggaagaaatgtaccattacgtagacatggatggggctaacgtagaaataggaggaggggaaggagctgactacctgcctctgcaaaacgaaattgagattgaaagtgctggatacacaagaactattatgaatgaagatgaaaccattaatgaacttgagaactatcaggtcatggatctgtggaaacagaatagggatattattgaccatgtggttgcacactgtcctaaaaatgaccagaggtacacagtcaaggatggattcttctccatacaggaagttctgaaaacaacgtttagcgaatacccggagagatgcaggccagtattccatactgaggcgtatgccagcttaaactctcttactgggaggttagggagaagtgctgtcataaggaacttcaaaacaaggccaagtgtaagtcagacaatacagtcaatgagctatttattcttcaggaaagactggaaagaatccgttgagaacttcaaagcagaaccaatagtgtacaacgaaaaggactttagaaactggatatatggacacaagaacgctcacaaggtaataacagagctagaatcattaagcgcggaagggcctctagtgaaccctttcaatttctttcgcagtcatgtcaaactagaaagcattaataaagaaaatcctataatggatttcaggcaagctgcaccacgagctatcgtgtggttgccgtactgcatgccagccttgtttagctacatgtttaaaatggcgagcaacaggttcaagcttatactaaggaaagaagtgcactatgcctcagggctggacgtaaacgatatcgaacaaatagtacgaaacacagacgacagtgatgttttcttttttgataacgacattagcaaaatggactctcagatagacaaagacttgatagaggttgagtgggaagtgctaagtctaatgggaatttcaccggacgtactcgaatcatataagaccctgaaacgaaactggcggatttctaacaaatatattagcgtgaccgggaaatggctaaggcattccggtgaaccaaccactgccctaggaaacgggataataaatctggcgataacggcattgtcaacgaccgaaacaaggagacaggaccttaaactatgtttattcatgggggacgacatggtaatgctaaccaagaaaaaggaagacgtattgcaggtgaagaagaaaggtaaacacctagctaactcactacttaaacctagaattagcaggacatgctcccctttttgcagttttatagtaggagtagacgaaacaacccaaaccgtagctatagtacccaatgtcgtgaggttggcctataaatgggaggtgcctaatgggcagcatgaaacgaccgaagacgcagtatttactaggcagctaagttacgcctgcgtgttgggacgcaatgatttcagtaaagatatcgagaagaaaatatcagtgaaaacaggtggcgaactggaagtacccacttactacaccacacagacaatgataaagcttaactgtgatttgcacaacatggaggaaatgcagatggtgcaaataatcagcaaattatactcaagcttgcagaaacccaaaacatattcttacactttcctaataacgagcgagaacctcaggaagggaattcgacttaggaaagaaagtgataccctgaacaccaccgaatcccgaattcatcacagactagacgaagaaaatcactaatcatcttattttaattgaacgagcccaatacccggaacgttggaatagccattcctcgtcaagacacatatgccatgcctatgtggcttcacgaagactggtcgttccactttctgtcacctgtaatcgctacgcaagcgccattaatgtgaaccgtggctaattatcagactgctgcgtcatctgtaagtagccattcttcaattactggccgcattgcagtacgagaaacaagcttgacagaaagctggaaacggcaaagtgacgttgagtcactttgtcgcgttacagccgaccagttacgggcatacttattgaacgagcccaatacccggaacgttggaatagccattcctcgtcaagacacatatgccatgcctatgtggcttcacgaagactggtcgttccactttctgtcacctgtaatcgctacgcaagcgccattaatgtgaaccgtggctaattatcagactgctgcgtcatctgtaagtagccattcttcaattactggccgcattgcagtacgagaaacaagcttgacagaaagctggaaacggcaaagtgacgttgagtcactttgtcgcgttacagccgaccagttacgggcatacttattcagtgttataacaggc

SEQ ID NO: 812 - DNA, 4250 bp, Nansha Islands sediment alphaendornavirus 2
  source 1..4250: mol_type = other DNA
tgttacatgaagggtataaggcaatacatcttgccaggtatctggcctgatatggaaaattggatttatgccataagggacaagggtttattagcagggtgtttgcactctgaagaattgcatagtttagaagaaattatgaaacaaaacccaataagttatgatggggaaataccaaaagttaacagagaaaagtatttggacttgaccaaagtgtgtactactgccagcatacaaagagcagtatcaacaaggaaaaattacgtactgataccatacggtacaagtggcgacctaggcatttttgttaatttacagcgggaattgctaaggcgaggccacaaagcagtactactaaccgacccacaacagagtgaatcagagcaaacactgctaaacaatgtggctggcggaaattgggccggaattatcaactctatatctgattattgttcatcaattaaggaaaaattggacttgagcaatgtgagttcggttgtaattagcccaaatttgaatgaattaatcacacatatcgtatcacacaacataaaagtaatatgtatgtcacctaacggttatagtgccggagtcgatcatgagatatcatcagcaatgaagaacatgttacatggttggaactctgaaattgattgccataaagtagccctgtgtgacaaagagtttgtgttaaacggttatgaatcacttggatttgacgattcacagtgcataccgataacaggtgcgaaaaatcatttgctgttgtacttacgaccgaacaaatttgataaactgagagaaacatcagtagagctagcgaagaaattgaatttagcattggaggtgtacgaggcaggtaaggataagcggtcattgcatgaactaattgctaatgcggattccataatccatcacggaggaagtggaatggtacacctttctttatattacggaaagccacaattgatatacgatgataagattgatagaatgcataatttagaaaacttatacagattagtcggtgattgtaaatttagtagtgtgaatctagaaaatattatagcgataaagtcacaagaaaacttagacataaaagttcaaggtgatggtattacaaatgttagcaattttattgaatctgtcacctcaaggaattgttggttgcaaagtaaccagttaatggactggccagaacacaaactgagtttagaggatcaatacattactaactgtctaagtgttagcaaggtttacgatccccctgagtctagaggttgtgtgggttcatgcataatagcattttccaagagtcagaaaggacactccgcgaggtcaaaactactgaataagataaaagaagatgattatcacgtgcatgaaattaaaaccttgttggtagcaattgggttgaattatgcaataaagattggaccagttgtgcatgttcaaacctgtgatggatcaagaccaaccatacacttggaaatagagagcaaagggaggttgaaccattgtaagttggtagagctagaatatgatgaaaatgacacagacagatattgtgcaagtaacaatcaggttaaaaatataaatagtatagatttggtagattacttaactacagaccaattagaagtgtttgacaatgcagcaaacaagaagttgaattgggtagagaggataggcaggaaaaagaagatacacattgaacaaccattctacgatgaaagctcagccactataacggcaaaattgcgacgaccagaagtggcagctttgtttatagcaggatcagggtacctttgtatcctgaacccactaacaccagggactgccgaaataataactgggtccgggcaaattaaagatggttatgcattgatggtgctattgacgaatagcatgtcagacaatattgatgctaaacagactgacgtggttagttggaacaatgaaactgccacagcattgacatcagaaaatcaaaggtttgacagaataagtaacacaatcttaggatccaacacggtgagaatattatgctgggacaccatgaaacatgacaagcatgacattactgacatattgaagcacagagccaatgttgttgattatcaaaacatagagttaatagaacgacagttgagtaacaagcatgtgttctttaccagaactatggacggtgattacatgactattccagtgacaacaggacagatgtgtgagtacacacataacaatgtggatgttaaattattccagacatgcatagagatccatggaagcttagatgaattatttgccatagcggatttattggaaccttattgtaaaatagaaaaagagaggagaaagattaagtatatgtttgcttccattaactcaggattattggatgttgcatgcacgaccacttttatagaggatgcagcatacaagccaaataatgagttggcttattttggtttaagaccaaatagatcagggggtgacaacacagtagagacaacttggcacgagccaactatgtcaaccaatgacggaaagcacatgccacatatatggatgggggttaaacaagacaccctagacactaaagtcgaattgactggcaatccagaagatatagttatagatatggcacacactctacaagatacacaacacagggagaaaccaacaattgagactggtgacccatgcgtgcaagacgtatcaatggatatgaagataattaagatggagtcagttgatatgattgatgacagagtgaccgatgagataggtgagtactgggacaatgaggacgttgtagacaatcaaatactattttctagaaaagatggtggaaatttgaaatccagagctatggctgggaatcaagtaatttttaacaaaaccacaatgacaaaataccctgtaaggagccgtgaagtgttgaccaaacaattcggtgccgagcataatgccgtgtcagtaagactaggtggaaaagaagaattgcaaagaattaagactgatccaaagacaaccatcaaggacttatgtaatgcatgttttacaaatgactggagagatagagtggtggctatgtctaagcaaccaataaatatacaaaaagaagaagttgttaagtggctgcaaggtagaccaggggctactaatatagcaagagaatgtgataaaatattagaagaaggcttcgacttgcatggcttgaatgaggtaaaagttttcaacaagctggaatcattgttgaaatcgtctcccgttactgataggagggatggaaaagtaagaatcattgtatggcagaaaaaaggtatttgtgccctattcagtagtgtgttcatggaagcaaaagatagattcaagtcactgctaagagaaaatataatatatactgacgggttaacaccactaaacataaacaaacgatttggaggagtgtcgaacgccaactggttcttggaaaatgacttaagccagcaagacagacagaccacacatgaattaattgatgctgaatttgttttgtataggttgatgggagtgaatccaaatttgttagccatgtggagaaagatacacaatcattggagagctcaaggtcaacatgtctcaggcctgtttgatggcatgagattgactggtcaagccacaacggcattaggaaacgcaatagttaatttgatttgtcacactgaactgattcaatcaaacaagtcaaagatggtaatgtatttgttgttgggagatgatatgattatggccactaagacgaaacccaactgcaaagaccttgcaaccaatataagagtgaagagaaatatgattagcaaaccacatttatctaataaggtgggtacattttgtagtatgctagtgtacaagaatgacgaagggcatgtagaagtaggaccagatttttggagattggctgatagatttgacgttactaatggtgtgagtgatgcgacagataaaaacataacagcaagatcacaaagttacctatttatgcttgggagaaatgacatgacagaaagggtgaatagggaaaaacactggaacttggatttgccagattattacaacctgagcgctgcagtgagcgcttgtgcacataaatacagtgtcacagaattcgacgtattagccagaatcaattctttaataaaatcaatcgagaagcctatgccaaacactatatcagtgttggcacaagcttacgaatgatcgtt

SEQ ID NO: 813 - DNA, 13936 bp, Oryza rufipogon alphaendornavirus
  source 1..13936: mol_type = other DNA
tgaaatgtctgtgatgaccatttcaaaattatgtaatgtgaatgctgcaaccacagggggggggcggagacgcccccccccttttaaaaataaaaacgatcaaatcaagtacaaacttgatttgataaaaccaaaaaccccaaatacaattgggtttttgaaaagaatggacgacataaaacgtccaaatatgggaactacggctttagatcctctattcgggtggttcagattacctcgcaacgtaaattgtagaatgaacaagaacaagtttatcaccgacttcgacaacttatttgagcattacaaaggaaagaaattccatacatgtaaagaagtcagtgtagtttgcgtagaagctatgaggggagagttacaattaaaagagagacactacggtatcgctcaatcattttcaccacaggatgagagattaagcaaattttgtgttaaaaatatgtcatttggtttaattacacgattactatatttaatttatgtgaaaggagctgaaatctacattgatccgacagtaaatgtcgataatttactcaaaaccatgagccatgtaattaaaaagaaggataattctatggaagaggaatttgaagaagaagaagatttcgaggaaatggacttagacgatatgggatatttggatgataacataaaagaaaaaggagaatatttcgaaatagtaccatttggtaaaggaaattgcactgaaaaattgctaaaagccataaaatttcaaatgaaactgttcaaagggttgtttaactatatgtatcatcacatcatcaatttcaaagatgtaaacgaaggtttcgtagaaataaaaggaacaagagacgaggaagataattctatgaattatgaatcatcctcaggcaaattacctcccattaaattttgtccattgtgctcgtgccctaatgcatatacccaaatacctagacgaatgaaaacttgtcactatagtgttaaaaaatattaccctaacaataaaaccattgatgacaaatttgagacaaaagttaaagatggtgaggtgatgaaagaaataccttggaggtgtggtgtatgttatacggacctgaatttagaaatagaagagtttaggcaagcaaatgttatcatagatataattataacagagagcctatatgtgttgatgggtgatttagaaaatttgatgaaattaggttacactgacacatatgatgacttgaaaaatactgataaagaaaatattagacaacacgataaaatcttggttaacgagtattttttccatttacagaagcgaattgtcacagttggtcaagatttagatcctataattaatgaaaacgtaaagaaaattacaaaaggagtgaattttaggtatgatagcaagtttaatagcgtcaaaccagagtttgtctgcgaattatcggtttgcagagaagagatcaaatcgcatttgaggtctgatgctatcgcttgtataggtgatttattaccaagaactgacgacattaagttccatcaatggaaatacaatgattggttatttgagccgaataatttcgatggatgctgtgacgtcgattgttgcaaccataatgaaaaattcgtatgtttcttaggtatgggagcattaacattaagcttaccacaaattttaggaattgtaaataaacagcgccaattgtatgctgttgtccctagatttaaggacaacaaatgtctcagggataacactggcacagtaattactgaaggggataataccatgctgtttttagatgggtgtacaaatccattgttgatgaaaactgacactatagaaacactttgtcaattcaataccattgtgaataaaggtgtgtattatattatcaataaggtgtttgacttggaattatgtagcactatatgtatattgggtccttacacagatgtgaatgctttaccagatgaaaaaatcatcaaagatgacaatattatcacaacgataaccttaccacatattgactccctgatggggaggataataagtgtgaattttaggccctgcacgtttaaccctcacacatccatatttaaatatttatgtctccgccatttgtctggccaagtatctcacaacactttgaagccatatgcagtaggctttgcattgcgtccaattgttgtgcacaataaagttgtatcccatcccagtgttatgttcgaaatgatagatattcctgtcctattatcccgaatttgcatgatgcaattgaaaatggaatatgatctcagcataaaatacagcgacaaaaccaagtatttaggaccattaagatggatgccaaaagaattcgaaggtttaaccactaggtatgtgattaatgttatagtggaatatttaacagacaaatttagtgttacagagggggatataatgaaagtttttgagagcacacacctggctgctttcataacaaaattacatgataaccacttgtggaccgcattattaaaactaagcaaagggatcactacggagagactcaatgtcaggaatctaggtgatacagattgtgaagcattaagcaacaatatccatagatgctttcatcacaatcaagattgtattcatgatctccactcaactgaattagtatgcaaatgttgcggtgtttctatagagttaggattgctatgcaaatgttgtaggggtacaactcctatcacagccttccaaattgatcaacaaattaggaaagaagttgatgatgagaatgaagtttacaaacacagatttcaagaattggaaaccaaagctaaagagatcagatctaagattgatcacaatgaattacagtggcccgcactgagacccaaaccaagaacagttaaatttcaaccagcatcaaaacctagaattgccaaatctctgacttcacaagcgcccactgacaaattgcaaccaacaaaaaatattgaggaaataatagagaagaaagataaaacactaaccacaattagtaatttgagcgaattcaaagcattactggatgataacacacgcaagatccaaattgtggatgattatgatacagatgctaaccaagaaggagtgcaagtggtgcacacagaaaaaggcaaacaagatgtcagaaccgaagaaattaaaaaggaagagcaaacagttacaactaagactgacgatttgcaaagggagacaacagacataaccattaaaaagggtgcagaagatttagatttagctggggaaggctggagacaaatgttctcaaaatttgccaagaatattgtaccaagtgttcgcaagagaattactagattatccaatgatgctcatgagttattattagctgacaataaagagaaagctttaacacgtttgaaatacgatttttattctcacgtgactgaccctgttgaatttgaagctaaattaaatgacaagcattccacaatgtacacaatgccacatatagcggtcggatttgtcgcctggcagcaagatgaatttgaagtagttgaaacaatctcactacctaattccagttttaactcatgtggctatgaggcttttaattattctcttgataaaccaataccgtgggctgattttgtgtctataactggcacagataagaattggtcagatttggctctgatggatctagcggctgacctgggtattaacataatcatggttgaacccaggggcacattcgtgagcaagagcaatccagattgtgatgattttatgtgcatccattatgatttaccattgccagatgaaagcgaaaagttaattgatacagtaagcaacagaataggtcatttctcaccatgcatcatacgcagaatcagaagaggtggaacatattatgttcatgacttaaatcaaaacatcaatgacagaaataaaataatacaaactagacttggtccacataataattgtaatagggctcctgatatcactggagatgagaacattctatgtgagcttatattcaatttacatatatcggaagatttatctgatagcatatcgagatttccaacagtttatgaattggacggaaagatgtacataagtaacaacccggatacaaaattgttaaaatgggaaaccaatcttatacatgtggagattcgtaatgaatatcataatctggttgataaaatagcatctgccttagaaggatctttgaaactttctgagttaccagagatgagacataaaagttcagaattgcctaatgaaatggaaagtgaaatagcagaagagatcatggaggttttaaggaccttctctagaataaattcaatgtttaatgataaattgaacgcagcattgattaaggattccaaagattgtcgtgtcatcccatggtacggcagaagtaaaataatatttgagaaaaaatttaatcataaactaaagaaatttgacacgttatgtttgaaacaaggtaaagaattgtataaatgtgaagtaaccaacttcagtgagggagatccagttgtaaatttagaattatacagtgaacaaagattcaaagttatgattttaaaagagtcatcaggaagcgcaataaagtcattagtcagtttgatggccgatcacgtgacaatgacagaattcaaagaaatattgaaaagatccagtttaaccctgggaccagctggttatggaaaatcaactatgatttctcaagagataacaagtggagatttatgtgttgctatgaccagatcatctgtaatgagtatcgaggagaaaataaaggataaacatgttactgtatgttctctggagaaagcatcatgtagtatgatgaagtgtgcaaacacaatatttgtcgacgaagcaacaatggtagattggctcagattggcactattatgtgaacgacccaccacattgaagttgtacggtagtgagagtcaagtgggggctgtggatatgagcccaactcctggcatgaggcatgtgatgagaatacaagatctattattagaccatcaagtaaataggtttaacactactactaacagaatcggtgaagaactagctacttttataagacctatggaactcaagttagtttcacttgcaaagcacaaaaccacatacaatgtaacagtgttggaggacgcagacttcgaacgattaccaataatggttaaccgttgcaaccccgatgtaattataacaccatacaattataatagacaaagaattgaagccatgcatggaattagcgtccctgttgtgaccactcatagctatcaggggcaggaagtgaacaaatcattagtgatacttagggcagaccgtacaggaaaatgggatttgaacggtaatgagttgtacctaaactctgctttgaccagagcaaaatatcattgcgaaataattatatatggctatcccatttctaatattcaaacggtgagtgatttgtgtcattacgtaggtggagtgcagccagataatacgataaacgaagaattggaaccagaaaatgacgaccctgaacaagatatgaatgatgaattacctacagtgttgacaatacgaacaatgcatacattaaggaaaagtgacattgacaagttgaacgaattaagtattactcagcaaggtcattctgtaagttatttttatgtacaaaagaatcatattagttgcgttttaaaattcatgggaaaaaccgttgctgaaatagtcaacattgatggaaacgtcaccataacaggaccatggtactacaaacgtaaaataatggacaagttagaccaaaaattggatttgaatgatattagtggtataaccatttgtcccaaaggtactaaattggttaagattcgtacaaatcaaaggtttagaaataaagtgagagaattagcatggattgtagataagtgtcatgatggaaaattgataattaaaatcaatgatgttactataactgttactaaacatgtaggttgtccattgttcagcggattgaaattcaggacagaaaatgaatattttgagatttgccaattgaaatattttagtttaaggagagaattagtgatacatagatcaaaaaattatcgagagttgagttgcattatgaaatggttagatatagattttaactctatcaattatgatgatgaagttgaaattggttggttgacttcgttatcaggacacaatattagctcatggagacaatataaagaacgactatcaagtgtcagcatgtggttcattaatgcttgctttgatagtacatcagtgaaatgtaaggaattgagtgatcgaaataccacgatttttaataggtatatgttaacggaaaagagggatctgataaaatttcatcaatcaccgataaaacatgataaattgatatacaaaacaatagaaagaagagctttgaatttgtggaaaactgagaatgtttatgagttgttcaataaagaaaacttgattctaacagttaaagatagttccgatgaaatactttggagacaattcgttagggagtgtttattagacatggatcggagtgatctgatcaagggaacctcaggtttaaatcttgaaattccaggattatatttgccgctggagaaacactatcaattgggaaccgaattacgacagattgttggcactaatattaataaattattattgctgactagtccgggaattcatgatagcataaggttgaatataaatgacaatgatgagttcaagacatccatattagcaagatatcctaaattaactattcaagttggcaattataacttgttgaatacagggatggttggggtattggaacaaatcatgttgaatacgtacgctaagaccagtaaaaataacccacaaatagtcgtctatggcggcatgagtcccagttgtgtagcagtgcaaggcaaatactacgtgtcgctagatatacctgataataactcctcaacaaagcgttattatgatagggaaatgcccatagtgaatgctcttgtttatagattcaatgaggggagagatgatgaacacaaagttagcttaaattatgacggttcatatgcaagacggtatttattaggtgttagtttaaaccacgtcacagaagagtatatccaacaaaaattgaacaattgcgattatttatatggttggtcatatagaattgataatcagtcaagttggtattccctcagcactagaggtgataaaatatactaccatggagaggaatattccaatcaaattaaaaatcaattagctatcaagattggtaatggaactcccttatgggtagattatgataaacaagagtatgtggaaacaactatcgttaatgaattatttggtatgtacttggtcagattcactaaacgtaaatttcctaatagttacaaagttactagagtggcatttacagagcaaggttacaacagcacgacaaacatagaagtaccatggatcaacacacaaattgtggatataatgagaaccagaacatttttgactactaagaaattgacgataaataataacttgttaagaaatttacttctcaggttaattacgggcgatgactctgaagatagcttactggcatatgctagaactgtccagtccactcaggtcatcactgaacgaagcatacaagatttgtcaactgttgatttgcatatcactatgagcacgacgtggtttgctttatatgtacaccacaattatttatataaattggaacatattatatcattaatcaatttaggagaagataaggagattctgttcacattattacagcaaatagtaccaggtatcatgaaatgggtaggaattattgcggaaaatacttctgagttcatcgaaacctgcatgaaatatttgcaatttgataggagtttccttaccaatttgagagaagtttctgagaagattaaaaatacaaattgggctgttcagggatctagaggtaaaatttggaacttttcctttaagaagttgattgataatgacatagcaacgctggacaatggtgcaccccccgataacgatggagacgataaagtcgaccaaagtaaatcggaggatcatgtctctgataatgaatccttcactacgtgtgatagtaccaatagtgaattggaacacatagatgtatcaagtgagagtgatacaacagaacaccatgatactggtaatattaatgacgaacctgttattgttaatgctttagcaatgcccgacactaagaaccaaaatctcaataataaaatggacgttgacgtcaaacaaaacaccacaaatctgacctcaagtgaacaaaccatctctcaaatcgaaaacaaaaatgcagttagtacagttgataaggatgtattagtcccatttaaagaaattataaagccgatcacaaacttaccaacacctacgtgcataaaaggtgtttgtggtgaggtaccattaattatatggagttattggcagggttcagaaataaatcattttctaaccacatgtatcaggtcatggcaggaatacaaccctgagatgagaattgtgatacttactgatgcaaacttagggaatatgcataacatattaaattttgacgatatgaagcaaatgtctcatcaagcaaaatcagattggttaagatgttattgtttagctaattacggaggaatttggttaaatttaagtagtatatgtgctggttcactgactcctttaattactgcaaccaccaatcatgagagtgggctttttcaattaggcattcctggcggtgtaaacaaaatgaaatacgaaatgggagtgatgataagtaccacgaaaaacaaaatactacacgagtggttcaaattggttaacgagtttgtcatcctttctaatggtgatactacagttatgttggatttgatcaaggatagattcaaaactgttgcacatacatcaatattggcagtcggtgactatggcaagttttatttgtgggtatatgtgctacaaagaatagttttagattttcttaagactgaaccatgtcacatcaacgctgagaaccaaaaatgtctattgtatatgggtaaatacgcaatagaacctactaaaacttggatcactttatccactaaatcttggcaggatttaggcataaccgttccagttgtaaatctgatcagctcaatgaggaaaaatgttattgacaattatagtgataaattcgaaaagggaagcgtcattgcaatgcttaacaactgtggacatctaaaatataatccattatctttatctcatttaataccaaaggagttgaagataactgaatcaaaaccttcttcacacagaatgaaaaagcataatgttgattacattttaatagcttacgggagtttcggtgatttcataccaatactaaacatttataaatatttaacaggccgcggatctaattatgtatttatgatccaccaagattttgcaaattatataaataacgatgacttttatgatttgagaataaacacaaaagaaacatttaagttggccatggatctatccgacaaaggatggtctagttgtctctctggtagcataaatcaactgaaagaaatgatgattgcaatgaatgacatggtatacatgtataaaaacacacaatgtaccatcgttacaacacactctttttacttgtacaaaaattatagccaagtttttggcaaagagtggatcgtattggagacatttcctttacaaatgatgtccccagttgacaggtcaagaagttgggtagaacaattcattgggaagttttatgatattgacatgcctttgcctattccaattggccaaggtattccgaaaaatcagagaccagtaatatcaatgactaattgtttgccttggatggtttccaattataaaatcaaaaaccctattggacctttaaatctattaagtggttaccaaaaacctctgaatatcaagattcctatgaatagtatttttatcaatttcggcagttgtaccaatcaaaatgacgttgagtatatgtataagttagctaaagacatttgcactttaggctatgacacaatattgtatgataagctgcatgagtctagggtatccaatgacattcttcagattgtcaacgaatgtcctggtaggataatattactgaaacattttaattgcattgaaatgcaaggaaaagttttcttaactatttgtcacggaggacatggtaccgtgatggatagtttatatagtgaaatgtatatagtgattcaaccgaaaatattcgaccaatttcactgggtaaaaatattagagcaatttggaataggttgtgctttaaagaaagattacaataaagaagatttgtcgtccgtgataacgttggctaaagcaaatcataacaaattaaaagatgtaaaggccaatgtaagcattaacaatgtagatttgattaggcaattaaatccacgcaaagatttacatggcagaatatacccgaatgcgttaaagcaagcagggttgatacaaagcattgaatttataaatgatagatttagtgagaacttacccattggttatcacatactaaatgacattgttgacgtagaattatttaatccccctacacaaagtcactgtgtgagagagtgtataaattatgcttttagcaccaatactaaagatgccatactggcatgttctagtttaagtgtgtccaatttgtttaaacctggagttacagaatcagaactagaagacggtctattgtccataggcgttaactattgcttggtaaaaagaaagaatggacgtttgatgaacgccagaccaggtcctgtcttatgtttaaaaataggagacggaggtatatcacagcattgtatactaatcaaaatcataaattatggcaaatctatgtctctaagtggtactcctgcagtgatctcgatcaaggacaatgaattagaaaatcatatcactatgaggttggctaacaacaccagtctagagttatgcaacccccacataatgatgagtcaactaccaaataagtggatcaaaaactttatggctcgcacaagatctctaagcctgcatagcttaagtacaagacagcagttacatgtcactattacttctatgtgcaaatcaggaattacgtacataggtgacacacatcatggtgacaagtctttaggagttggttactgtagttgtaaagaaggttggcaattggtgaattttgaaatatttatgaacaaattgattgtatacacagatattccctgtgaaaaccctggtgtgataatcaatctacatttagattatcctgaagagagattgcacagaacaattgtcaaagatcatgaacgttgggtaagtttgaacaaaccaacagtcaattttaatgaaattaataaaccattaatcagatctaatgagcttgtatcccctcatttaagcaagttcaacttaatagtagcagattttgacaacagaactcatcataacggtgatgacatagggtatttaaagagagctaacaagttaattatttatagtgagcccgctatcactttgaatgacctactaactacacacaacaaaccttataaccgcttaatcattaaaatgggtcatgtaaaatattgccatgaattcaattggagtaacagcgctagactatttttatctttgacaaatggtatttttgaaggaaacagtattataacagataatagattgtcagatgatatcaaaacttatttaattcagtattataaaataattggattaaaagtgcacgcaaagttgtctgtctatgagaatcgtcccgtgattatagctgtttcagatctgattggaactttaaatcagatccctgatgtagaaccagaattaatcagtcaattgacagaattactaaagaaagaagacaccgtcaaattgacatggttgactcacaataactgtaaattaaaacagagagattgtataattcaaatttctgaggacatgataagcataccctgctgtgaaatgatcataattaaaagtttgaaaggtggtgcagatgcagaaaacagaataggttggaagttggattcctccaactattcgttcaaaaatgaagataaatggaatattaaacctgctttggaaaggaaaaatattcaatcaagttgtaaggatgtcatagcaatgaacactatggttataaataacgttgctgttagtcctgtaataagacatataactcattatcaaaattacgaaccaagtttagatatctacatagctccttatacaatgaattatactgccagcacgatagaaccattgtatgatatgcctgatatagcctccatgcaattgtggtcagatacggatctgactgactggttgaacatgtacgcgccatccaataaaactaccattaagagtcgtgaattacctggaaaaattataaacatggagaaaataaccatgactaaatatcctattaaatcaagaccggtattaaccaaaatatgttttgaagaaggcgggtccataactggtaggttattttctgtcgttaatctgcgcactgtcactccagatcctgagaaaatactttgggatgtttgtaatgcctattttcaacctggttgggaacacaatataccacattttaaaaatgatttgttgattataacaccagaagacgttaaaaactgggtggaagagaataaggattgttttggcgtggaaaaagagttaaatgatctattagctggggaattgttaataaaacctataaacgatgtgaacgtacatttaaaattagaatcattattgaaagaaaaacacatatctttgatgaaagagcaacaggccagaataatagtgtggcaaaggaaggcagtttgtggtctgtttgctaaactttttgtgagatgtaaggaaagattgaaaaccctactattggaccacatactctatgtagatggactaagaccagatgaaatatcagccaaactgagacaaatatccaatgtgtttggtttcttcgaaaatgatttaactaaacaagacagacagactgataaaccaatacttgaagtggaaatgttgatgtacttgatgttaggtgttcaccctaatattatcgctagctggcgtgcaagccatgaagattggagatttaaatcaacaaactactggggcaagagtacagccatgagactcactggacaagctaccacagcccttggaaattgtatcacaaacatgcaagttcactcgaagtttgtcattaagaataagtactggttaaaatttgctttatttcttggcgatgacatgtgtatgggtttttcacacaaaccaaacacacaacatttacgccaggacatagcttgcaaatttaatatgcaaagcaaggactcatgggtactcaatggggctactttttgtagtatggtagtttacaaaacaaatgatgacgtagttgaaattggtcctgatgtagtcaggatgaaattcaggtttgaagttactaatggtgtgcatgaagcaacgaaagaaaacttattaatgcggaaagcttcatatttgatgatgttagggaaaacaccagaagtggatcaactggtgaaggaattacaactacccataactccaatacattggtacaattatcatatgatgttgcaaggcgttgctgataaatggggtatgaatgtgcaacaagtggaagggtattatcacaatctacttcacatgatatcgagagaaaacatatatattcacagcttcagaggctttggcaatcgttgaacatgattaattatttttaaaagggcggggatccctccccaaccccgg

SEQ ID NO: 814 - DNA, 13952 bp, Oryza sativa alphaendornavirus
  source 1..13952: mol_type = other DNA
tgaaatgtcttgtacgaccatttcaaatttatgtaaattgaacgcagcaacaacagggggggggcggagacgcccccccccttttaaaaataaaaatgatcaaatcaagtacgatcttggtttgatcaaatcaaaaacccctgttataaaagggtttttgaaaagaatggacgatatacaacgtccaaacttaggtacaactgcattagatcctttatttggatggttcagattgcctcgtaatgtccattgtaggatgaacaaaaacaaatttattgataattttgataatttatttgaacattataaaggtaaacaatttcataattgcaaagagatcagtatagtatgtgtagaagctatgaggggagagttacaattgaaagagcgacattatggcattgctcaatctttttctccagatgatgaacgattgagcaaatttagcgttaagaatatgtcatttggcttggtgactagattattatatttgatttatgtaaaaggagctgaaatttacttaaatcccacagttaatgtggatgatgtgcttaaaaacatgagccacttaattaaaaagaaacctgaaataattgaagaagattttgaagaagaagaagattttgaggaaatggatctagacgacatgggatttatagatgataaaatagaagaaaaaggagagtatttccaaatagtgccattcggtaaaggaaactgcacggaaaaattcttaaaaactttaaagtttcacatgaaaatatttaaaggattatttaattatatgtaccatcatatcaccaatttcaaggaagtaaatgatggatttgtagaaattaaaggaactagagatgaagatgataattctatgaattatgaatcttcatccggcaaattgcctcccattaagttttgtccattatgttcatgccccaatgcatatactcaaattcctagaagaatgaaaacttgtcattacagtgttaaacgatattacccaaataataaaactattgatgataaattcgaaacaaaagttaaagatggggaaataatgaaagaaattccctggagatgtggtgtatgttacacagatttaaacttggaaattgaagagttcagacaggctaacattattatagatgtgataataacagagagcttgtatgttttgatgggtgatctggaaaatttaatgaaattggggtatactgatacttatgatgatttaaagaacacagataaggaaaacatcaggcaacacgacaaaatattggtgaacgaatacttcttccatttacaaaaaagaatagtaacagtaggacaagatttagatcctataataaatgataacgttaagaaagtcattaagggtgtaaattttagacatgacagcaagtttaatagtgttaaaccagaatttgtctgtgaaatgtcagtttgcagagaggaaataaaatcacatttaagatccgatgctattgcctgtataggagatttgctaccaagaactgatgataacaaattccatcaatggaaatataatgattggttattcgaacctaacaacttcgatggatgctgtaataacaattgttgtgatcataatgaaaaattcacatgcttcttgggtatgggagcattggctctgagtttatcccaaatattaggaattgttaataaacaacgtcaattgtacgcaatcattcctagggttaaagacaataagcgtttaagggataatactggtacaataatctctgagggggatgataccatgatattcttggatggatgcactaacccgttactggtcaaaactgacacattagaaacacttagtaactttaatactattgtgaacaacggagaatactacgtcatcaataaggtatttgatttggaattatgtagcaccgtttgcatactgggcccttacactgatgctaattcattgcctgatgacaaaattgtcaaagatgacaacatcactactatatctttacctgatttagactcaatcatgggaagaattattggtttaaatttcaggcctagctcattcacattacatacatctctgtttaagtatttatgcctccggaatttatccggaaaagtgtctcacaatacattgagacaatacgctgttggatttgcacttagaaggtttgttgttcacaataaagtggtttcaaatccaagtgtgatgtatgaaatgatagatattcatgtcatgttatcacgtatttgtatgatgcaattaaaaatggaatatgatcttagtttgaactatagtgaaaaaacaaagtatttaggacctctaaggtggatgccaaaggaattggaaggtttaacaactagatacgtgataaatgctctcatagaatatataactgatagattcagcattactgaaatagacatcatgagagttttagaaagcacacacctttcagctttcataacaaaattacatgacaatcatttatggtcggctttgctaaaattaagcaaaggtattactacagaaaggcttactgttagaaatttgggagacagtcactgtgagataatatccaataacattgaaagatgcttccatcataatcaaaattgtgtgcatggtttgcttttaacagaacatatatgtaaatgttgtggtatatcgatagaatttggattattatgcaaatgttgtaaggggacgaccccaataacagcttttcaaattgatgagcaaattagaaaagaagtggatgacgagggtgaaaattataattatagatttaaagaattagagtctaaacggcacacaatcaaatctaaaataagccataacgagatgaaatggcctcctataaaacccaagcccagaactgtaaaatatcaacagattacagtagcaagacctgtcaaacaagatgtcaccgaaatgcctaccaacaaagccttaccaaccaaaacaatagatgaagttatagcgaaaagaggcaaacatgttgtgtcagtaagtaatttagatgagttcaaattgttactagacgaagacatgaagaagatccaaattattgacgacgtcgatagtggtgctaacaaagaggaagcattaatagtacacacaatagataatattaaggacacaaaaattataaaattaacggatgaaagccaagtgacttcaaagcaatcagacaggcttcaaactgatatagctgaaacacctccaacagaaggtgacaattctcctgatctatccggagaaagctggagacagatgttttctaaatttgcgtcaaaaatagttccaagtgtgcgtaagagaatcactaaattatcaaatgaggcacatgatttgttatctgctgataataaagaaaaagttctaaccagattgaaatatgatttttattctcacgtaactgatcctgtggaatttgaatccagattaaatggtgagcactcaacaatgtatatcatgccgcacataccagttggattcgtggcttggcaacaagatgaatttgaagtgatagagaaaatttcattatctaattcgagctttaattcttgcggatatgaagcgttcaattatgctcttgataaacctataccctggactgactttgtttcaataactggtacagacaaaaattggtccgatttggccttaatggacttagcttctgatctaggaattaatataatcatggtagaaccaagaggagtattcgttgggaaatacaaccccgaatgtgatgaattcatgtgcattcactacgatttacctttaccagatgaaaatgaaaagttaattgacacggtacaaaacagaataggtcacttttccccatgtgtaattcgcagaattagaagaggaggaacttattacgtacatgatctaaaccaaagcatcacagacaggaataaaattatacaatcgagacttggacctcataatcattgtaatagagcccctgatattactggtgatgaaaatatattatgtgaattgatattcaatttacatatatctgaagatttgtcagacagtatatcaaaatttcctacagtatttgaaatagacggaaaaatgtgcataagtaataatcctgacacaaaattattaaaatgggagaccaatctcatacatatagaaataccaaaggaatacagtactttagtagataaaatagcgtcagcattggaaggttctttaaaaatatcagaattacctgaaatgagacacacaagctccgaattacccaatgagctagaaagtgaaataacagaagaaataatagaggttttgagaatcttttctagaataaattctatgttcaatgataaattggatgctaaattaatcaaggacacaaaagaatgtcgcgtgattccttggtatggtaggagcaaaataatgttcgacaaaaaattcaatcacaagttgaagaaattcgacaccttgtgcttaaaacaaggaaaacaattatataagtgtgaagtcaccaatttcagtgaaggtgatcctgttatcaatctggagctttacagtgagcaaagattcaaggtaataatacttaaagagtcatctggtagtgcaattaaatcattagtcagcctaatgaccgaacatattactatgtcagaattcaaagaagtgctaaaaagatctaatttgacgttggggccagcgggatatggcaaatcaacaatgatatctaaagctataacacacggtgatttatgtgttgcaatgaccagatcatctgtaatgagcatagaagagaagacaaaggataaacacatcactgtttgctccttggagaaagcctcatcaagcatgatgaaatgtccaaacaccatatttgtagatgaggcgactatgatcgattggttgaagttagcgttgttatgtgaacccacaaccactttaagaatgtatggcagtgagagccaagtaggagcagtagacatgagtccaacacctggtttaagacatattacaagaatacaagatttattgttagaaaatcagataagtagattttactcaacttacagaatcggtgaaagccttgccacttttataagaccgatagaacccaaactcgtatcattggctgatcacaaaacaacgtacaacgtgactgtgttagaggatgcagaattcgaaaaattgccggtcattgtgcatcgatgcaaacctgatgtaattataacaccatacaattataatagacagagaattgagaatatgacggatgtcacaatacctgttgtgactacgcatagttatcaaggacaagaagttaacaaatctttagtgatactcagagcagatagaaccggcaagtgggatttgaacggaaatgctttgtatttaaattcagcgttaactagagccaagcaccattgtgagataatagtatacggttacccaatatccaacatacaaacagtaagcgatctatgtcagtatatgggtggagccccgcatgaaaacagtctggaagaaaacacagatattgtcaaagataacccagaagatgacatggtgaacgatgaattacccactgttttaaccatacgaacgatgcacactctaagaaaacaagacattgataaattaaatgaactcagtattgttcagcaagggcattcagtaagttatttttacattcataaaaatcacataagctgcaatttgaaattcatgggtaaaagtgtggcagaaataataaacattaatggaaatgtaaccgtaaatggaaattggtattataaacgcaaaattttagataaattggatgaaaaattggacttgaatgatgtgaaaggtataactatatgtccaagagggacaaaattagtgagaataaaaaccaatcaaaaatttagaaataaggtaagggaattagcctggatagtggacaaatgctatgatggtaaattcactatcaaaataaataatatcattataactataacaaagaacgcaggttgtcctttatttagtggattaaaattcaggacaaagaacgaatacttcgagatctgcaaactgaaatattttagtttgagaagagaattaataatacataagtcgaataattatagagaattgagttgtattttaaaatggttggacatagattacaattctattaattatgatgatgaggtggatattggttggctgaaaaccatgactggacataatataagctcatggagacaatataaggaaagattatctagtgtcagtttatggtttattaacgcttgttttgacagtacatcaagaaaatgtaaagagttaagtgaccgtaatactgccatatataatagatacatgttaacagaaaatagggagttgataaagttccatcagtctccgattcgacatgacaaattgatatacaaaaccactgaaaggagagctttgaatttatggagaactgaaaacgtttatgagttgtttaacaaagatgatttaatattaacagtgaaggaaggatctgatgaaacgctctggagacaatttgtaagagaatgtttactagatatggatagaagcgatttgatcaaaggaacaagcgggttggcactggacataccaggtttgtatttacctctggaaaaacattatcaattagggacggagataaaacagattattggcaccaatataaataaattactattattgactagtccaggcattcacgatagtatcagattaaatattaacgacaatgatgaattcagaacagctatactagctaggtatccaaaactcacaattcaaataggaaattataatctactcaattctggaatgataggtgtactggaacaaataatgttgaatacatatgcgaagacaagcaaacataaccctcaaatagttgtttatggtggaatgagccctagcagtgttgctgtacaaggaaaatattatgtatcattagatataccagatgaaagatccccaattaaaagattttatgatcgagaaatgccaattgttaatgcattagttcatagatttaatgaaggtagagatgatcaacacaaggtcagcttaaattatgatgggttattctcccgtaggtatttattgggagtgagtctaaatcacgtaacagaggattatattcaacaaaaactaaataattgtgattatttatatgggtggtcctatagggttgacaatcaatccaagtggtattccattagcaacagaggagataaaatttattatcatggggaggaatactccaatcaaataagaaatcaactagctattaaaattcaaaacggtaatccattgtgggtggattacgacaaatgtgagtacgttgaaaccacaatcgttaatgaattatttggaatgtatcttgtcaaatttacaaaacgaaaattcccaaatagtaacaaagttactagagtaacattcacagaacagggttataacagtacgaccgacgtagaagtgccgtggatcaatacacaaattatggacataatgagaaccagaacatttataaccactaagaaattaacaataaacaataacttattaaggaatctattattacggttaatgacaggggatgattcagaagatagcttattagcatatgctaggacagtgcaatctacacaagtgatcactgataaaggcattcaggatttatcaacagttgatttacatgttacaatgagtactacatggtttgctttgtatgtacaccataattatttatataaatttgaacacataatttcattaattaatttgggagaagatagagaagttttattcaccttattacaacaatttgttccaggcatcctgaagtgggtggggatagtagcagaaaatataactgattatatggaagtatgcatgaagtatttacaatttgataggagtttccttactaatttgaaaaatgttacggaaaagattaaaaatactaactgggctatacaagaaaacaaagggaaagtttggaatttttcttttaaacacccagacgacaataacatgcctatgttggataatgacatactcccagataaagatatagacagatacaaaaactctattagagaggaagattctacttgtgatcaaggacccgtcacaactcatgaagagtctgatttagagaatactcaggaaaaatcagaaactgacaaggaactaggagacaattcggaagccttaggtcttgacgatgaggttgatggggacaatcaacaatcatcgagtgaaaatgttgtttataacgttgaaaaagatatgaccaaagaaacagatgccacagagaagccggcctctaatgatgatcacaaatccgtaccgacctctgatacggagatcaaattaccatccgatgatggcacacaaatttcatttacagaactaactaagcctatcacaactttacccactcctatatgtgttcaaggggcatttggagaagttcctttaataatttggagttattggcaaggatctgagataagtccgtttttactcaattgtattagatcttggcaaaagtataaccctgaagttagaatagtgatactgactgacaataacttagggaacatacatagtatatttgactctagtgatactaaacaaatgtctccacaagccaaatctgactggttaagatgttattgtttatctaattatggaggaatttggttgaatttgagtagtatttgtgctgaatctctgatgccgttaattaaagcggcagtaaaccatgagagtggtttgttccagttaggaatgccaggtggagttgacaaaatgaaatatgaaatgggtgtgatgatttgcaccactagaaataaaatattacatgaatggttcagattaactaatgagttcgttattttatctggaggagacacaacaattatgttagatctgataaaagacagattcaaaaccaatgctcatactgccatattggcagtgggggattatggtaaattttacttatgggtttacgttttacaaagaatagttttagacttccttaaaattgaaccctgtcatattaatgttgaaaatcaaaaatgtctactatatatggggaaatatgcgatagattctgctcgaacgtggcacattttatccacacgttcttggcaagatcttcaaataacagtccctgttataaatctaataagtgcaatgcggaaaaatgtgattgataattacagtaataaattcgagaaaggtagcgtgatggagatgctagatacatgtgaaccactaaaatataacccattatccttggcaaatttaacacctaaggaattaaagagaatagatttagaggagacagacaatagacaaaagaaaaacaaaattgattatattttaatatcatatggaagttttggtgattttgtaccaatattaaacatatataaatatttgatcggacgaggatcaagttgtgtattggtcacccacaaggaatttgcaagttttataaataaagatgacttcttcgacttaaaaatagacacaaaggaaacatttaaattggctatgaacttttctgaaaaaggatggtctagttgcctatctggtagtttaaatcaattaaaagaaatggtaagttctatgaatgaattggttaatatgtataaaaattttaactgcactatcgtgaccacacattcattttatctatacaaaaattacagccagatatttggtaaagaatggatagtattggaaacgtttcctttagaaatgatgtcaccacttaataaaacaagtggttggatacaacaatttattggaaagttctataatttggacatgccactgccaattttaataggtcaaggtattgtgagaaaacaaagaccaattatatcaatgactaattgcctaccttggatggtttctaattataaaattaaaaaccctgttggaccgctgaatatgttaagtggtttccaacaacctttagggattaaaataccaaataacagtgtgttcataaatttcggtagttgcacaaaccaaaatgatgttgagtacatgtatgaattagcaaaggacatctgctctttaggttatgataccatattatatgataagttgcatgaatcacgagtatcaaacagaattctccaaatagttgaagaatgttcagggaaaataatactactaaaacatttcaattgctcggaaatgtatggtaaagtgttcttaacagtttgtcatggcgggcacggtacagtgttagatagtctattcaatgaaatgttcacagttgtgcaacccaaaatatttgaccaatttcattgggctacaatactagaacaatttggaattggttgctcactaaatagaaattacactaaagaagacttaacatctattatggctttagctaaagctagcaatcacaggttaaaagatacaaaagctagcatgaacataaataatttgggattaatcaaacagttgaacccacgtaaagatttacacggtagaatatatccaaacgctctacgacaagcaggattgatacaaaatatagaatttattgaaggcagattcagcaccaatctacctcttggttattatgtaatagacgatatagtggatgtcgaattaatgaaccctcccactcaaagccattgcgtaagagagtgcattaaatatgccttcaacagtctcactatggatgcaataacgtcatgttccagtctcagtatatccaatctttttaaaccaggggtaacagaatcagaattagaagatggtttattatctttaggggtaaattattgtttggtcaaaagaaaacaaggtcgtgtgatgaactcaaaaccaggaccgattttgagcttaaaaataggagacggtggcatttcacaacattgtgtgttgatcaagatatcaagttatggcaagaccgtttctttaagtggaagccccgctgtaatgccaatcaaagataatgaattgaaagatcatatatcaaacagattaactaacaatactagtatggaactatgcaatcctcatgtgatgatgagtttattaccaaacaaatgggttaaaaatttcatatcccgaactagatccataagaaagcatagtttgagtgccaggcaacaattgcacgtcacaattgcgtctatgtgcagatctgggatcgcatacataggagacacccaccataatgacaaagcattaggtattggttattgcagctgtaaagatggttggcaacttgtgaattttgaaatattcatgagtaaattgattatatacactgacattccatgtgaaaatccggtggtaattatcaatttacatctggaatacccaaaaagtatatcacgtagaactataattgatgacaaagagcgttgggtcagtctaaacaaaccaactgtaaacttcaatgaaataaacaaaccattaattagatccaatgaaatcgtgtccccacatttaaataagtttaatctaatagtagctgactttgataatcgaactcatcacaatagtgatgatattgggtacctaaagagagcaaacaaactggtcatttacagcacaccagaaattactttcaatgatatcttagcttcacataataaaccttacaatagactgataattaaaatgggtaacacaaaatattgtcatgaattcaattggggcaatagtgctagattgttcctgtcactaactaatggtatcttagaaggaaatagtattgtcaccgatgttagattgtcaaatgatgtaatgaactatatatttaaatattacaaaatagtgggtttgaaagtacacactagagtctctatttacgaagatcgtcctgttataatatcagtttcagatttactagatgagttcagtcgaaatgaagaaatggaacccgatttagtaacccaattgactactttattaaaagaagaagacactgtgaaattgtcttggctaacaaaaacaaattgcaaactaaatgacagtaacgatgtcatttgcatatcagatgacacattaagcataccttgttgtgagatgataataacaaagagtgttaaaggaggtgcaaattctgatgacagaattgggtggaaattagaagataaagatcaatctttcaaaagcgacgataagtggaatgtcaaaccatctcttgaaaagaagaacattcaatccagttgtaaagacgtcatagcattaaatgatatgaaaataaatgacgttcaagattctccatcaattaaaaatgtaaaatactactcaaactacgaaccaagtttagatatttacattgcaccttacactatgaattatactacaagcgtgatagagccattgtttgatatgcctgatataacatctatgcaattatggactgacacagatttgacggattggctcaatatgtatgctccatccaataaaactgtaatcaagagtcgtgaattacccggtaaaattatcaacatggagaaaataacaatgacaaaatatccaattaagtctagacctgtcttaacaaaaatatgttttgaggaaggacgttccattactggtagattgttttccgtggttaaccttcgcacagttacacctgatcctgagaaaatactttgggatgtctgcaatgcatactttaaacccggatgggagcacaatataccacattttaaaaatgatttattaatcataactccagaagatgttaaaaattggattgaagaaaataaagattgttttggtgttgaaaaagagctaaatgatttactagcaggcgaattattaatcaaaccattgaatgatgttaatgtgcatttgaaattggagtctttactaaaggacaagcatatctccattatgaaggaacagcaagctagaataatagtatggcaaaggaaagcagtttgtagtttatttgccaaattgtttgtaagatgcaaagacagactgaaaactttacttgtggatcatatactttacgtagatggattgagaccagatgaaatatcagccaaattaagacaaatatctgatgtatttggattttttgaaaacgacctgactaagcaagatagacaaactgacaaacccattttagaagtggaaatgttgatgtatcttatgttgggcgttcatcctaacatcatatctagttggcgttcaagtcatgatgattggagattcaaatctacaaattattggggtaagagcacggcaatgagattaacgggacaagctacaaccgcactaggaaattgtatcactaatatgcaagtacactcaaaatttgtaatcaaaaataaatattggttaaagtttgctttatttcttggggatgatatgtgtatgggtttctcacacaagccaaacacacagcacttacgccaggatatagcttgtaaatttaatatgcaaagtaaagattcttggatgaccaatggagcaacattctgtagcatggtagtttacaaaacgaatgataatgtagtagaattgggcccagatgtagtcaggatgaaatttaggtatgaagtcaccaatggtgtacacgaagcaactaaagagaacttaatgatgcgcaaggcatcttacttgatgatgttagggaaaacacctgaagttgataaattagtaaatgatctccaattacccatcaatcccgtacactggtacaattatcacacgatgttacagggcgttgctgacaaatgggacatgaacatacaacaagttgaggggtattatcataacttgatctacatgatatctaaagacgacatttatcaacataactttagaggattcggtaatagatgaatattataactaactctgttttgtcaatttatttttaaaaggatggggcacccctcccaaaccccgg

SEQ ID NO: 815 - DNA, 13459 bp, Persea americana alphaendornavirus 1
  source 1..13459: mol_type = other DNA
gtaatgatggccaacctcgttactaatctactcaaaatatgtaagaaacgtttcaggagggggcctcgaaagaggccccctttaacttataaaaagacgagatcggtaggaagaaatcagtatatagatacaccagacaggctgactgcaattgaacaatgcatgagtgctggctgggttaaactgccacgatgttgtacagtagtacagaaccaaaatccatttgtgacttctttaggcaaattgatggagaaatacaaatctcgttttactaagaataatgagttgccaatgatcccggccattcgtggtgagcggtatgctaaagatctacattatggtttagctgactcaaggccagagggcaaattgatggatgataaaattaacttaggcgagctgagtccgttggatgttgctagattgtattacaatgtactaagacttaaaagatgcatagtcaacgtatcaaagttctcaattgcagaactagaagctttagtcaagcatgaggcattgaacgatgatgaaatgatattcgaagaggattttgagctggaggacttgcctgtaatacagatttgcaagggcaaatcgaaagacacaataccagtactacagatgatcaagagagtggttatgaaatacggtggttatcgcgggtatttcacagctatgcaacagttggaaaccacagacatgccattacttgccgtggaggatggcagctatgaaatcaagaacaggcaattcaatcccattaaagtatgctcattgtgtgatagcatatgccattatagccaatatgagcgtggactcaaaacagtgcataagagcctgcagaagtataagcctaaaagtaaagtgttagaggatgaaatgcggacagtaatagacagcaaacaacacagtgtgccatggagatgcggactatgtttcactgatttgaatgtgcgcataatattcagcgaggagcgcaaaaccttggctattgagataataatgaaacacttatttgtcatagctggtaatcttgatgaattgctcaaactaggatatggtgattcatatgaagacttaaccaatgatgagaaatactccattaaaactaatgaccatatggttgtgaatgagtatttttaccatttacaaaggaaaataataccagttggtcaggacttggaaaaggtgagcgagcaagcaataagtgctgtgattaatggttgtcacttcaaggccttaagcaagtacaattcaattaaaccggaattgattgcagaagtgtcaacattaactcaattatgcaggcagttcatgcagggtacggaggtggtgtgtatcggagatatattaccaaccataacaaagaaaggataccatcaatggtacaaagatgaacatttttaccaattggaaggtggtactgcgtgtgctaacaaattaatatgtagtcatgcaggcccgttcaaagtgttcggttcattcggggcactgaaattgacgatatcacaaatcttgaatatggtagataaacagaggagcatgtcaattataatgccgattagggctgaaacaaatactctcaacgacaaaaccggcaagttcgtgaatgatgattgtaggaccatattgcacctagacggcgacacagttggctatgaacttaggaaggacacataccacttactgagcaattttgacattatttattgtaatcataattattacatggtcaacacaattaagaaattaccattaacacagcttgtaactgtgactggcccttaccatgattttaacaatatatcagcgctgagagtgagagtgatagaccggttgaccatcaaactaccattaccaaatatagatggttttatgggaaggtggttcggcttgaattttgaggagcacgagtttgacattaatgttccgttattcaaatatttatgtttgaggaacttatctggtaaaataacacatgatacattacgccaatatgctgtaggattcgcgttgcgcaggttcgttgtgcataacaaagtaatcagcaatccatcagtagtgtatgaaagtatagacattcatataatattgagcaggatatgcatgatgcaattatcacaccagtataacttatgttataacttcagtaacattattaagttgttaggaccattgaggtctttagtaactgatatcgaaatggctatgacaagtggtctattgagcttgttatcagagatgattaacaaaacttcaggcataagcattgagcaattgaccgagtggatggcaaatagcaatgtatcagttttcatgaatggaatctgtaaacatgacttttgggcacaattgttacgaatgtcacaagtgacagagatggagtcaatcagaatagttgacattgatagagacgtgttagctgatgatttggcagacataactacctgtgaccatcacacccgggcatgcaagcatgaagagaaaaagataatgactaggtgtgcatgttgcaatcttaaattatgtgcaaatgtgcagtattgtgagtgttgcaaaccaaaagaagcggacaattttatgaagcatagtagctgggcagagactgatcagccagtggatttcgcgataagcccagagacaacaataaaggcagaacgagcactcaagttggcgacacgccagataccggaaagcagcagacaagaggacataccgacagcaagcactaaggatgatacacaacgggatgaaccaacaaaaacaccaattccagtccccacacaagcccctaaaccatatgaagctagtgatggtgagtcatggcgtgaagtgattaatcgtgccgttaagcttaaagtggacaaagcaaaagccatgattttgccaataacagatagagtcatgcagcgacttaaagaagatgagcaggcagaattggtgagtaagctaggatttgaatttgtggagcacgtaatcaattgtgcagactttgagagattggttaatgacaaggatgataccatgtattacatgcctcattgcgctatggggcatagtttgctaccacggaatacatttgagatagttaaaagaattaacatcccgaatagtggcgtgaatacatgtgcgattgatgcgtataattacactgcaaccaaaccggtaacaagagacgaatgtttagctgtggtagacaaagagactgcattgtaccagactgatctactcgacctagctatgtcaagagaagataatttaatcatcgtagcggacagcaggtgctatgtttcccgcggggatcctaatagcgatagctatatatgcatagggttcaatgaaccgcaagaagcgagaggaatcggtcatatgatgccgattgtgataaaaagattggagaagaacaaccagtacttcttacatatgcaaccaggaaacataacagaccgaaatatgatacttgctactaggtacaaccaacatacaaaagtgcacactgcaacagaagttgacgaattcggaaatttagtgtgcgaattaatatacaactatactgtgacggagacaaaatcaagcaacctggcccaatcagtgaaggtgcaaacactaggtgatgatgtggttctgtcaaacaattcattgacaaagatacatgatccagataaagatcacatacacgtcacaatcccaaggtggatgcgcagatggacggacaaactgcaagcatgccttacaggaagttgccctcttagtgcactgccagactttagacacaccacgtcagaattaccattaaacatagaagaagcggttgaggacaggttattagaatgtatgcggtcgttgtgtaggattaatgaagcttgtaccacattacaatcaaaaacaataaaaaggaaaattaattgcacattaattccatggttcaaatatagtaagctattgataccgaatacaatgaagacaagcctaaagaaactggacatgtgtgctgtggtcgtggataacatcatgaccaaagcgactgtaatagggactgataaaaccaatttaattgttgacattcccataatagtagacaagagtgtcatagtatacgagatcaaagaatcatcaggaagccaaatcaggatgttatgtggattatgccagccgaccattgacatgcccactgtacgtgagaaattgcgcaatgctgaagtcgtattaggaccagcaggttttggtaagtccaccatgataggtaaccaagcaaaagcgggtgacctgtgtgttgcgatgacatcaacatccgtcaggtctttgcaagcaaaagtaactgcatctgcaagagtgatgagcatcgaaaaggcaaattacacacaccagaagaccaaaacaaatttgtttgtggacgaagctttaatggtggattggctaagtataatattattgtgcacaaaggatacaaagattaaaatgttcggggcagaacaccagataggcctattagatatgagtttaacccccggaatacgaacgattgaaccaataattaaacatgttagtgacaacaatattaagagaagtaaaattagttataggattggtgagccattaaggaccttcatagaaccactcgaacccgggatagtgagcggagggacacataagacaacgtacacggtgacatgcttgaatgacgaacaaatagagaatataggccaggccataaccagatcaagacctgacgtcatcattaccccttaccaatataacaaagcaaagattatgagtatagataaccgtgttccagttgagaccacacattcgttccaaggccaagaagtgatgcgaagtatggtagttctgagatcagatgtgacaggaaagtgggacttaaacggtaagccagactatctcaactctgcattaacacgagcaaaggagcatgttgacatactaatctatggatatccactactaaatgtgacaagaataacagacataatgacagtgattagtggaatgcaattgctggatgttagcacagcatataaaccggaggagaccaaacaaatcacaatagatgaggcgaaagagataccagaaaatataacattatctaatatgcatacgttgacagagaacaatatagatacgttaaacaaattgaagccagagatgaaaggtgtaaggattcattacaaaaagattaacagcggcgtagaaataactgctaataaattcggtttatcagtcgcgaaaattacaaatatagatggaaatgtaactatagacgcaaatgaattcgtaaaaaggcaaatccaatctaatctacacaccgcactgatagtaccagatgaggaattaggcagcttgactgggggtatgaataagaggatactgagactaaatattaggacagcaagtaaactcagagagttaaattgggtgcttgacaaaaccatagacggaacattacaaattaagatagatggtgggatattaataataaccaaaaccactgattgtccattatgtgccggcattaaggccgtatacaagaatgagaaactgataattacaaatggctggaaagatatattaacgagagatatgtacattacatatgacggccagttaagtgtgttgagcggcataattaactggttggaaataacaaccacagacattccgatggatgttggatatagtattgaacatttaagagatttgaggggtgacattatgcattctaagtggcaattggaagaaaggttgacccaggtttcgaaatggatactaaatgcaatattgatggacgaattcccaaagtgcaacacgaacaatttggcaaatgtcaacctatataatagtatagctagcaatttgggagctacgaaggtgacgcatcataactcagtgataccacataaacgactaataattaagaaacgttccctactacaatctgaccaatatgttctcgctgacaacaaaaggccaatagcagaagtacggccaggtaaccaagttgaaacatggcgggtattcatcattgcatgccttgcagatatgaaacaagaccagcagataaaagggattggtatggcagatattgatatacctggattgctattgccattatccaagcacttcgcgatcgggactgaaattaaatcattagtagcacgggaaattaacaacattaatagactggctgccacgaactcacatgacgcaatacggttaaccacagaatgttataacgcatataggaatgaaatcatgacgagattcccgaagttgaacatcaatcacggtaattatgaaatggtgcagtctcatatagaacagatattagagaacataattgtgaacatggtgagcaggattgacaaagacgctggtgagctggttgtgtactctggcccagtaccactggtaataagtatgcaagggaagtattacgtcaagattaagattccgaaagataatgacccggagttaatgtatcatgaccagcagatgataatggtcaaatcaatgttgagcttatttaatagttcgaggacaggtaataaagttgatatagtatggaacggccaagcagagtgcaacaggataatatgtggagttagcctattgagtaggacaaatgaagagcttaaagagctagtggatgaattcacaaatgtatatggttgggtaccaatagaggaaaagagtaattactttacaatcaatcataaggatagggtgataggttaccgtcacggaacattcaccaggcaaattagaaataatttgattgaacgcgtagctgatggtagaccgctattcacaaatcccaccactgcgcattatgtgcaatgcagaacaatattagagttcatggatcaccgactggtgagaatggagtatgttaaaataccagagagcaaggtagtgacacggtgcattggaacacaccaagacatattttcagaggaaacagtacgggtaccgtggctgaattttgacataccaagtgtgttgactgataagaaaatgatcataataaaggatctgaaaataaggcgtagcttgatgaggaatttgatgttgcggttattgacaggcgatgatagtagcgagagtctaatagcatatgcaagaactgtcgagtcgacacaattgataactgacaggggcatacgcgatgctaacacaagcgacttggtagtaacattaaacaccgcatggtacgcttattatattcacaataattataatgccaaattcaagatgctaatatcgctaataaacagtgcacaggcaaaaccaactttaatgagagtgttagaatgcattgtgccaggcctgatgaatattgcaggcaaagctaatcaattggtggaaggttattgcgaaaagctaatcacatacctgaattcaaacataaatattgttaatcaaatgaaagatgtactgagtgaagcgaaacgcatgaactggagtaatgattatgatgatagacggttaattaaatactatttcgatgatgaaggcggcgttggtggctggctggattataggccaccgccaagttttggcaaagaagatgacagtggcaatcgggaagagagcacagatagtgaatcaaataaagggaccgacgatgagttctttgatgctaatgctgatgacgatcatgatgaagagccacacgttgcagagcaacaggaaccaaaagaagtatctacagaggcagcagcagtagagccaacacagcaagaggagctaccagtggacgaaccaagcgtgggtgcaagagacagtgacgtagtgtcaagattgatggaccaagataggtttgccggattaagtagagatgtgataaatgatacaatacaggagctggcacagacgttaggtcaggaagcagataatataggccaggaaaagatagaatattacttagcggccaagtgggatagaagcatggtgcaagtgagattgacgcggccacaattcagcctgaaccgaggaagtgagccatcaccaccagtgatagaagtcaccactagacacacagtaccaaaactcatatggacgtattggaatagcatgtccgtggattacttaatatggtgcatgatcaatacttggcagcatcataatcctgattacagaatagtagtgctaacgcccgattccttaagacacgtgttaagtaaatcagaatgtgaaatattggcagcccagaccccacaattcgcctcggactggacgcggctaagaatactgaaggagtttggaggaatatggttagacatatcaacgatagtcacagactcacttgatggaatagtaactagatgttctaaatccaggtcaggtttatatcaaatatgtttaaacaataggcaagccgtgaataaggtatatgagagctggttaatagtggctagcagtaataataggttagttgatgagtggtacaacgtgactacacaaatgatgaattacagtaagcctaacggggatggagccctcgaatggttatgtaataagtatggagaagtgtttaagagagccgagcaaccgattgttcctaacctgaggaaatacctccgcctgtacataacggaaaggattgcatgtagtaatacatctctggaaccgataaccacatgtaatgacgaagcaaagttgactttatggcatgacgcaagtctgctgcaatggactgatatgtggggtgtatacgcaacaacagatgccgaggcaaatgaaatagagattgaaatcgtgaaaatgatcggaaaggtaagagatattatacttaatgagtacaacaaaggccgaccatacacagatgcgagttacattgggaggatgatgagtataatgaagacaccaggcaacgagacaggcgtcatcaaatacaatattttgtattgtgacaaattaccaatatacaagcagggtcaggctaggataccgcccacagtaatgccagctaaataccatagtgcacgggtcatgataatatgtattggtagtttaggtgacatcacgccaatgttagcgatgcgcacaatgtgtgaagcgcgggaggtaagcacagtgattgtgacacactgtgatttgatagaaaacctggcaattgatagggcacacggattacggtgcacgtcaaaggaactgatggatactgcaatgagattgtacaatgacagctcattagatgacaaattatccggagtagatataatgaacagaatagtggaagagactaagcagataattcacaactactcaagtgatgatatgaatgtgatcataaatgcaccattccctatgaaatcagcaatatcaaaggtactgaagggtaactggctggttgcaaatccattcccacccaattggtacagagaaccacttggcaatgatagtgattacactctcacaaccaaattcgtgttgaaggccagtgaagaattatacgagaccatggacgtaacaaagttagattgcaaatcagtcaagtcggtgttgttaacatatcaatggatggccgaagagactagtaatacaagtattgggccacttaccataaacaacgcttgtggcaatgttacaataccaatgacgtacaagaaaataatgattagcttcgggagttgtaaggacagtatagtatggtcggacttagccagtttaattaagaattgcgtattaacgggccataaagtaatagtaacttgcagtgctgagggatatcttaacaattataaattccggaaggtatgcacggacctagttggcaacctaagtataattgaaaattattcacacaatgacctacagaacgtggattacatgatcacccatggtggccatggcacaatactagattgcatatataacaatgtggtaccgattatttacccattatttgccgaccagtacgcatgggcgaacaggttgagcggaatgaatatggcaataagactcagatcgttgactgacacaagtgatctgcgtgaagcattatcaagaggtgagctggttcggaagacctgtgaaaagtgcagccggatgatgaacattaacctagatgatttcattaaatggctcaaaacaagcggattatggcttgaggacgtcaggtctttggagtacacgggtgtgctagataataagaagattttccatagatcaaagttcaacgacagaattggaatatatagtattaaaaaaatgatttaccgggtgttacatgaccctgaaacaccgagtcattgcgtcaaaagttgtatagtgaagtggctaggcaatgagaatagcgtaagattcaatttgtgcagtataccaccagtgatgaagttgcaacaagaaggagtcgattatgacactctgatagacggcatactatcactaggtatcaactgtgctataatagatgataataacacaggaactttggttaaattagacaacggtccgacaatagagctgttgatagacaggtcagatctgacatggcactgcaagttagtagaagtgctagaatatagtgtgagcaagaatatggcggtgaagtgtaggccggcggtggtaagcaccacaaacatgggtcctagtatcgaaaagttgaaacaggaatacacattgctagaattagctgacccaatgataatggtaatgaagcacggaaagaaattcgcaaacaacgtaagagagagactcaaatcaacaaatttgacagttttggcaccaaggagtgatatttacattaaattattatctggtgtacaaaactcgatattctatgtatgtgaggtgattatgccagataaaccactaagtattgggatgatcacaaccgaaacaggatggatgacagtcaattatttagtcgaggataacaaattgatagtgatgggagctggcacattttacgagacgtcagtattagtgaatatgcacctgagatatccaagcacaacaccaacgcggatagtgtcaaagcctcagcaaatgtacgcactgaacaaacaaacaagcactataaccctgacaagacgattaattccaagagcaagcgagataatgctagtacctcaaaaagaatacaccgtaatcgtagctgaatttgataaccggtcacaccacatgcatgatgagcttagtgtgatccaaaatgccacaaaagtagtagtgcacgacggaagaaatgggagaatcgaagactacatcacacagtatgatgcggccataaacaggccagttatcaaaatggctagcagactatatgtcacggaattccaagatattgctatacagatgaggatagaggagatgttcaattataagagcatgtcacgtgttaatttgtcactaaagcacctaatagagccgaaaattgtagagtatatgacaaaagtgcttagaattaagaagaataaagtaacactacggcaaggcatggaaatattaacaaaccaaatgggttcaaacgaattgcagactaaaataaccaatagtggattgagtaatgaagacaaattgatagtctcgatgtggttacggcaaaacccaaaactaatggtaagccatataaccgctccaatacagaattgggacggcagagacacaatgataagcaaaaccggtaatctaataatacacccaatgttgactgagctaataagttcacaagttgcgggtacggaacgactatcctggaaagtgggtacagataggtccgtgcccggcgactggtgggcgttgaggaacaagatgcaaggtaaaactgtcgaaaaagttaacgatgtaatggctattaattacctaaatatacatgaacaggaatcagtgacacaccacgcggaggaagtagattacacagagatgatagatttgtatatacctccgtatcaagtgatatatacaggtagcaaactggagccactgtatgattttccagatgtgacatcaatgcaattatgggacgacacagaccagacagattggttaaatatctacgcaccgatgaatgaatgtaaaatattcaccagggagttgccaggaaagataattgaagttgagaaggcaacaatgaccaggtggcctattaaatcacgggctgtgataactaaagtatgtttcgaagaaggacgtagcataattggtagactgaaatctgtgatgttagtgcgtacaaagaccataaacccaatttcatttctagaggatttttgtgacacctacttcaacccaaactggagaagccaagccgccatgtaccaagagaacaacttgattatcgaagagagtgatgtgagggcatggatagaagatagcaaagatagcaacaaaatagtaaaagaattaaaggaactgttagccggggagatgttgataaagcccatgaatgatgtcaacgtccacttaaaactagagagcttgctgaaagctaatccaattaatgtgactaaagaacagcaggcaagagtgatagtgtggcaaaggaagtgtgtatgcgccctgtatgctagattattccttaagatcaaatcacggctaaaagagatattgcatgagaaaattgtgtacgcggatggtctaacaccagatgacatatcagcaagagtcaggttgtgtaacaacgttaatggattcttcgagaatgatctgacaaagcaagacagacaaactgaccgagatatcatcaacatggaaatgcttgtgtatattgtgttgggagccaatccaagcattatatcttcatggagggagatgcacgaagtatggagattcaaatcggccaattactggggtgaaggaaaagagatgcgactatcaggccaagccacaacagcactcggaaacgtgataacgaatttacaggtgcattgcaaatttgtaaagaagaattcaatatccatgcagttgggactatttctaggtgatgacatgtgtatgttgttcagcgagaaaccatcaatcaaaaatttacgtaatgatatagcctgtgaattcaatatgcaaagtaaggatgaatggagctacaacggtgcaactttttgtagcatgatactagctaaaacgtcggacacaacagcagaggtagcggctgacgtggtacgactgaaattcaggtatgaagtaacaaacggagcgcatgaaatgaacaaagaaaatgtagcaatgcgaaaccaatcgtatttgatgatgataggtgacatgccaaagacaagagatataattatgaaacatggttatgttatcaaaccagtacaatggtacggctacgatacaatgttagcagcggtagctgaaaagtataatatgacccatatccaagtggagggttacctacacaatttattggaaatgatagataaatcgagagtgtacagtcataaatttagagtgtttagcaacaaaccgtaattacgaagttaaagaggcccccccccccccc

SEQ ID NO: 816 - DNA, 3581 bp, Phaseolus leptostachyus alphaendornavirus
  source 1..3581: mol_type = other DNA
cacatagaataattgtaacaactagagatgagcaagtatttaaggctaacaaagttgacgggatataccagctcaaaggattcagttccaataaagcacttgaacttttcaatagtttatactgtcaagtcaacatacaagtagcagggaagatgaacactacggttgtgtttgactctagttggccaacgcggtctcttttcattactgagcccatcaaagtggggaactccagagaggcacattgttacccaatgcagacaagaactgacttggctcgtgtgaaacagaccatagacagcaacatcgaagtgcagaagaaaaccgactatgaatccatctgcagcaacttagaacttagaatagggatcagccctgaagacgtgatagagcgaattgttacaatgaatagaggtaacactgaatggggttgggagtgttacggtgggttcgcaaactacgaggcaaggatgagtaacttgaacatagactcactgatccaatcagacccgaagctgatcgtcaccgtaactcaagcattgaaagggaacaagtacattcaatacgagttgcatcatggaagaaatatccgagttggggaaatatgctttgtattcaccacgaacggaataatacctgggttagtggtgagatctgacagctcaaggctaatagtgagagtatcaagcgatgccgaccctttacctgtattactactagcgaggctcttgaggacagcgcagaaagggagaagggaaacgcttaaacgtgtagaggaaatgttgaagcatagcaaagaagcaatggtgtgcttgaacaaagaaacccgcagttacatagagtccatgaatccaggatccaatgtgagaatggcaacatctcaagaactgaaggaaggtgaaatacaaggggttttatgctccagttttgataccaggggacatcattccgaaaggagtggcctggaaaaagaattcctaatgaatgctcttaagaagaaaactataagagtagttccagctgacatcaacccagaccacatcaaattaattatgacgaacggagtcggttacttcaactacaccggaggagatctgtggtttaacgtagaaagttacagagtgagggttgtacttgctgcatcccagatcataaggcacattagcaaggaagatagtggttttttcaacagcgggcttaatttcagggttaaagtggtgcggtccagggagataatgatgataagaaccgtactatccagattcctgattgaagaaggaaatgacatcaacctcatagaggaaatgaaaagtgaaaacggaggaatgatagctttcaacaaagaagaatttattaagaccgtgaaacataacgattgcccgttgttcgaccgcctggtacagcaaattttcggtggtagagatagcgcaacattcgtggtgctaacagttgatgctccgatggaatacaccaccgaaaacatgctatgcggtctggactttgacgagaagaagaaaaccgtattgaccttgaacccatttgccaagctcaagctaattgaaatgaaaggagccggagagctggagaatctaaaagggtctaatgaacaggtggatccaatcttaacccatttagaccaaccctacgaaatgataataggaccaaagcttggtaaggagaactttggcagattcgacaaatggctattctcgaacaaatggctcgccgaaaaggaaaaaaccgccagtatagaatcaaaagagaaattgagcaaaatgaaattcatctgggaggagttgtacgcaagtatagaagcagacggtgaagcatacatagtgcgagggagttttgagaaaggatacggagtgaaggagaaaggagacgaaggagcaagcagcagcttcagcatagtgcagaatgaagagtatgaaaagagcctgacaaacctggaagacttcagggtcatagatttatgggaccaaaaccgggaccttgtggatcatgtcgtgatgcactgtcctaagaatgaccaagaatacacggcaaaggaagggtattactccattcaggaaataactaaaacgatttttagcaaatacccggtccaatgtcgcccagttttccacagcgaagtgtacgctagcctaaattctctaacaggcaggataggcaggtcaatgacaataagaaacctaagaacgaccccaacgacgaaccaggtaatagacaaaatcgccgggttgttttttgattctcagtggagggacatggtcgatgaattccagcaacatccaatagtattcaacgaggcagatttcaggagctggatagttggacacaaaaatgcccacaaggtgatttcagaattggaggtgctaagtgcggaggggttgctaacaaatcctttaaacaaatttagaagccatgtcaaactagaaagtattaacaagtcaaatcctataagtgactttagacagtcagcaccccgcgccatagtgtggctaccatactgcatgccagctattttcagctacctgtttaagcaggcaagcaacaggttcaaactgtttttgaggaactgcgttcactacgcatcgggtgttgatgtgtacgatcttagagatattgttgagtcggtcgaagaggaagacttttacttttttgacaacgacattagcaaaatggactcacagattgatgaagaaatgatcaaggttgaatgggaaatgtacaaacttctgggagtacatcctgaggtcatagagagttacaaggaacttaagaaaaactggattatatccaacaaatatgtgtccgttaaaggttcatggctaaggcacagtggtgaacctacaacggctcttggaaacggcataataaatctagctataacagcgctcagcacgtccaaaacgaaaaggcaggacatgaaactatgcttgttcatgggagatgatctgctaatggtaacgaccaagaaagaggacgtgagcgaagttaagagaaagggaaagagactagcaaactcgatactcaaaccgaacaccaacaaaacttgcggtccattctgtagctttctgatcggaagagatgaaagcaatgggagggtgtccattactcctaacctagtaagactggcattcaagtgggaagttccaaacggacagcacgagagcactgaagaagctattttgaccagacagctgagttatgcatgcatacttgggaagaatggcttctctaagcagctagaggacaggataaacaaactgacaaacggtgggcttctggtaccccattattacagtgattcgaatttactgaagttcaatgcctaccaccataatttgaccgagatggaaatagttgaagtggcaaacaacttgtacaatagcatcaacgaaccgagaacgtacaatgcgaagttcataatcccaagtgaggacatcaggaaaggcatcaagaagatgagctccattaagacaaccggagttggacgagaatcgttcacgcaccgcagactggagaacgaaagcctctgaatgagtaggaatgaactctaatgtttctggccccccccc

SEQ ID NO: 817 - DNA, 2878 bp, Phaseolus lunatus alphaendornavirus
  source 1..2878: mol_type = other DNA
tgaggaaaaccagcagaatagtagaaggcagttggggagagatcacgagctctgaattagtggcctttggacagcaattagctttacctataggacttaatgcaagactaattctagatagccttagggacagacagaataaaatagatcagtgggattgggctgcatatgggagctatgagaactttgaaagcagaatcagaggggtgaacattgactcattgatcgaatctgacccaactctggtaatacctattgacagagtggagtgcgttgggtgtaatgtaattgcggaaacacaatttgactaccacgttaaaataggtgaggtgatcttctttggaaccacaaaaggactggtacctacaatacttgttaagatgcggaacgggagattatgtctgtatgccggggtacctgtagaaccaataagtttagcaatcagggcacggctcttccgaagcaaaacaagcataataagcaagcggatgatagaccagagcacaagcggaagaaaggtattcagcctgaataaggaaacggttataaagctaagggaggtcacaccaggattgaatttaaaattggccgattctgctttgctagaaagtaatccagatgctatagtagtcgcaaccagtttcgatactagggggcaccattatgaaagatctgaggaagagattaaaataattagagatctgctcggtacggagaggttagtcactctgccaaacgcagtgagccaaagcctggtaactgccctgaagaaaagtaatgtagggtacttcaattaccagaatggacacgtgtggtttaacgtggaaacgaatgaaaaggactttacaaggctgctagcaggcttcgtagataaaatcacaggatgtgtgggcgggtttttcaaccagggactatgctacagggtagatgtgtctaaccttgagaatgtggatgggttggttagattgtttaataaccactttgaacttagtggccacaagataagaccaattgaagaccacatagaggcggaaaccgagatttttagtgttagtaaaggacaaatattgtcaagaacggttgcgctggacagttcgacgctagaaagcctgttgaacgattggttcggaaaggaagaatcaataaccgtgtgccgtataaacgagccagggaaaatagactggattttagatactgtcgagtatggaggctgcttggataagcaaaaaactaggcttctagtgttaacacctttccttgcactaaataagttgattctgaaaggggctggcttaagaaatgataaagaagagaataatagagaacccgaggccgtgaacgcaagggctcaggagctagtaatggaccagccttcagagaaagtgataggacctcaattcggaaaagagaacttcggccgatttgacaagtggttacagtccaacagaaatttggaggaaagacccatctctgttagagagaaagcaaaggtggatctaggaaaaaagaaatttgtatgggaggagacttacggtgtcataaattcagacgggcagattgacgctgccttacccgacacggagaaaaactacagggtatcagaacagctggattttgggactgtgacgggcttcggactagccgccagggacaccacagaagttgggcacttggcggaccatagagttattgacttatgggaggagggcttggacttaatagaccacgtagtaatacactgcccgacaaacgaacagaaatatataataagggaaggcaactactctataattgaatcagtaaaaaccatcttcgcaagatacccagtccagtgtagacccatattcagcgacgaagcgtatgccagtctgaactcattaacaggccgccttgggagaggattgctgatcaggaacatagacgctaagcctaaaacccatgagataatagacaagatggctaacttattttttgataaccaatggaaatcactggtggggaaattccaaggtaatccagttatgtacaacgagaaagacttcctggactggatttctaaacacaaaagagcagataaagtggtcaaggaattagaaatgatgtcagcagaagggatattgataaatcctttcaaccaattcaggagtcatgtgaaattagaaagcattaataagccgaatccagtaatggattttagacagtcagcgccacgagctattgtttggctcccgtattttatgccggctatatttagctacatgtttaaaatggcaagcgatagatttaaattattactgcggaacaacgtgcattacacctcaggtgttgatgtaaacgacttggccaacatagtcaatgaggttgattctaatgtgttcttgttcgacaatgatatcagtaagatggactcccaaatagacgaggagatggttaaggtagagtgggaaatgttgaggcttttgggggtcgatgcagaagtgatggaagtgtataagatgcttaaaattaattggaggataagtaacaagttcttgagcgttaaagggaactggttgagacacagtggcgagccaacaacagcgctcggaaatggcataataaacttagcaattacctgtctttcattgcacaatacaactcgatcaaacgtgaagttatgcctgttcgttggggacgacttgataatggctaatgaagttggggaggacgtaaggcttgttaagaaaaaaggtagagactatgctaacgcgatacttaaacccaaccaaagtcgaactagtgggccgttctgcagttttataataggtgccagcgaaatgtctgacaggctgagcattgtacccaacatcccaaggctggcatataaatgggaggttcc

SEQ ID NO: 818 - DNA, 14072 bp, Phaseolus vulgaris alphaendornavirus 1
  source 1..14072: mol_type = other DNA
attggattaatatattggctgtggtaacctaatttaagtactttgttaactactttgcgtctagcatctccgtatgtaatggctccaaagtttattacatgtcttaactcaaataaccaggcaaaactaacgggacctcgaaagaggtcccaaattttaaaatctagtaatggctccaaagtttattacatgtcttaactcaaataaccaggcaaaactaacgggacctcgaaagaggtcccaaattttaaaatctaaacgaagaaaacatacatacggagatgctagacgcaaagtagttaacaaagtacttaaattaggttaccacagccaatatattaatccaataccacaacccaaacaaaccaagccttctatcaagcaattaggttgggtaggattaagtaaaaatagacagattaaacagaacgcgaacccttacgttagatcaataagaaaattgttcaggtcccataaaagacaattaatagatgagaacaggttggcttcattaccagcaaggaaggaagatctgactatgggttttatgttcatgtcagcactagaagacaaaatagctgtctgtgatctggatccaaagataattgggaaattgaattatttagtatgctgtatgggcatgggcttaatgaaagaccccagcgtttccctgaacactattaaaggaaacattaaacactcttacattacacctcttaatgggggaacgaggtataataaattcgaagattatatgtggtctgaagatcagactttaactattgtagaaggtgagggcaattgtacggaggattttctcaaattaattggagctgaaatgaacaaatttggtggaatcgagaattacattatggccaattgtaaagcaaggccagatgctatgagtaacattactagaaccaatactggtaaaagttataaatacgatgttgttccctgtggaatggtccctattaaagtttgtcagttgtgcggtcaaattaacacatactcacattatgaaggccacccaaacaaaggtcactattcaattatagacaaaaaattcccttcaggttacgaagcagatttagtggaacacgatgaaatgcgcactgaaatcagaggtggccaatgtgaagtgcaatggagatgttgtcattgtatgggagacctcaacttaggtgtcgttggattatttcttaattttgtcaatttaattaaaactgtgtatgactggatgttcgtcatcagaggtaatttggatgaattacttaagagtggttatggagacgtatacgatgacctagagttagatcagagacaattaataagaaatcatgacatgcaaatgattcatgaatatttctttcacctgaatcgtaagatcattccttgtggccatgacactacagaaatcatgaagtctagtattagagcaaaattagatgcttgtgaattcaagcattatagtaattacaactctattaagccagaattaattctagaagtctctgcactgacgactgtgtgtttatctaggtttaaagaatgcgcaacttacagcctgggggatatattaccgcacaatagaattaaaaattaccatcaatggtacaaatacgatggaatgttcccaatagataatggagaagaatgcacctgcaccacacagtgccaacaccatgagccaggcgtcatttttgggtccataatgacttgtggtctcaatttatcatacctattagctatcacggaaaaacaaggtcaattgggatttataataccaaaattaacatctaccaaaactatggcagatggaaccgggaaatacaatggggatggtgaatcattagaattgtttttggatggcaacccatgtccgttaatttttaagactgatacttttgtaacattatctaatagtaacattatagtacaaggcggaaagtactttatgattagtaaagtgattgatttagaattattggaactcaaaatgatcacgggaccatacgatgaactaagtgccttacctttgaataaaatcaacacatataatgaattaacagtcaccgtcaatttacccagtccagagaggttattaggcaaatgggttgggttgaatttccaacctatgcaagttaatattaatccgtcattgtttagagccttgtgtatcagaaatctatctggtaagatgtcacatgaaggattaaaagagtactcagtaggtttcgcgctaaggaaatttgtggtacataataaaactattagtaacccatctgtgcaatatgagttactagacatacatattatattgtcacgtatatgtatgatgattatgaaattggactatagtaattcccttaaatacacagaatggagtcagctcttgggacctttgagaggtttgaccaagtttatatctgaaaaattactgatcgtcataactgggtgcttcatggattatatgagtgctagtactggtttaacaagtagtatgttgattgaattacttaagaacagtcacatcagtacttgggtagaaggtttatgcaaagaccaattctgggacaatttgttgaagttggcaactgattattctgtagagcagctaaaagtaattaatgtacaagaggatgatgcaactatccctgacagcttccatgatgcatgtaaacaccacaaccaaagttgcaaacataaaatccagacaggcaaggcgtattgcaaatgttgtggcttgagctgcactaatccctattgtgagtgctgccaaccaaagccacatgataacactgtaatggaatggctacatagagacgtgatagacgaacctcaaaggaaacgaattgcacccttaaaagtgaacggaagagatttaaaagtaccaaaagaggacaaaatgctagatagattcgtacaagcttttgaagattataaacgagatcagccaattaaaagtgctgtagatgttgtcaaatcaatcaaagctagtcacaaaggtgctatagccgtaagcacagtagccaatcaatcacaaccatggcctggaattataagtaataaggaatcaactgaagagcagtcacaaccagctgtccaaacctctaccatcccaatcctggctgactccaacaaaattacagaaccttctcatcaaatccccactgaagataccggttcaattccacacgtagcagatcagttgagtttcatccaaacgattgaatcaattgacgctgaggatgcaaggatgaaatggttcaaacaaacaccattaaaagttccaaaacatgtcaaattaaacacacaattggaatcagtgaagtctaaggttaatgctgacttagaaatgggagattacctgagtgtagcattaaagttgggagaagaatttctggctcacgtcctcaaccctgtcaattttgaggcagaacgcaacgatcatacagggtatctatatattatgtcccacattttagttggtatcaatatacttaaccctaatgattttgaagttgtcggcactcctgctgccatacctaatactgatgatttatcttgtggttatgatgcattaagattggcaacgaatttggacatcactatgagtgaatttcaaatgatcacaggaaagaaacctccattttctgacggagacattaatgttatagctcagcactacaagcttaatataattctgaaaactgatcgtgatgttcaagtcatgaaatacgattctggatgtgacagctttgcatgcatggtgttagttaactctgaccatccggacgacattggtcatttttctgcttgcaaccttagacgagttaaatgcactaatcaatatttctgtcataaaaatgattatgacacattaggtcggaaagacatagttatctcatgtggtattgagccttcagagttatacttcccaacttccatcactaaaactgagaacattaagtgtgaggcagtgtactactacgccactgactccacaaatccagtcgttaatgtttccaagttgtcatgcataaaaataggtgacagttggtatctaaccactaacgaaaaatttaaagtccacaatatcaacaagaattccatatatttgagagtgcctgcatatttagaatccttatctaacagtattagtttagctttaaaaggagaattttcacaactgaatatcccagaaatgtaccacagtgatgccaatttgccaactactagtgaggaagttggagtgaatatggtgagtgaagtcctgcggtctatgcgtagaataatggcatgtgaagacaagttggatgccacaatgattaagcaaacagtcaatggaagagttagtccatggatggccaacaacatttttataccagaagatggagttcacctaaaattaaaattgtgggataaagttatactaagagtcggaaagaagttaatcatggcctcagtgcttggtattgacaagactaaagttactatagacactaagttcatcgtatccacacaagcgaaattatttgaattaaaggaatcatatggcagctgcatcagagcactagtagcttgttgtagacctctaatcagtatgtctgagttccaatctatattggacaaatcgactttaactctaggtccagcaggttttgggaaatcaactgctatagcagctaaatgtagcgacaatgatctgtgcgtagcaatgactagcacatctgttgaatcattgaaatccaagattaaaaacaaagtgcgcgtcatgacagtagaaaaggccctgtacagccatgctacaactgctagcacattgtacatagacgaagcaatgttggtgccatggcaagttatattactgttgtgtgctaaaggtactaccttaagtatgttcggcgccaaaaatcaaatagcgaatgtggatatgagcagttcaccaggaatcaggcatgtagtgaatatagataaattgatcaaagctagcaatataactgagcaatttactacttatcgcataggtactggtttgtttgaatttattaaaccactggagccgggtttgttacaaggaagtgatcacaggacaagcttctctgtaaccattttggatcctgaacaatttggaacactatccaatatatacaacaggaaacagtacgacgtggtcattactccctacaactataacaaaatggccataaccaacttgctcggcagtgccagtccagtagttaccacccattctttccaaggccaagaagtaaattcttcattggtagtgctcaaagctgacaaaactggaaaatgggaccttaacagcgaccctaggtatcttaacgccgctctaacaagagctaaatacaattgtgatatagtaatatttagtcacatgctcggccaacccaatagcgttaacgatttattgagtcaagtaggtggtagggaataccatgatgaaaatgttattgaattcaccgagttggcggtagaagacgtaattgtgcgaagtgatgacagtcctattaacatagacgcagtgactcatttgtctataagttcaatgcatcagttatctgatcatgacattcaattattgaatgagttggatttggagcaacaaggtgtcaaccttaaatataagaaacttggggctgctgtgatatgtgaagccaccaaggccggcatgttacttgccaaagtcactaacaaaggtggaaatataaccatagaggcctccaatatgattaaatctttaattaacaacaatttacataaacaggtcaagatcccaatggagaggttgttaagtagaactggtatggccaaaactcataaggtaaccttgagtacacagtctgcttgcaagttgagagaattattgtggatcgtagataagaccaaagatggtacactgaccttgcccctgaatgatggcttgataacaatcactaaaacttcaggttgcccactattcgcaggatgcaaaatgcaaatcgatgatgagtggatctacataactgacgcatggcaagccattacatcccgcactataacttacaatttttccgcttcaccctgtaaattgaatgacattttgatatggatgcaattagaactacccaatattcatttaatacctcataatggcaccacatggctggatgttattaaaggtaatctggttaccacatactggcaagccactgagaggctgacacaagttaaatattggatgcttaacgccttagccttttcagagaatccaaaatgctacggcaataatttaaggaatgtcagcaagactaataaattcatgaggaaactcaagatcaaaggggcaattgattatcaccagtctgtcattaatcacaaaactctgattctactggaacagggttggttcaagagttatgtcaccttgtgttcagaagatggaagtcttatcagtatacataaaaattcaaaagatttggagatcaaagagtttattgtagaagcattacaagacatccagcaatcagaggaggctgacaaaatcaaagggaatgacataggggagatggacataccaggtctattaatgccaatgtctttgcacaagcaaaaacgaaccccagtataccaatatgcagttaatgaactaggtaaggtcatttctcacttaggtaaggtgtctcacgatctaataagagttaacagggtctgcaatcaattatttcgccatgacatcactgacaaatatcctcaattgactatatccattgcaaattaccacacagtattatcagatgtcgaacaaatattggagcaagtcctgattaatttcgttgggaaagctattaaaggttcggaagaattaatagtttatgggggaactttcccattaggagtagcaatttgtggaaggtattatgtccaattgagattgcccaaaaattctgatcaattcaaatatcattacaatgaacaactaccggagtttcatgatttaaaagcaaggtttgtcaagaataagactcacgaccaacatgaaactaattgggatgaagagcattctgtggatcgattgttacttggcctatccctttaccaaataccagagaatgagttactagagttgttaaataaatctactagtactattgggtgggtacctgcaaccaattccagtggaagtaaatttatcaaatggcatggaaataactcaattatgtatcgaggtgcagaatattcagtcaaggtgaataattcccttgttaatagagctagaaatggagcacctatgtttgtagatccaattacgagaaccttctatgagatcaacgtactatcagaattcatggatcacaagctgttgttgatagtcaagaggcaattccctacttgcaattacgtcaatagatgtatagggagtatgcagccagccactggttacagaacaataacagtgccatgggttaacacaaacatatctagcataatttcaaccggagttttattacacgataaagtccttcgtatatccgaaaagttgttgaggagtatgttgatgagattggctacaggagatgactcggaggaatcaatattggcctacgctcgttctttagaaacaacacaaattataactgacaagagtatgcatgacatgtatggtacagagattccagtgttactcagcactgcctggtacgccctatacatacaccgaggttacaattacaaatttaaattcctagtgcaaactattaatatggcttccaataacccacttgtgctacagtttgtgagtcaattactgccaggtgtgatatcgatgatgggtaaagttggtaagttagtagaagatattgcgcagactctattatctgcaatcgaggagagacttaaggtgaataacgtgttttgcaattgcaaaatgacagatgtggattttggttggcaactattagagcacaaaccacacatcattaaatatgatttactcaaatctgatcattatgctgcgttttataatgatgatgatggaggagatgaccctgatgattattggttatcatcacgaaccatttatgaggcacaacccaaagatgaggtggaagactcagaacaacaagcgaatcttaatattagctcaaaacaacatgtggagcaaagtggtgaaaacaaacctacggaatcaaacctccctgaaaacccatctaatatcgttgaatcagatttcgatgagttccatgacgcacctgcagaattaggtccagacaacccgttaataaacgacattggaccaaactacattgaattggaacaacaacatatagaaaaagtttggaatgaaaatcacagtaagaaagaagaattcctcaaaagatgtcattatgaaggggtggaaaacctcaatgatatcaaatacctttggagtatagaatgtgggaaacactttgtcaatgaacaagccaatgatgtccaatgtaacaattattataaaattaaaccaccaaccaataccatattgaatcatgccggtaaatctgtacaacgtatcatatggtgttactgggccgatggcaacccatctaaattcgttagtcaatgtatattctcaatggcaaataacaatccgaattacagattggtattaattgacgacaacatgatcaaatccttagtaaagggtgaaacgtttgaatgcttcatgcatagcactgctgcttttagatctgacttgctgagactctatttattaagtaaattttctggcgtatggattgatgcatccacaataatagaaattgatattgaggaatactgcaaattggcatgcgaacacgacagtggagttttccaatttagtctgtgctccaggtcagatcagaataaaacttatgaaagttggtttttggtagccacccaagagaataaattactaaggaaatggtatgaaattacgttagatatgcacatgaatacgtacaaatttaatcggtcaactatgtcttatcttgccgaaaaatacggacaggatttagtgacacattgtagtggggcagttaacatcaacctgcgagagtacttacgagtgtatataactgaaaagattgcattacatttgacagatttacattctgtcaattgtatttgtgacgatgaagcaaaactaactatatggcataaaaataatttaaaagattggttacaattttggaacaccgtggccaatacaaccattaatgacttaaccctgtctattggtctgtacaagttcattggtagcaccagagcaattgttaacaacggaatgaactataaaactataactaaaggtagcttactatctaaattgctaacttacatgcctgttaaatacaacatcaagacaatggagagaataatttttaacgcacccagtttaccaatcaacttaccacccaaagccagtttgtatcaaaagacgaattgtgtactattatgccttgggagtactggtgatatgataccatatttggtgtgttatgattacttagcaggccatggtaactacccattactaatcagtcacaaagatcatgaagtgttagtcaagggtcgcagattccatggactctctatcaagagtgaggatgtgatgggaatcgctatgaatttattgtatgaaaaggagattacaagttctattctaggttatcatttaatgcggaatattgccaaagaaactatagaaattttaaccctatataagagtcacaatatcaagttgtacgtctataatcctctatatccagctatacaagctatgaaatctaactccttggcctcatgggtaatgttgaacccttttccacccgagtggatagtcggggacaaaccagagtctacttggaataaatttaaaaccaatgtagccaaatggattgtcaatttatctgatacaataattagggtcgatcttaatttgccagagcatcaaagtggaacttatcaagagttaacccctatggtatgttgtccagctgaattgttaccaattaatgacatatcaaacgtgatttgttgtggaagtttaactatgcttaattattacactgatgagaattttaaaaccaatttcgatagtaaggccgtgttagtgtcatttggaagttgtaatattggagtggatacacaattgataatcaagatattattgatctgtatcaagcagggttacaaagtgatcttccatgatggtactaatagagctaagttcggaaccaccatcaaccaatttctgacagattacagaggcaatgtgttaataacaaaaagtgtcaattatgcaaatgtgcgagagatggttaattgctgcataatccatggaggaattggcacgctaacagaggcacttgctaatgacataacaccgattatttacccaattatagcagatcagcattactgggctaataaggtcaaagaattgggttacggaggtgtgatcaacaaggaaaattatgaattagaattacctaaattgttaaccctatcaagtaagtttaaagtcaatagagcacgtgacaacttcaacataagtatgctatcagagaaattggataatgttgtattgagcagcaacattaataataatatttatacgttaacagaatacaattgcagtcgagctttaatgagatttgactttgatggggtcaagcactgtttaaaagttgatctaaatagtattggttacattagaagttgtgattttaattactccatcctttatgatccccctactacttctcattgcatcagagcttgtatggaatacatttttgattctaaggcctttaagaccatagaattatgtaaagatcgtagtgtgcaattgttgcttggtgttggttgtagcaaggccgatttagtgaatggtatattatcattgggcttgaacctggcgatagtagaaagtgatgttagattagacgtctacaaatattttgagtctccgacagtgacgctgcgtattaagaagacaggggctaatcatcattgtcaagttgttaatgtcacagttattaacaatttagaatacctaacaacattaagtcgagttgttaattctgatgaaattcattcccgcatcatacgcacaattaatgataacaagttaagttattcacatatgattaacattcacatgctattaggtttacaaaaagagatagtgagacgagatgtcaacattaggttaagattagacaatcttcaacatttaatgagtcgaggcgacctaaacgtagtatggttacctgttcataaacataggagtacttacttctccgacatgatgatgccagacaagcctttgagcttggctattgtaactggtaccaacaagtgggaggtggtggttttcaatataatggataatgtcttactaatacatacatccgcggatttaccgtcacaattgatatttgtcaatttacataaaacattgattgaatctaagaaacctgcaaccaagataacatatgatattgatgaaataagtttaaataaagaaactgtagattactgctataggaatcttctggttccacgcagtcaaagaatgagtcataatacgtttgcaaagtacagtgtcatagttagcagttatgataataggagtcatcacatgcacgatgaattgtctatactgaagcaggccttacaagtcaaatttcacagtaaacgagaagtaactcttgaccagtttttaattagttacaatgaaccaattaataggctagtattgatcaacgctgagctatactacaattgtgaatttgagaattttgaagacgcaaatttaatgtgtcaatatctaaatggtatactgcataatagaaacaatgtattgcttaaatcagcagccacagatcatcaggtcaaatttcttgacattaattttaaaaggcaagaccgaaagttggtcaggcggttgcatattgatgaaaattttgtagatcaggagataacgtctgaaactcttaaaggtcttttaatgaatttaagggaacatgatagcataatcagttcgcaaatcaatgaaatgtttagtaatttgccgtgcagtttgcatatatccagacccccgcttgaagtcaaattattaactgataccccagaaatgaatttaatagctctcaagactcaagcccagcagctcatattccctgcaatatatttgttaatcagaaaggtaaagcatggtggggcaactattaaccaaccagttatagaccatgacagggactcatggcaagatcctaaatcgaaacaattaagtaaaccagggaattggtggaatttgacttcaaccagtgccaacaagaaatatactcgtgtatcaacttttgaagatgtgatgtgtatgaattatttatggattcatgacccagtggaatacgactatcatcctacaaaggatagtgacccaggaataatgaatgtttacatcgccccatacacatccacatatactggcaccgtgttagaacctttatccgatctgccagatttcaatgctattaatttgtggtctaacaatgatttaactgattggctttcactatacagcccaatcaatcattgcacaattaagatgagggaaatacctactaagattaagactgtggagaaagtagcactgacaaaatatcctatacgctctagagctgtgctcactaaagtatgcttcgaagaaggtcgcagtattataggtagacttaaatcggtggcattcatacgtacgataacaccagcaccgaaacaagtggctatagatctagctaacacatatttccgtagtgattggagagcaattgttaatcagtaccagtgtgaaagactgatcatcaaacgaagagacgttgaacaatggattgatgataacaaggactgtccaaagattgttaaggagttgttacagttgttatctggtgagttgtgtgtcaagcacataagtaatgtcaatgtacatcttaagttggaatcgttgttgaaagataatcccatagattactggagacaacagcaggcacgtataattgtttggcaacgtaaggctgtgtgcgcagtgtacactagtgtattcgtggaggcaaaaagacggttgaaagctattttgcatgacaaaattgtatatgccgatggcttgcggccagatgagttatcagcacgattaagactatgcaattctgtagctgggttctttgagaatgatttaaccaaacaagaccgacaaacggacaaaccaattatagacgctgagatgataatttatgatatgttaggagtacacgcaaatgtaatcgcttcatggagagaaatgcatgaaacatggatgttcaaatcagataactattggggcacaggccaagccatgcgattaacaggacaagcaacaactgccattgggaatgtattaactaacatgcaagtgcacgctaaattcatacacaaacactggaatactttggaagttggtctgttcttgggagatgatatgtgtctagtgttcaaacataaaccttcttaccaccatttgaagaatgacatcgcaaccatgtttaatatgcaaagcaaagaatcatggaatagcaactatgggactttttgtagtatgctatgtactaaattgccacaatgcaaagccgaaatgtgtcccgacttcgtgcgattgaaatttaggtatgaggtgactaatggagtgcatgaatgtaccaataataatatcatcatgaggaaagctagttatctaatgatgttaggtgatttacctgaagtccgaaacttgatcagagagctagaattgcctattaagcctgtcaaatggtataattatcattgtgccctaaccgcagctggacacaaatatgacatgcacccagaccaagttgaaggtaccttacatcaattactgcacttaatcaaagaagggaaattgcacaagtacacgtttagattatttgaaagtgggaagcatcattaacaatgatgcgataacatgaacccgaacggttcccccccccccc

SEQ ID NO: 819 - DNA, 14817 bp, Phaseolus vulgaris alphaendornavirus 2
  source 1..14817: mol_type = other DNA
ataatttgattgtcgtccaatggctagaaaacttgacaaggtctcgtttttaaagtctttgggtggttcacaccacccgaaaattcaagcttctcatgagcacacgagcaatcgtgtgctcatgagaaaattaaataaaagaaatgaatgctctgcaagaaacgtatacagacagagcaattataaagtaaaactacactcaagcaagaccgttgtgccagcggttatggcagccagacaaggggaagaattagaattcttggaatttggttacgaagaatgtgtgccggacctcaacaaaatagacatacgcacaattcgatctatgatgcaattatttgaacaaggacattgccacatagatatcacaccggaggaagttcaggcaacgttacacaattgtcaactacaaagcacagaaccgtattatggtgcccctggaaaactgtattacaagcattgtcggcctttgttaactccaagatccaaagaagacggaacaacaaccgaagctgccagggacctgttactgggcataattaagaaatttggcggatccgttttaggaatgctgtatcaggactgcgccaacaatgccaacatgacgccccacgtttaccggcagggaaatcgttatgggttcaaagccatggaaatggcacagcccgacgcagcaacactgtgttgctactgcaaaactgtcaattttgtttggttgtatggtgagaccgacggtcttcaaaaatcacgatgtggggtttgcatgaccccactgctattagaacacgcagtgcctgaacacataatgtggcccatactaacagtccacgacatcacgcaattgcatgttggggcaacagagttgcaaaatgcagcaatcaccttgcaactagacggacaaccaccaataacgaccaaaacaatgagtaagttgatagaacaggatttcaaaaacatgaggtcaatcatgtcaagggctatggccaaaactgtgtacgtcccaaacggtatgactgattttcagcacaaccatctgaccggccaagtgccagcctacaagttgattagaaccaatgcgatgcccaatccgcatgccatgttggcagcggagcgtagaattgcaacaatcatgtttgcagataaacgtgggcccggacagacaatattggacgtcggatccaggaaaaacttgactgggctgaaggagtggcacggcatgggaccaataatggactggcgtgacgtggaacggtacaatgacaaaccactgagcacaaatatttgcgaccacaccgtgagaacttgcgaatgtatgcaagggaagaagccaatggtgatgtgcatagattccatttatgacattgatccgtgtgacgtactgaaattaatgcatactgtccagaccaatcaactgttcttctgtgtgagtacagcagaagtcgatttcgaatccactagcggactattggcacacgggcaaggaatgtggtctagacacaaagataagctagtcacaagtctacgaggcgatgacagaccttatgtcaatagctggaaattgaccaaactgtggtcgaccgccgatctcattcagattaaccaagtggaactaaatctgcagaccattaaagtgctcgggaaccatcttttgagggtgctaaccatagtcccgagcggaatggactgtttacggactcggcaattggatcacaggacgatgacacaagtggacttggtggccccagtgatagatgttgaaagctggctcaatgtgttcggggtaccaaaaataagctacaagctaaccaaactggatttgcaactgtaccgcgcattgtattcccgcaatttaacagggagtctgtcattcaataaattgatagaatttggacttggttacgctcatgtgaagtacaccacaagaacatccaccataacacatcaccacattagtgcggatgacatcaggttacatgcaatgcttgcatgtgtggcaacgagacgcaaatttgcttgggtcaaggcagtcacagcgttaaacaccacatcaaacgcgttcggcttggacccggtagaagtagttaagctcatgtctattgatctagcagggaagttggtgaacgaaatttggggtgccttgttgcccgatggtgcactcaaatcaaaattgagtggcatggtggatactgtaaaagcatggatcaatgaccccttctgggatgccctcgagcagttgaacgaaggatcaaaacgctttgaacccaatgtagtggtctggcccatgttaactgccgagactagcgtggaatccgactatgtgtgttgtcaccacaacctgtggtgtgaacacgaggccaaactggaagagctgtgcgaatgctgcagattggccacaaaattgagtgatagtcagtattgtttgtgctgccgacctcaggcacccaaacataaatgcgcgcaccactgctatggaaatcatggagatgtgaaacagaagggcgagataaactgtacttgctgtgggctacgcacaataaatggagtgtgcaagtgttgtgtgaataaattaggtaaatggcccgcacagcaggaaggtggcattccactcaagtaccgccgagaggaaatcaacaaagcagaaaaaattgtcaagtcgcgcactaccacacaagagccaccccaaacagcccaaaaaacgccaccggctggggcagcaagcgaaagtggcccaacagcgcacgctaacaaaccaagtgatgagcaaaaacattctgaaagagtaacggaggaaagtcaagcagaactcacgatactcgacaaatggaaacaaggtcaggccagttcatcaggcacaaaaacagacgtggcccaaggcatgtcaagcccgaaccaacaaccaaaaaaaaatgatgagcaagtagatcaacacgccatgtctactgaagatgaggtcgtgttcaatgaactaaaaacattaactaccttggattatgcttgtaatgtgaggtacgggtacacatatacagtgactgagcacttgggtgtgccaaatgagtgcaacccattgaatctgatcgggattagtgaactcaaatatttgccgatcgggaaaaaattgcaccctccctcatggttaactgtaatggacagggcgagtgtgccaggggatggcatatgtggctttcatgcaatcaatagagtgctagggggaaatttatcacttgtggagatgcagagggtgaccaggcggcagacggaattttctgccgacgagttattggactatctggcttatttgggaaaaaatggaattattctgacaaaagacacaatagccagtaacaagattgatcctttttcagatcaatatgtgtgtgtgcgtcactgtgaaaccgatccgaatcccaaaaaccactgggagccgtgcaccgtcatacagacggaagacatggagtacacaccatgctttaacggtttgttcaaacagtcccaagtcaacacaaaacagttgtggatgacaacggcgacaacggaaattgagcacaaaaaccaggtgatgcgaattgtgctggaactgattaaaagagcccagcccaaacagagtgcagcagctgccagtgaattgaacctcaagttaattgacaccctacatgacacatggatgtccaacaatgcaacaatggtaaatgatcctgcagcagggttattccattataaaatacgagctgaagactacgagtacctggcatgcctcgtaaacagaaaaatgactgcggacattaaggacgacttaattgacccactgaacatagggttaatgcacgacacggacattgaccagttacggagcgcgttattgcgaaatgtggtgtaccagtgctgtctcatgttgaatgaaggtgacggtacagagcgcatgactgcagaactgtggactagcatgtcaattgagaccaccaaagtggcggggggactgcgcatgctacagttgggagacaccaaggtgaaaactggtgatgtaatatctgtgaacacgataagtggacctcaacataggctagtctggaaacacaacggaagatatttctgcaaagaatggatgcccccaaaccacgaaaagttgagaacaacattgcacatatgcaggcaaagctttaagagtgccatgatccaaatgtactgcctatcacgaaatcacattgagtttaacaaattcaaacaattagtggagacggcagtgtgcacattgggaccagcagggagtggcaaaacaacaaaaatagcaagagattggactaccgatgatttggcaattgcgagaacgacagtggcggtaacatcactgagggaaaaattgaactcaccaaaacaattggtgatgagtcacgaaaaatacagttttactcaaccaccaacacacaggttagtgatagatgagtgcaccatgtttccatggtatgagttatatttttctttaaccacgctgcctacatctttggtaatgtacggtgatccaaaccaaataagtactatagacacatacatgctgggtggggagcggatactggacaacattgcagattacgtaccaaacaagacgctgctcaagtccacgtatagatacgggcccaagttgtgtggaatactcaattcgatcgtaggtgagatagttagcaatgctccacatgacacaatggtattagatctgaacctgcccacgtgggatgacagcaaactgatatccattatacacgatgcaaaaccagatgtggtgttggtgcaccacaacgtcacaaaacgaaggattggcaaactactaactaccatcaaggtcgagacaatacattcttaccaatcaaaagaggccaacgcagtgttagtagtgcagtacaatgaggggggcaattcccagatctacatgaacaaaaattacgcggtttccgcagcaactaggtgcaaaaccaagttggtgtgggtaagcgttggattgcccgacgggatgaaactagtagacaaactaaaagggtcatcactggaccaccgtggcgaaggtttgcaagacgccattgaattaactccaaacaccaggcatataatacgccaagcaattgacaatggtacaatttctccagctaccctaaccatattacagaccacccagttgaggcgggaacagatcgaaatcaaacccgaagagcagcggatcgaacgagacttattcacaatggaagatgtagagaagttagtgcaggaattggacatctacaaccaaagagtttggacacccatggattggggggaattcaaaaataggtggagggcatctgtcccaccagggaccaaactggaagtggacgatgaccggcgcgtcttgacagccaaagtatgggggtgcacagtcacggtgacagttcagcaagacatgtcaaaatttacaatggacttacaaatatcgtttctgatgcgacttgctaaatcaaaaattgaaaaacaatttaaacaacattataaagacctctggataagcgaagcaatgggcagagactgcaagtcaatcatcatggacctaaggccagagtacagggatgattttgcacgcattgtaagaccagcgctcatgaccaacatggttagaccaataccggacacacaaccgtcgacttcaaccctaaacaaagacaaagtaatagtgatagattggcaagtaactgacgatgaaagtagtggtggaacacaatcgaccccacgacacgctgagattgaggactgtgacgataacacactaggtgacgtggaaagatcggggttgataggagcgtcggacatcagattcttatacccagtaacaaacaatatgacaccaaagcaggcatcactaattgcagatgatacaaacccccatttgttacctgttaaaagcattgaattgttggcgttggtgcgagcggcattgcccacaataaggttaaccgtgctgttcgaagaatgcgacaatggctacaatctagatttagtgagtgaggaaagcaaggtggccatgtttgaagtgacgcagcacaacatggtggtcaggtcaattggggggacgatgaaactgagaatggggcagttgctccttgacgcaaagttgaaagtatttgccacgcagacaaagcgtggtggtatttggaaccgtagtccaatgttgacagatgaacaaacccaaatcgtgttagcagcatacccctggatgcaagtttatctggatctggacaaagcacaggacgaaaatgttctaatcaaacacatcagtcaactggacagctatgattacactgccagggtggcagagtttaaaaacgttttggctagatatgacgaattgtctcaaatttactcgcaaacaggcgaattggttgatgttagcggtgttaagtgctgcgggccgcttttaaatgaaagcatgatagatgcattcggcaacgcaaacacggtgatgaccctcaacctagatgtggggccaacgtccaacagaataattagattactgagcgaatggacagagacacagtatgacatgggtcagatggcaaagttagatgttctggggagcagtgttgtgatggcgacttacgggggttgcacgttatgcgctggaattaagttttcatctcgtggcgtagatttgatgaaagtgggtaggcaaagcacagccatcagcaatagatgcattactatataccaccacccggacatgtccgtgacggccgctctgtgtcacgggttacacctcaatgacaaattgaacctggtgaccctcggacctctggactatccaccagatctgttagcagatttagacgacaccatgaaagaaccatggtttgaactgggtatgatttttgaaaggatgtcacacatgaacaaatggcttggctccaagataactggtgcggatagtgaacacacatgtgatttgtacggagacacgaaccatgggctactcaatgacttagcaaaacagcaaccgaaattggaaattccgctgcgtaatagtgttcccacacaccggagcctgttgaacagaccattcaaagctataataaagggccaccaagtggtcatggcgagttatgagggaattatgtattgctcaaacactatgtgggccatgagaatgagcatgaggtttatgccactagatgttatggtacaaaggagttacacatacaaagccaacagctggccctggagactggcaaggttcgtaacattgaacggatcactggctaacatgatggtgggttacgacgatgaaacaccaacaggggccttgaatttgccactagagtatcacgaaaataacaagaccattgtgcataggtttttgtgcgaaaagcgcgaagaagtagttttgtccaccatgaagaaaacacatcacgtggtgttcgtcagcaggagtcaactgcaaaattatggatctatgattagccgggactgcgcgggtctcccagtcgaagagcaggggtgtgacacaattgaccaagggtttgatttattggtggaacaaatgtgcctaaaatactactataactcgatagaaaaaggtgaagggagcgtgatggtgaccgactttccttatttatcactactcacatcaagttggggaaatttctgcataccgggaacaaatggcggaggatttagatattaccaaaatttagtggattgcaacaacatgatggaaaaaatgagtcacgtgtactgcatagacgagagagttaatgaagaaaacagagaccaaagcgcatactacaaagagatgcaggaggcaatagacactcagataagaacaggcaccgggccttggttcaccaatagcaacagcaacgaaccagcacgtataacaccaaaaaacttaatgggattggtgattgccaaattgccatgtcaggagattgcgagcatgatgagagccaacaacttaacttcgatgaatataatactgccacaaaatgtgcagagtgacaatcagttatttggtatagcaaccgaaacacaacgggagtatcagttttggtaccacaattcgaaccatttgacaacaataaacaaggagttgttgcacatgttcatgacagggaagtgcattacaactaagtatggtaccctagtcagtcatggagccaatcgagtgcttggacattgcatagtgaaattgacgttgttgcaaaatgcggaaatggcacccaagtacgtgcgccccatagtgcacgacaaccaaacgaagcaagtggtgtttaaactacccgtaatagccaattttaaaatgtttctgaacggtggggaggcactgatttacaaagaagtggacatgtcattaaagatgtacagagcactgtcactcagaatgttgaggcctgacacaacaatagatgatttgttgtcctatgccagaacttacagtcacaccgtcgcttattcaattagcaaaatgacaagccagcaaccccaaatgataacaaaattgatggagtgttgtgtgtgtgtcttcttagagagcaccaggttgaacaatgccactacacgattaactgagttaatcaacagtactgagttcccactcacaaaactgtcaggactcaaagacatggcctggtttgcaactatcaaaatggtcactgacgtttataagtggctgggtgttgacgtcggaattgagcagttactagaaatggtgagtaccgtagcaaaggaggcagcaggcagaataatcaacaacattgacaaattgaaggcagtgagagtgagcaaagtggaacacaccgacccattgattatgtatgatgcgtcagccgatcagacagtaatatcggaccatgggccatccaaacccgtacaattcgtccagggggtaataaagactttaaagctcgggaaagcagctggatatggcatggccaggtcagcacagaacctgcgggatccaagagttgataacttggtggccaaaccattggcaatatccaaagtggtcaagcagttggaagagcacataggggagaacaaggccgaagcgctgcgggaagtgatgcaagatctgcattatgattaccccaatagtcaattaatggaggcattgataaaggtaatggaaaacatagatgataaactgaaatggagggatatgtgttatttcggccagatcatgggaggtgaatggcacaccgttggtgcaaatttagccaaaaaatcaaagaagccagtcaacacatgcatcacattgaaccagttagacaaagaaattaaagagttgcaatggatgtatccaactgaatgcaaccattggaaagggaagaaaattgtatttagtacaataggcagtagaggggacatcgaaccctacattgcatgggcacaagttgtggccaaactagggagtgagtgcaagtttttggtaccaaaagactacgttgattatgtgaacagctacggatttgaggcattggggttgcaggtagattctagcaaactaatcaacagctgcatacaaatggagaagcacaaatggaacccgctacaactctataatgaattgaacgagatgtttgaaataatagaaggcatgttcaaactgaacaccaccaaactcttacagttttgcgaaggtgtcaacatgatgattgaaacaccattcacccacgtgggagtgcaagtggcacaaaaactgagggcgccttgcttgttcagtacagcttacccctgggaacagcaagccggcatgacaacaagggcagacagcgccactataatagagatgttaacgggtatagcggcatttaccccgtttcgcaagcacattgaacaatggcgtcacagaacattgcaattgcacaatccgcgtggaataatggcgcacggcagcggtaacccgctggtgtacctacatcctaagttaaccacatggtggaaaacatccaacacttcagcatgcgtgggttatgcaaacagttgtgtaaagcaagtcagcgagcaagatgtggagctaactaaatgggcagcagaagccaaaacaattgcagtgtgttttggatcaatgacgggggatcgcagaagcagcatgacaaccaaattgatgttatccatgcaatcacaatacagatttttagtggtggatgggcagaccagttatgatcaaattaaatttccaaacatgaggcaggtatccagttgcaattacaacctgttgttcaacgcggtggaaatcgtggtcacccatggcggcagtggcaccacacacaatgcattgcagcacggctgcggtgtggtaattgacccccattttggcgaccaattcgcttggctaaaatcagtggaacagcttggctgtggaaccagcttagaaaaacttctgaaattggacgtcaatgaacaaacaagtaaactgcaacagtacactgacacagcccaaactctgggtggaacagtacgcgccgagaacttcatggtaaacctaatcacaaacagtgaagtgctgtggcaggcggcgtccgaccacaccaccaatttactcgccaacgtagtcgaaccactggtcagcttagatttaaattgtaaaaacatcaacaaccaactggcaagcggcggtttgggtaagtgggcagacgtggaagacacaacagtggtcatcacagcagaagggcccaaatttgacaaaaatcacattaaacggtccaaccaaatggaaaaaggcacaggtcctcagcataatcaaggttcgagcacgactgtgcacccacagacaggaaggaatccagagatgggaaggaactataaagagcaccaatcatcacatgcactaacatacgtgcctaccaatgatgacttgcaattggctgccaaagcgcgagaggaaagaaaagaacaaaaaaaacaggccgacgccacaagacgcaagattgcagtgcagctagccgaggaccggaataggagaaaagaagccaaagaagaaaagaaggaagcaacgcaactacgtctcgaacaaagtgaacccagcaaagaactggagacagcagcatcgttagcagttgaaaccaacccggaagggaagccggatggaacacatacactcagtaaaaaatcgaaagaaccaaagtatccatggggaatgtcaaaagacgaagacgcaagagggaaagagataatcagtgaatgcgtggcaacagcgatcacagaaccaccagcagcggtttacgtaacaacaacggacactacaattgaacctgaaagtatggaatcccaaggagagcggcaagcggggccattgagaaaggcacacgaacaatgcggaactatggattcgaaaaagctgtacaccaggaccaacctcatctatgacttgtttgaagtggagcacaccgggataaattatgcaccattcaaaatcatgtcaccaacagggcaatcggtggtattaaatcccaatgagggaacggattgcgtttttgaatgtctcagaatggcactgacagatgagtatacaaacgatgaagacaaatcaaccatcatcctcagaacctgttatcaatggatgaacattcaaaccatgccaaccacccgtcagttagaggggttggtgagagcattacatttgcatattggagtccagttgcccagttgcagcatcaatttcccaattgggagtgcaaccattgagcaagtcacttatttggagatcatagagggagtgctcgctgcacactgtgtcttgaagaaagtttcgaagccaagtgtggagttctacacagcgtcaaatgccccccagatgtcattttcaattaatgtaatgaatgctgaaaatgctgctatagacgatgggttagagccaaaattgactatgtccagctgggcactggacttgtttaatgacagcaaatgtgagagatggtgggctatgatgcgcaccaactatacttatgcggaattcatgcacaaactagaatcaaaaaacctagtccacactgccaaacgcatgcatgcagccatgtctgtgactaattgtacccagtcagaaaatatcttaacagttgatgagaaagtagtggcgaacaaatggtattgggtaacggacggagccgagtggtatggggcaatatccagacgggtgggtgaaaggagtttattgataacaacagcctcacattataaatggggcgaattggttgtgatggtgcggacggataaccacttgggttggccaattggactaactgtgagagagcggttggcacgcaagattatagtgcccgggaatcaagatgtcacggcgttaaacaagtccacattgtacgaaagtaggtgcaaaaattacggggtccaattaaaaggggtgcaagacaccagctgtgagtatgtagcagtgtttgactatgataaccggtcacaccacaagtacgacgacgctgcctttttggtcagcaagggtccaagtaagagcatcggattgggtttcgacctgaccggagacatgtgggccaaaataaccaaccgcacaagtgccgtcaggcacatgctgaacagaggaaaactgacattgtgtatggagtttgtagaccaccaacaacgaaatacatttgcaagcgttcttgacgctagtagagtaaaatacactctggaaggtggcagtgtttatttggcaacggaagaagtgtcgcatgcacactcaaatttaatacaagagtgggctgtgtatatgaatgccagcaacgggttagtaattccagatagaacattaatggaaagattgaaagtgggagtaccattgcaagagttagtggaccaaatttgcccagacatcaacatcaagtcagcattcggtaaaaggcaccctagtaaacacacagcggtgttgactaatgaccatgcaagggtaaaaatgccgttgacaacaatagtgaaaacagaaatggaaacccaagacaaatatttagtgttaaggtccaactgcatcatttgtgaattgctcccactaactagaggtggtggagaagaagaaccccttttctggagacacggggaagagttaaaagtgaactctgtgacccgctggtggaatcaaccggaaaccgaggcacctaaaactggattcaataaagataagtatttgcaaatcaatagcgaggctttaacaaactggaaagcagaaaatacatcagtggtgcaaattagtaccaatccatttaaccaagctggggatagcacaaaaatgcactatgtgggagtgacacaatgggcaaatgtcattgactcacaattgggttcaccagagatagtagactatgacataatgagcatgtgggatgacaccgactttacggattggaatgaacgatttgcaccgaagaacgacgtggttatcaaatcaaaagccacagcaacagaaatgcgagtaacaacaaaatatacaatggtagagtatccaacccacagtagaccagttttgactaaggcggcaaatcaagagttcaatgctgttagtgggagactgcacaacataaccacatacaggttaaaaaaatacgatcttacaagagaagtgcgcaaatttgtagacatgtactttgatagttcaaaacgtgacaagttgaaggtttatcaaactcagcaattaacatttaatgacgcaaaagtgctagattggttaagggatcgtccggatagtaataaaatagcagaagaactgaacaatattttagctgagggtatgcaactgcacccaatcaacaaattaaacgtgcacttgaaattggagtcgctgttgaaatcagagccagcgtcaaatttgaaacaagttaaggctagagctttagtttggcagtgtaaaggatattgcgccatatttagtcacgtgttcaaagaagttaaagttagactcaaagatttgttgcgaccagaaattgtgtattcagatggcttaagagcggatgaattggctgcaagagtaaggttgaccacaaatgtcaaatttttgctggaaaatgacttggcccaacaagacaaacaaaccgatcatgagataatcaaggttgaaatggaaatttataaattgttaggcgtgtgtcctcacctagtagatttatggaaaaattgtcaccatagttgggcctacaagtctaggactgtagcaggtgtaggtgacgctatgcgactcactggccaagccaccactgctatagggaacgccatcactaatatgctggtgcataggcggttggttaaaacgttgggccacaacctaagattgtttttggtgttgggtgatgatggattaatgttcacaacaacatgggtggataccactaagttgaataacgagctgaaaaccaaccataacatgatgtgcaaaccaagtttaagtcagactcatggtgtgttttgctgcatgatggcagcaataactgatgaaggtaattgcacactgggaccagatgtggtgcgattaagacgcagattcgagtgtccaaatggggtgagtgaaatgactcccgacaatgtacaagcgagatgcatggcgtattacatgatgctcggggctacacctgaagtgacacgagcaatacagcaacaacagttgcccatacaaccaattaaatggtatgatgcggacagtatacgtagtgcaaccatgagtaaatacaacatggatgccaaccaagttttgaacgaagagagattgttgctaggcatgttaagtgaacccaacagctttgcacacaaaatactacattggcacgaaggtcaatagcttgaattttcggggggtgggggcccccccccccc

SEQ ID NO: 820 - DNA, 15205 bp, Phaseolus vulgaris alphaendornavirus 3
  source 1..15205: mol_type = other DNA
ggggaaatatggcaaatttgcttaattccaaacttaatttttcttcaacaaatatgtttaaacatgcaaaaaaggtactcttagaccttgagtcgggagtaccaagagaaagaaaattaatgaaaggaggtgacaaactgataatagacgcgtctaagagcccagtcacgattgggctggcgcgtcaaatgcttaaaaacaagaaaagaaagggaggaatattaactagtaaggttcctgtcttcaagccttccgagaggaaggagatactgaaagcagtaaccgatatgaacatcattacggtcgatggttgcaaagttatacctctcaccccgtcaataggtatgggtgagttcttatcaatcacgtatgatggattagcatgggattgtgcaaacgctttcggactaaacctatttatgcttggggtgttacagggtggacgcgtgctgggccccaaggggatcaaggcagagtcctttaaatcttcataccgggcattcacggagaaactgatgactctagacaaggaagagtttagtagtaagaacgatgctatcaaaataagctcaatgctaaaaagggaactcaacttaagactcgaccacagaggaatcagcgaagtagcagaatatctaggcttcgacttcatgtgtcctgatcccgaatcatatggatctatgataccagaaaattgcactcatgacttcacggaggctttcctaatacatacttgtcagttttcacagccaggcgatttttcacgccttataggtgaagcaatatacactgagtacatacccgtagaaaaacgcaataagaatggaaacctaaggaatgactgttttgtttgccctgcttgtggaactctaaactcaaagtgtgatccggaagtttttacttgcgggaaatgtttaagcgtaaacgtagaaatttcaatagacataactgaactctcacggtatgacgaaagcttgtaccctataagcgcatacgaccatgaccttacgattaatgggccgttggcaaacttaaccatacagaattacttggatggcgggctattaaagttgagcaaactatctagcgaactcattaaccaggatgtccttagatttgttaaggcccggtcaaggcttcaggtgaaaaaccaacatgtatgctccagcttaactgatgaggaagtttttagcttgagataccacttcaagaatctggagattataaagcgtaaaacttggaatgacacttacggcatgcttgggagtgaaagtcattgtttgctagccagcctactcaccaaaaggtccaggataggagtggtcaagggattcaacccttcgtttgttaatagtcagaaacatgaattgatatttggaagacccacccatttgctgaactggtcagaaactggacttccggatattttaggagcacaggtgtttaattacaactcaatacctgaggttggacacctgatcagggctgcaaccaaagatgaaattttcgtcatagtgccgaacattctggatcagtataatggatttgggagttcaaacgcatttgaagtgagcactgaaagaggtatcacgacgatactattcaacgggagtaataaagtgatagtacggcccatcaaagattacatgaccctactgtgcaacgactacattaaagtgggcgataaggttttctccgtcgacagactggataaagcgagcacgtgcacattggtgagaatcaaaagggtcactagaatagaaaaaatggatgttgcagtgggctccaagagtgtagaatcgaacaatttcaaatgcgtcacactgaatttgcctgattggcaacagaacgtcaaaggattgcagttcggcccgctacttaaaagaagaataaggttcaatgttaaattcctgaggcacctggtttccaggtgcgaagcctggccggttagcttccacggattgagggagtacgccattatttctagcttttcaagaattgaaagagatgacaaagtaaacttactattttccgttccatttgaggatatcccggaccatgttttctgtgcttacaacttgtacttgcggaaacagctaagcacccaggttgcatccttgttaaccaacgagcgcaccatgggactggagcatatagtccaagctctcgcaggagggataggtaacgtcttaataaatcttgttgatagccaagtactcgatactaactacgctaaatgtcttattaacgataacgaaacagtgaactggcttctaagttcgcaatgggcagtcgttgaggaatctattaaggagtgggaagttgggaaaatccaagttgtggagctggataataccgagatagggctagagtacatggttcccgatgcttgcgaacatggatctgaaatgaatccaataggccacggttgtccgtgctgtggacaacctacggatttggctggacgctattgctcaaaatgttctgttgactccccttgcgaacataaatgcctccatcaatgcaggtcgaaaagggatcatttttgcagtgggatcctcataaacggatcagtgagcgaaggtactaaaatgccatgcgggcataaagcagtaacatgtaattgttgtagagttatttcttgctatcccacttgtcaaaattgctttaactgggctgactacgataatgaaatggataacctggttaaggtccaaattaaagtccaagaaggagaggcacctggaatggctgtcaataggataatcagccaggctaggtcggaggacgtctccggctaccaagatggagaagaaaacggagatgagaaaaaggttgccgacagtaatttggatggtaaggcctttcctgttctcaaaagcaataggaggaaaggtaggaaaaatagggatgactacaaacagaaggtattcaagccgcggttagtcacagcggaagctagaaataacgatgaaaaggaaaaaaaaaataaaggtgacttgatcccagaacaaaaaccagacgaaggaaaaacgactgactgcagggccgaagttgaattggcaagtcaagcaactgatgaggccaatatcaaattgttagaaatgaaagtcttcaatcaaatttccgcgtcatcaagcagccaggctgcaagtgaatcatcgcagtcagatgaggacgagaaaagtgaggaggaggcgaatgaagaagagaacattgccgaaaaatttaaactcatgataatgatcgacaagctcagatcggctactgacgacagttatactgagttaatactgaattcaggcaaagctcccagactagaagttagagcagccacgtcaacccttagctacattcaccaaggtgaggttgctgtgaatcttaccaacataagggccgtgaatggcattaatgcagactacgaagggggttattgcttgagggattcgttcgcttattacaatgctgaaatcaatgaagttagctggagagatgcttgcgatgatctaaacctaccagcaacttggtgcttgtacactgaaatatccaagtacgcccagtacttctcaatgaatgtgttggtggtacatcaagcccgtgatgagctactcagcgcgaacatgtggatttcagaccctaatcaagacgtcaatttcataagatacataactgagatgccgacagaagagacgtacgagctgaatggacattaccaaccctgcgaattaacaatgtcaggttgtgtttcgtgcgtcccctgctacactatcgatgtaaccagggacgacgtggacatgatatatgccaacgttacagggagaggcgatataaataaattcatggacctgactttagaacagagagttgcgattgggttggcaataaatgaaaacaaaggagttggcctctttaaagttggattcccaaacatagaatacgaaacaaaaccgaggggattcttcttgtgcaacaatgcaaacaaggagaataatccacgtggtggtaaactggccatattcatacctgatgttaatgtgggtcctagttttcacattcctaacctgcagacggaattcgagctaaccgagtgggttctcaagaatcagttagattcagagtatctttctgatgaattaggaatcgcgaaagacaggattaatatggccgttggacagtatttgcaattaaaattgcaggtggagagtcttgcttctggagataagaaatttgtccagcaaatagccaatagaattaaaaatattaagttccacaaaaggaaaaattattggttcgttataaccaaccctcagctagaaaaattaaaaaccggggacgtagttctgataagacaaggaccttcctattattgttgccaagtattgcgacacttaaggaagttgatcttcccggtgattgatgatagtgggtttaatttccaaagcgaaatggtaactttcaagacgagctacgcatcccttttgatagaattggactccgcagcaaaaccaggcatgcccatgcacagactaaaacaaataatggctgacagtgtagccatatcaggttatccagggactgggaagacccgaagattaatacagatgagtcagttagagcccggagtcataataggagtgactagaggtagccaaaactcattaagggccgaggccatgggagccaaagtgaggataatatccgcagaaagggctttaactgagagggccaactcatcttgtgtgtacatagatgaaggaacgcttctcacagtgcagaggatacttagtatgcttggcccgaatgtcaaaaaacttgtcgtgtccggagatccttctcaaataccagctaaggaatattctcctatttgtgcctatgaacctaccaaccttttagaatttgccagaaacaatggagctgaggtcgtgtctctgctggagacctggcggttcgggcctagggtctgtggaattctcaatgaggcattcggcacggaccttaaatcggtcaaaccaaatgatactcccttccatctggaacacagtgatggactcaataaaaaagaattaaattctataatcgagaagaggagaattgatacagtattggtgttcaccacagccgtcgaaagacaggtgaacgccttgctgggcccggagaatagagtaagagtggcacgggtccatagctcgcaaggtgatagcagagatagggttctaattgtccaagactataggaagggaccggcccagagttcactagaagttcaatttaaaagggagtacatgatagttgctgtgacaagatgcgttaaagaggtcacactaatgtgcacttacgagacttgtaagcacagagaatcatcaaacaccaatatagctaggcacctgaacagggagttagaggtgcaatatttggcaagtggcggtgcttccgaaactagcatactcaatcagattattggagggctttcagatcagttcaacgccgagttaaaatccttggagccatcattcatgaaggactgggcctccgtgataatcggttatgtaaacgggaaaatcaataatgctaaatatagtcacatagctgaattagtacgaaccaagaatgttggtaaactgcatgacaacttggttcaggcagggtttccgctaattacggaggttagtacagaggatggtaagatttacgcaaccatggactatgaacagactgactggaaccctttgaagaaaatgttcatgatgaatttcagtcggaaacaggaaatattagtcaaggataacaaaatctacctggggggaataatgattttgtctaaagccaacgaaaatctgatagaggtagaagccggtgattttgatgcctggaaatacactaagaacgaagggtgtctattttacatcaaaaattttcatgaagtagttaacgaaggtgagtgtcaaacaataaacatgaatgtaaggttgctgaatcattcagctcagttgacctggaatgcggctaaggctcctttagtgatagattatgcgggtaaaaaatattacgtgaaaccgacaactgggtgttcattatgcggtggtttggaaatccggactaagaaaaataagttaatcgtgttcgtcaacaacgcgtacagaacatggacgagccgatcattacaatataagtcagaaaataacaaactggttagattgctaattggaaagtgggataagcaatacaatgacggccacctttgggaaatcctgtgcccactaattcccaatgttaaacatcatatgttgcatgctatgttgtggggagaaagagtcttaagcggcctaagaggacttttaagaggcaaaacagtgaaccctgtagaaggacatttgtttagaaatgaattggagttcaatgagagggtcttaatacggtataagaacgaagccgccagaagaggaataaccttgatctggaaaaacgacccttccctggcttattttaggtgttcatctttcctttttagtgccaaccagaagggcaaagaaggatatgtgtactttgagaagcattctaatccagtttttgtcaaggaaggttgggtcaaaaacaaccaatataagttggttttagaactatggaggaatgagctgtacagatttccatacaacctggcaaagatcacgggccctagcgacattaaagtagaagggtatggagagttgtcgcgaatgctagagctggacttagagaagcatgggaaatcaaacagtaaattgatatccatgttagatgaggatctgaccagacaagctaaggataggctgttcgcaaatccagaaatccagattccgtgcgacttcttagaagatgctagagatctaatgatacatcataagtacatactagctccagatcttcaaagtttttgctgtggcatttcctacttattggactcagttgcagttaagcagtactgtgccaatgtaactgtcaaaagtaaagggttcgtgactaggtttcctaatttaagcctgcggctagatgttgagcgatacaccaggatactaatcccggaaaacctaggttctcaaagaatgtacgacaatctcattgaagactgctttgctagacttgaagttaaaataaaggtacttcaagatatgattcctgctgaaaactcccgggaggccaaaatggcaggccgggggaaaaatgggaaggatagatattctgagcctagggcgattgccggggttatacaaaacatgataaatagaagagatttggcaacgctagttgacggactaggaaactgtactgaaataggttctctggcctttggagttagtgcgttggaacttagttttgaagaacttaggaaaataaaaacgaacaacactaatgacagtcttttgatgatgattccagacttcaggaatgaaaatatcaaggtcaaaacagccgtacaggggaataggctagtattcaaaggggaagtagtagactatgaaatcaatccggattggtgtgaactggtaagtaggcttatcaacgccaaaaggtgggagacggtcgaatgccctgacggcctggaatgtgtaggtcaggaggatcttttcttagtgttcacggtttgtgataagccccaggacatagttaggaaactgccggtgaacatgagaaatgatgagagcatttgctctgtacctcaactcaattcaatcactgagatgaaacgaaccaaatcacttttccggctggctgaattctcattagacaccgaattgctaggtagactggtgagaagggcaatgataccgggttgttcgttggaaacacttcagaccatagccaggaacagaatgcatagtacgactattagcaaactaggcaggaaaagtagtaataaagacccgaccacagatgcgtctttgtgcgctctggtggccatgaatcttgctaaccatcatgacaatcagataacccggtatatggagaagatagaggatttcttgcttgataacaaggactggaaacgggctaacgctgccttgatacacaccattaaaatggaaatgaacacgattcttggtaaggtcctgaatcttaggatttcgattaaagagttgagcgaagtggcagggaactgtctgtacactgtgctcactgatgacaacaacctgagagctcttccgagactgacgattaaagaacaaccccacaggattatgtatggacagtttttccaccataaactggatgttaaaaacccagacggtttcaactttggaccaaacatagccaataaggtactaaccaacactgtcaaggctgttctgaagatggcaaacgaagttaaagaaggatattgggttaaaaaagaaaataatacgttcagctccaccttgtatggcaaaatacaagaaggaactgaagtgaaagtagttttgcatagatatgatttggcaggcggactctgggacgtgctttccaaaaggttagaaatatcttcaagaaacagcatgataacgcatagttctgtaagaatcgggaatctagaagtcagttacggaaacggaattaaggtaactgaagtcggaaagcaaagcaatggattacaacattcagagatattaatcggtactgttaggataagtgaggagatactgagggacatagatgaatccggaaaaagaatttttgttccaaaaaaatacagtccaataggaataaactgcaatctgtttagtctttggctattaattaagctcggattcctttggaaaattagagttgatagacaatcttctgaacagttaggggatgtagcctccctggtgcctgagttcgggtccaacgtaccacgcataatactggacacgttcttagataataattcgaagatactaaaagattcagagatagtcagaagaatcgaggactgcctgagatatacgatggaaactagtagacccgtggggaattcggagttattttgctttataattacgcaactgactattctgacggggctagaagaagaaaggctattcaggaacattgaagagatgagagagagcatgaaaatggtggagggtggaattgcagcctcaacgagagcctctgtaattgagagggatggaaatgagagtgacctgtgtgcagtcaacgtagcaggagacccagtagagaacgaaagaaaatttagggccttggaaatagctgacgggcccttcttcttggttgagcaaagcaaaatgaaacagttcaatgccgcataccaaaaccaggatgaggacgaaattacaggtttgacagtcatctacccggtcatggaaaagttaacggatatggcaaaaatggatgaacagaaggatgatgtaaaacacgtcgccaggtcaataatactgggattaatatgccagttggttagcggcctgagtgtgtcagaatttgctgccgctcttgaaggaattaacaatgagaagatagctaggaaagttaaaagaattgctgtgaaaattacgtgcggggacaaaccggcaactacagtgcaaactgaacccgcggacgatgcagataaagaccctgaagacggcgatggagatgtcaaaggaaaggattcagggaaaattggaaaaatgattgatgaatccaataaagaaaatccgaacacggccatggataagagtactggtgggctggatcagaacggagatgaatccgagaaacataaggaatgcagaaaaagtgaacgggtttcacaccaatcagaagaaaagaagagtggtcaacgaatggcaaatgaaaaggaagccgagcggaaggttacttgccaagcgccccaggaaacggctgaagatggggaagcacataaagggatgagttttaaactcgcacggtacaatgggtcagagacggtaagccaactaatcaaggacgtaatagaatctagagatttgaacagaaatgagttcaccgttgaactggcgaccaacactttagttaaatacttcttggaggcaggagtagacccaaccatcaacactatatctaacttgaccgagagcgccatacaggacgtgatggcattagcggacaaactgacatctgattttgtttttgggattgacgatataaacagattgatggccaataaagtgagattcaatatgtacaactccagatccaaagtatcagggggtaacaagttaagaggaatcaaggtaggaattctagcggtggggagctttggtgacacgctcccagttataagagccgctcagattctcaaaaaccaaggggcctgggtcgctttagttacacatgctgactcgccaggattggatggagccaacatagacaagttttatccaataaacaaaagtcaagaattcactacaggaaacatacataacgttggccccacgaggaaactggaccacgcactaagtcataacgaagaagcagtagcgccagtaataaaagccttaaaggaacacgaatttgatgtttttttaagtacccctctttgtccggcggcaactgcccatttagtcaacaagggaataccaacggcagacttcttttgtacttattgctggcaagtcccagaatccgcgatggacttgcctttaggcgaaggggttatgacagcggtgaaagataaggtagttgactgggtttttagccatgggtatccaatagcaaagcaaacagttgcggaactagtccttcagaatttcaatctggaatcagccgatatatccaacacaccgagacttgtgttgagttggagcttcttgcattcacaacaagcgagggatgacaatctctgtcttttcttgggttacaccagcccatgtgaaaaattaaacgctttcgaagtagcacgtaagaaacttaagatattggtaggattcggaagcatgagtgttaatttggacatagcaaataaagtaattgagatactcagaactatggatccgaaacttttccaactaacactacactcccaatacgaacacaaaaccagggccttaagaagttctcttgttgcaaacggcttcaagttcaaagaactgacggggtatcagaacacaggacaaatggccgtaaaccaccatgtgatgatctgccacggcgggataggaactgttcaggagtgtctcaaagccacctgcattccaattatagtacctgtatttgctgatcaaccatacgtagcgaataacataagtgaaagaaaatttggaatttggtacaaaggagatcctagttctctgttggcgtctgtcaaaaagatatccgagtatcaaaaaagggtgatagatttgaaactggataccaagacggtggagaataacctggttgattccattctggatctgtgcgttgccaccccggacaaagaaactgacgcaaaatccaaggaagttgggaatttggcacacgaaggaaaaactgttccaataaacccatacttgataaggaatgtgctcgaattaccttgccccgacccaacaaaccaactacccggcgaatatgaatgctcgctcaaaatcgaagaagggctcatagaaaaaatcggggagagttatactggtgatgactgtctaatggaggccatgaagcaaggaataaccaaaacccagcaggccagtggtagggcgaggctagtacacagtttgagtttattccacattaccaggatttcggagttaggtaaattgtttgccatggcatactacaaccgggtcaatctacaggtgctaggcttcaaaaataggactacaatatttgacagtaggtggcccttagtatcgatattcatagttccagtgaacaataaaacaggcctcaacaacttgcatgcatacttggtgaacccaataatacagctaagcaagaaaatcaataggaaaaatacaaacgaagacgccgccaataatgaggatgtcacgaatcttgggaaaataataggactccctattggcatcaacccaatggggttgttggaaagtttagtcactgcgaaaaacctattagtagaatgggattgggctgcatatggtagttatgaaaactttgaatctaggctccatggcacgaatatcgattcgcttctagagtcagataccggcctaataatgcctgttgacaaggctaatccaattcaaaatggcgtgactatagaaaccagaatcgattaccagagcaaaatcggggagatagtgtttctaggaacggaggaaggtttaataccaactatgataactaacgccaagaatggcaaggtttacttgtacaccggaagagagaccaaacctctagggctggcattcagagcaaggttgataagaagcaagaaggaacgaataagcaaacggatgttacaagacaatgtgatggaaggaaaagtgtgtagtctaaacaaagaaactattaataaacttagagaaaccagcccaggtttgaacttagaattagtgacagaggacctaattaactcatgtcctgaaatcaaaatattagccaccagctttgatacgagaggacaccattctgaacgctcagaaatggagagagcaataatcattaaacacgccggcacgcagaagctgaagacccttccagtagacctgggcgagggactagtgcgggcaatcaagtatagtaaaatagcttatttcaattaccagaacggacacacttggttcaacattgaaactgcaagtaaggacgtaaccatgtttctttccaagattgtcactaaaatgagctcagaaaaagggggtttttttaatcaaggaaccagtttcagattagacgtaacgaacatgagagatgttgacagtctggttagattgtttaacaatcatttcaaactagcgggtcataaaatagaatttttcaaggatgaaaactactgcaaggaaggcatcatgacagtgaggaaagacgacattgtgaaaaagaccgtgacctttgatagctccgttttagatcaactaatcttagattggttcgaaggtgaggaggagatcccagcctgcgccattcatgatttgaatgaacatgattggatattggacacggtcaagtatggaatatgcttggactctaccaggacaaaattgttagtgataacccctctaatcgcactgagtaagattttattaaaaggagctggtttcgtcgacgaagcaaatccgactggtggggatggaagcagagttaacataaacgccaaggacttggtaatggaccagccgtctgaagctgtgatcgggccacagttcggcaaggacaatttcggcaggttcgacaagtggttgcaagcaaacaaacatttgaaggaaattgacaattcagttaataacaaggcaaaggtcgagcttacaaggaagaagtttgtatgggaagaaatttatggttgtctgcaagcagatggacagttacaagtggatgctgatattagcaccaaaaactacaggattgcagaggacctggacttccaggcagaaatgggatttgcaccggcaaggaggagcacgagtgatgttggaaacatcgaggatcatagaataatagacctatgggaggaaggacttgacttgattgatcacgtagttatccactgtccgactaacgagcaaaaatacgtaataagagaaggtaattactcgataataaacaccgtgaagacgattttttcgaaatatcctgttcaatgtagacctatttttcatgacgaaacctacgccagtcttaactctctaactggtaggttgggaaggggattgagtattagatccatgctagccagaccgaaaactcatgaggtgatcgataaaatagcactttacttcttcgacctacgttggaaggagcttaccaacacctttcagtctaatcccataatgtacaatgaaaaagattttctagattgggtttcaaagcacaaaaatccaggcaaagttatcaaggaattagagaaaatgtcggctgaaggtatactgctgaatcctttcaatcaatttagaagtcatgttaaacttgagagtattaacaaaaataatcccgtaatggattttagacagtcggctccgagagccatagtttggctgccttacttcatgccagcgatatttagttacatgttcaaaatggcaagtgacaggttcaaattgttgcttagaaataacgttcactacacctcgggcgtcgacgtcattgatttgtcgaaaatagttaacgaagttgataccggcttttacttgttcgacaatgacattagcaagatggactcgcagattgacgaggacatggtacgagttgaatgggaagttctcagactcctgggaatagatgccgaggtcatggaggtttacaaactattaaagaacaactggaggattagcaataaattcctgagcgttaggggggattggcttagacatagtggagaaccaacgacagcgttgggaaatggaataatcaatttagccataacgagtttggtacttgaaaacacgtgtagatccaacattaaactatgcctctttgtcggtgatgacctaataatagcaaatgaagtgtctgaagatttgcaaatgattaaaaggaaaggtagagaattagcaaacgctatattaaaacctaatcaaagcaggaccaatgggcctttctgtagtttcataataggtgccagcgaaacttctgaccgactttgcgtagtacccaacgtcccgcgattggcatataagtgggaagtaccgaatggccagcatgagacgactgaggatgcagtcttcaccagacaactaagctactcttgcattttgggttctaacgaatttagtaaaagagtggagaaattgataaaagataaactaggaggggaattgcaagttccttcttattatgacggcagtgaaatgattcaactaaattgcaagtatcacaaattggaagagatggaagtcgtggaatgcttgaatacgctttatcagagaatagaaaaaccgaccacgaggcaagttacggctctgataactagtgagaacataagaaagggcgtcaaatcaatgagcagaatcaaggagctaacaggagattcggaccaatttgaacacaggagactaatagacgactagctaatcgatgcactccaaattaaagtacaccaagaaatcaactttctcgccccccccccccc

SEQ ID NO: 821 - DNA, 13883 bp, Phytophthora alphaendornavirus 1
  source 1..13883: mol_type = other DNA
tgaacttatgagttccacaatcagcaattaccaaaagctacaaagcagaaaaaccctcaggggaggccgccggaccggggtaggcggcctcccagttgctttaaatcaagaacagattctaactctaaggaagaaattgaatctgaaagtgaccaaacgatttaactatctcaagagtattgacaagaaatataaagagatggtcaagaccagtaaataccccgggcgtttggtaccaattagtaaggctttaaacaaaaaagccatgcagagaatgactaggaatatcatcatcccagattgtatgcatccatcacaactattagccgtgaaggttgccatagccaataacactgacaaatggtttatcacaagagatgcatttttggagttgaagaacctgagtgagttagctaatggtagtcaacaagaagtacgtctcagtgtgttgcgctctaagttatacaagtacacctctataggaaaagaagtaattcctggggaagcgaactatttcaggacttggttcaagtggctaagttcaaattataacaacagtatgtattggatgtgggccaagtatcaaacagcagccaccattctatgtgacagaattgttgaaacagccgcaggatgtgttatgtacattgattgtgagccagcccccgccgagacagtagtagagtgtgcttattgtggtatgcttaaccacatgacgagtgccgacaacgtaatgtgtggatcctgttacggggatttagaagtaactattgaatcagctatccctggcgagccgattattgagctagtactcaacatgttgcaaggacatttcggaatggccatgttagaacaattatctttgtccaattatttggacttgtcagcactagcagagtctggtatcggaccctccatcatcaatcatgacctaatgatagtgaaacaaattttgtcccgatcaatgaatatggcagtaaaagtgccgagcaacctgtccttgaaggagttgtccaccctccgattcactctaggtacggatatgtgttgccccatccacccgaatacctccggagcgagaaaatcctcagcggaagtttcatgggttgtcactcaactacgacagttaactagtagtaaagggaagataattgtggttgactctatgaatgtgttacagtgcttagaactacaggacggtgtgatagaggttgtcaatgatattgccgaggctgacattgcttggggtcaggtggagcatgtcgtgatttacttaccaaatgcacttgaattatcttgcatattcagtgcggcaccgatcaatgtctgcgtcacaacgctacaactcgaccccaaagacccggaaatgttgacagagtgggacacccagcaaataggtgaaaccgtttggtggtcaccagtttacagcaatttggctgctagtcaagatgttggagacgttacgttactactaggagatcactatactgtcaacaatcataacaccatattgaacgcgagcaagatcaacaaaatcgggtattttaccagatgtgaaattcacagatctgaaggactgccagttgaactgttgacagacgtcattggtagtctgatagaagaagaacgagaatttaagatacccactgtggatatggatgctttggtaacaagattcggcggtgcagtaattaagacaaaaaccatcgctctggaccgcgtgtttctccgctacttactcaataagaccatgttgggaaacatgggatacaatcaaactgttgaatacgccatcagtctttgctactctagatatgtaatggatggaagggaaatgaacttttcccgtatatcagcagagagctgcagggatcatgcttacgttgccgtgatgrttacaggactaacaagtactgaatttaaaaccggagagactgttttggggcccaacaatggggctcagcaagtgatcaaygtactttctttaggggcaatgcaaggtttgtgggcggttggtcttgatctgtgtgagcaacttttaccggaacctatttcagaggcggtgaaaaagaccataacttggttgaaacaaggtaacacttctgactaccaaaccacagacatatgggagaagttacgcgattgggtttacggaaatacatttgacagytgcaaatactacgtggaaacaaaatggaagtaccaagaaccagaatccaattgcgaccatcacagccctgattgtgatgacgaacaagtgggtgtggatgatcaggacacgctaaggtgcttatgttgtctgttatttaaggcttccccagtaaccaagctttgcaaatgttgtacgttgtcttccaaatgtaaccacaagtgtagccacacatgcacctcagaacttgaccatatttgcaataagaaatgtaaacatcagaaaatattgtgtgactgttgtggagttcctacatgtttcgatgaatgcccagtatgtcaaacgcccgtgacatgggtactccctatttccctcgcagctaaggaaatttccaatgcttcaagacgcaatagaccagtacatatggccaaaccgaggaagattgacagagaaaaaatcgaagaccaagaatttaccgtgaagggagaacctgtttccagagtgccagtatttaagacccatggattgactctaggactgacaggttgcaacatccaagaggtcatggaaaaccaagctgaaattcaagcaaaggtgaatgaattgaaattggaagacgtagaagtgtacgatcctgacacccttgaatctatagggttgttcttgctgattgaccacacactgatcagtgaaccggcgaaacctggtgaacacacaattagcgagctggtggaggaggcagaacaacgaaatgctagcacatctgttgacaccactcctagagagcatcaggataaacctgtggctctagatgtacctgctgacaaacagtctcacgaccgactcagtatgttggcacctgtggtgcgacgagcttgtctgaatggcttgatgaaaaactggggagaagtgcaaccgtacttcaagactacagacgccgatgaagccggaaccacacaattggttttgttggctgaaggattcagtagttacgtcaccaatgattggttggcagttgtggccacgcacagcatatcggctgaagacaacctgtgcgggttccacgcgttaaaccttggttttgagggtgcttctttgaggagactcagagaagtgtctaagaaagatgattggttcgaattgaccgatttagttaattacatgagagaagaagatagaaacctgttggtaatgaaagacgagatggtagatgtatacacctttgatccatataattccgtatacgttagtgtagagcacactggtagtacatcttctggacattggagccctatctccatggttcaaattaagccggccccatctctacctaactggaccggagtaactgacagaaacactatgagtcagatactcttaagttggggtctgtccgtagacaccgagtttgatgatctctccgtgtcacaacgaataacttactcttggatgcaatacaatgaagaagtgggcaggtctaaagcgatcgttagtcagacattgagtttaagttcagaaaatggtgtcgggtacttacacagtggaaccaatactaagaatgacattaggagtggagaagtattcttggaaattcctcaacagtacgtcccgagtatgagtatgctgaactcgagttggtcactggtgcaaaatagttttgagtacaatcaacctcactcatactcagataccatcccactgaattgctcacaacgtctggtgcaagaggtacgagaacagattaagacactcgttcagcttggatttacattggacaattatttacctgaaataccccctggatactataatttgcaccaaaaaggtcgagcccaaaccatcagcgaaggcgttgtgaggtgtagactgaccaaagaaaatattaagacaggtgatagtattctggtagtggttagtggtaagggttactctgttagacgtatcaccagagaaggggcatggatgattttcccgtttgtgaccacccagcgaagaacaactatcaagtttttgaaccctagatcatcgtgtacgtcaactcttcttcgactgcaagcgttacttcaaactaacccagatacaagcaggactctacagctactgcaagcctctgagtgcactttggctgttccaggctggggtaagtcaaccaagatcgttaaagagtttgacacagacaccacagtcacttgcgtgacaagcgaggcagttaaaaatttggtggctatggggctgcctcgaaacaaggtcacatcagtggagagagcggtggagtccaaaatccacacaaagaagctagctattgatgagtgcacacaggtagattggcttatggtgcacatgatgtgcggagatgaagtggaaatcattacactagcaggggattccttccaaataggagctgtagatttctcagcttcaactggtgaaagaacgatcacttcttgcaatatgttttcactgcaccaaaacacctacaataatagtcatagatttggccaaccactctgcagtcaattgacagtgcttaacccccgtttaaccactgacgcattgcatcaaacttcatacagtgtgcacaacctgagttctttagacttgaatgtgctgggttctgtgatagctcaagaacgaccaggcgtaatacttaccttccaccagatcactaagtcacagatacagagagcgtttggacgcaccataaagacgtctctaaccactggtgatgtcaaaacagtacacagctatcaaggtaaagagagtagtagagtaatggtcattcaagatttcctaagcccagcaggagtgcacacagacagacgctatttgatgagtgctgcttctagagcttccaatcatctgatatgggtgacaattcaatcgccaattaattcattggtgttatccgaccatctcaaaacaaacatcctagttggcggtcatctatcagatataattgacaacacagtgataaccctatgtaacaggttcaaattcgagatgtcactagaaacaatgagaaatgtggtcgaatatttattcggagagtacgaatcaacacatagtgatgaaatcaccttaaagacaatccacataacaggtccaactgaaaatgaatatcaacgtggatacattaaattcagtcaaccagaagaggaattcttaagacgcgggagaacttatttagtcacgaaacccaacctggggtcaccctctgaggaacctgaagttgtatacattgccgaagactggaaaccagaagggaaaattgatgaacgatatgaactcaacgattatgccgtcagcaatcagaaaacacaagtagtattcggaactaaacgagcactgtctacattaatattacctatgtcaatcaacacagcaggttggaagattacattgagtaaacaagaggcaaatgtactagttaccattgagaaatacggcaagaccctaaacttcatttgggacaaccaattaggtggcgtagatcttaccaaccataaggctttgcaggtgggactacggttgctgataaacactgggttgctagaaagggtactgccggaggaattgcacaatttgaatttgtttgagcttactttaaatgaagaccgggtgatgtctaacgccgaattggaagaaatcgctgaaatgggttcagtaattcatatggatgaattgatggactcagaggctataatggagccaagtgtgagacagggttggacccacctgataaacattactaatggtcgattgagttctgagatacaacaagagttgatagtggagagtaaaaatgcgccaaatgaatccttttacactcacaagacaggaatgaccttagtgaattatagcagattatccaagttagctgacgcggctagacgaaccagtttagaagaattacccctgcccttgcgcaccccgtttggatgggtggacgttaagcgacacaacggatgtaacccctgtgcaggaatatccttgagacaccatgatagttggtggttgatagataacgattattacagaaagggttcgagaagggtgcagttcaacgaagagagtactagagatgaagcgataatctacgtgctcaagggactacaattagaacacacattagaagacgttgtggacccgcaagaatcgtcgcatccattcttctgtgtggatgggcccggccacgaagtgtggtgcagtaaccatgagtccttggatttctgtgatactctaatggatagaatctcctgtttcaagacctacactgaaagcaaatttgagtacaaggatttcactgagaacaacctgacttggttgcaagatgtggcggataagatggaagtgttcggtatgtacaacatcaccaaaccaggtggggacaagaattccaagtggaacgagtctttactacaagtgttaaacgcagacggaagccgattcttcgtattgtactgggatagcgttttctactatgttgactgcgataatgatgatgggtacatacaacaattccatagttgggtgaaggtggatctcgtagagatggccaacaaattgtttgaagttggtttagaagctaggagatcgaggttatcaacgttgttattgtcagctcgtgacaccgtattcggagcgggagtcaatgaagacggactcatattggatttagatcaacacaaatttaataagactgctgtgtacaatcatctagtccagagaatgggagagatgaaactcaagcaatcagcgctgtcaagaagaccgttcttccatggaaaaattgctatcgaaaccctcaagaatcaggtcaagaccacgttaagaggcggggtagtagaggaatgccctatttgtaccggcagtagtgttggttcagaattggttactttgatcattgctcacagcactgacgaacctaccaccttgatgttgaataatccacaattgcttctgagtaacagtttgtggcatcacaaggtgagatcaagtgaagaatctttattcaacacaaccttcccttcagtcagagccactttctcgcgccacgcaaacaaagtgttggggaaaatcacacactctatgaaaaagtacgcaatgggtgaagatttaaagagtgcaggaagactgctcgctgcgtcaaatgtattgaagaaagcgagtaacagcgaacgagggttcgaagtgtttgagcatccaaccaatacgtgtgacaacttgatagtaggacctttactactggctgaaccggacagcttagcagagatctgggggaatgaaagaattcaagttaccattattgtaccggctgtaatcaacagccacagcccatggtataaagttaactcaacaggtggaaatattcaaatcatggaatgtggatctggattgactgttaaaatccgtagtgaaatctacaacagcgtgttgaataagcccaatttgacgttatttggacatacgaggtgcactgaagtagtagggacattatttgactacctaatcgtcaacactagaggcgccagtgaggccagaccgcagaaagtatggttaagacacccgttgcatgaggtgattaaagtccctattttgagtgttaacttaggagaagatatagctaacaaaagtatagtcaagtggaaggagttccgctgtgacccagttgttttaagaagattggaattgcgcgtcaataggccaggaacaaatttcaaagatttatgtgagtacgctaggacattattgcacacaagagattacacgagattgggatcgtgggatacagttaaactggacgatctggacatgctcagccattgtcaatacgcctattaccacaacaaattaggcaataaatccattagtcaaatgatagaactgttaaatgtattcgatcaaagtgggaaaaacatacccttttacagttggttgaagggtttaggtgtttccaaacttctggatgtcacctactccacctacgcaggagttatgagagacacaggtttagatttggggttatctcagacattgatggagttctgtggattcatagacgaactagtcaaaaatgataccgtcaagaatagtgttgtggagctttggaacaactatgagccgaccatgtacaagcgacatgtcagttttattacttggagagcgcaacctactgcaactggcgaggtgggaaggttggcgtatcgtttgttaaaagaattcatatgggaacctcattttgagggagatgacgtgttgagagatttaataccccgcggtgccaaagatgatgggaaaagtgagaacagtcacacagaagaagactttgaacaagaacatagtgatttcaaacatgcagtgtttaccagtcagggtactagaggagatgtggaaccagtagttaaatttatcaacaaaatcaagcatggatacgatttggtgacattggtgtgtaatcaggggaatggagaaggagttcaattcccggatgatatcagagtagtttatatagatatggatggaagtaagttggctaccttagcttctgtgggaacaggagaagggctggctgaagttttgagtaaactctgtgaatttgagggcagtatgcgtgatactttagagaaactgttgtctggaccccccgtcaccactgtctacgcaaccagcaattgtcacttaggttacgycttagccgacctagttcaatgtaagttggtagaactgcaactgttcccttggccatttaaccccactactaagctagagaaattcgtggccggggtaacagagcgagtattgaccacgaccgttgacactagtggactgaacagggtgaagaagaccagacaacaacacaagtgtttgttgctttttgcacccatagtgttaaaagacatcgatcatcatttctctgatgatttgaaattggtaaaaattgattgcagtgtgttgaagccgacaggtgttaagaaggaagctttggttgtgactatgggatccttggtaggtgctggagcaatagccagatacaaagcaagtttgcaatgggccacaaagatgaagttcagtcatatttacctagttggcaatcaatttagagcagactatatgtgtgatgccagtgcagtcctgagtcctaccattaaacaccttaacagagagggggtggttgtagagattgaatcttacttgccatacgtcgaaatctgcagtaaagacaccatttgcatccaccacggtggtgcaggcacaacaaattggttcatgagactgtccatgagacaaattatattaccactctttaatgaccagtggatctgggcaaactgtgtatcaaagctaggttgtgccatcactgcatcaccaattaccttaccgcacataactgagaaagaattgagtaaactcacagggaagtcaggttcatggagtttcgaaaatagacaattgcaaggtgcacatggcattaattctagtagaatccctgattggactaaatcagaacccaccgagcgcggatacattaatatgttaccgtatcttaaagaaggtgtgatgtccgcagcaaacgacgtgagcataaagatgatgaatttcggacccctacagttagcgaatgaaatctgcgcattgttccaattagcggatagcgcatttgattggcatgagaaagataattctagtagtggggaagaagtggatccagaggatgtgatgcaagaagagggagaagaagttgtccctgatctagagtcagaggaatcagattcatatgtatcagcaaaccccgaaatcgcggctagtcatacaacaaaggagttagaagagtcggctagtcaacttgcagaacaaagatcacttgccagtcaccgtatagaggtgggtgattcaaaaccaagtcaagcttcgacaccatgtgtagacttggtggtttaccagacaccagttgtcgcttattctaatcttgcaactgaaacctcaaccgattacccagaaatggagccaacagttctgaacgaattggaattggagaggagccatgcttacagacaagatgatagagaaggtactctgatttcttcattgagtaaacctcctgcatctatatcaaacgtgatcaactggaggagccttgtgaacgtagaagatagtagatgtgaggcaaaccaaatctgtgacaccatcgatttggccaccaatatggacgactctcccttgacgacaacaaccttagaaaattatcacacagtatatgatcctggacacaattctcctggaacatgtgtatttgattgtttgagttggctgtttccgaatgacaaaggagatgtagtaatacaatgggcatcaatgttaggttgtaggagttgggccacaaagaaggacatcatagtgttcactaatttgattggggtaagtctactcctaagacaggaagagaagacggagttattcggtcgccagagtttgtctttaatatgcctaaatttggttgaacgaggaggaattgggcattgcacggtaattcacccagactgggatgagttgctgtccaagaggtggaatgcaagtcaaactccattcagtcgcattgatttgaaaaatgctgcgcgttgccccaaaactggaatgcacatgatagggcgcgtgccttgcgggagtcacacgcatatcagtgatgctgatttaacgtctttgtcaatgtctgtcagctactggtcctcgaacaaaaccactttggacttcattgagacttgtgctaagttgactggtaaaccgaagaaagacatagcagcaagattgcaaggtacaaattggcatcatttgtttcacagacggaaaatgcaagtggtgaccacattccagcattcctataagaatggttgttcatgggagaaaactggatgcaatttcaaacctggtgatttagtcaccatttgttttgacagaggatgtgtggtaggtgttgttctagagagggccagggactatgtagttcagtatgagaccaggacgagcactcccttatatgcaattagtttgagtatgaacgtgaatgtgaagcacactactcttcgtagggccgtgacactcaaaggagtacaagaggaagcgtttttaaatgttaaaactatgcattattgccattcaattggattgagaaatgacattagtgaggtggctgaacgagagaaaaagtacgatagtttaattgtgtcagattttgataatcggatacatcaccaatttaatgagaaggatatcctcaagtaccaagaagcagacgccatcactatagttagtggcaagagtagagctgtgatggtgacctggattatgactgaaagtgacctgagattgacaatgtggcatggaaaaccgtatatcgagttgaaaactaaggacaccatattaatgtccattttggacagcgcgggtgaacgcattgctttaggaaatgacgaataccgttggatcccggagggagatgacactaggatgttgcgcgtatgtgacaccattccgcggttgcaaaaactgctcaataaaacagatgaaggattggtagaattgaaatggttgaccatgaacccacgattaaacccgattaaggttgttaagaagcacatgctcagcgagggtttaagtgaagaaggtgaaatggatgtagaggaattaaatctgttgttggccgtacccttaagtgaattagtcattctaacctcacgatcagaaatagcagagtggttatcaattagtaggcatatgtttgggtacaaattggacggtatttaccatagcggtgcaggcggcatgattaatttggcaggacctatagtggtatacaagaaaaagttgcttccaccttctatgaccggcggacatcttgtattggacataggcgatcaacactggaataaagtgcgagagcagtattcagagaataacttacgaggccttgttaagcatggttttaaagttactagcccggaatcagctcaacaacgagcgacgagcaatatggaacgattgaaacagtcaccattatacccaatgctagatgctgttagagatatgacccaagggagctatagtaagacccccctgacttttaccaacgtgagagcgcatgaagttgacaaggagatgggtgatctgattataccaaaaattctagtggacaccaacatgggatgggaactggagactgcccatttagaagaggtacccattcacgtcagacagatgtgggatgaaacggacttacttgattggaatgcaagctatgcaccatctaatcaattaaggttgaagactacactacccacaggtaagcgacgcaccgagagaaagatgatttacactaagtaccccattcaatccagagtcgtcttgacgaaagcggccaatcaagaatttaatgccgtcacaggtagaataggraatgcttctattattagaaagtataaccttaacatccagtatgagttgaagaatatgtgtcgtgaattattcgtcgctaattggcaatccatatgtgcagggtatcaagccgaccaagtaagccctagccctgaaaatatattagagtggttaagtgagaaaccagacggagtgaacattggagaagaattgcaatcatatattgaggacggattccaaacacatccaatttctgatgtcaatgttcacttaaagctagaggctttgctcaaagatcaaccagtggagagtaaccaggcacttaaagcgagaattattgtgtggcaggctaagggtatctgcgccatgtatagcggtacttttatccagattaagaaaagattgaagaaactattaagagctgaaattgtttacacagatggattagaaccaactgagatcgctgatgtagtaaggggaattaaagactttagtgttttgattgaagacgacctaactaggcaggatagtcaaactgattcagacaccattaatgtagaattcggagtgtatgacttattaggactcgataggagggtggctgcctcttggagaagagtgcacgagttgtggcgattcaaaggtaaagatgtccgaggagtgtggcaagaaatgaggcttaccggtcaagctaccacagcacttgggaatgcggttgttaatttggccgtacattggagactagtgtcgcagttgggaccggctatgaaaatgtatttgttgttgggtgatgacagtcttttcttctctagaaccactatagatgccaccagcctacggaggaacatagcagattactataacatgaagtcaaaggcgtttgtatataaagaccatggaacgttttgtagtatgatggcgtacaaaaatcctcaaggaggagctggaataggtccagattttgtgaggcttaagagacgtttcgaggttcccagtggagttagtgaaacaaacctgaccaatactgtcgccagaaagatgagttactgtttaatgcttggtaatttgcctatagtaaagaaattggtagaagatatgggctggccgatagagttacaacaatggtacgatccaagcccactgatagattctatttgtgacaagtacaatatgtcaagcgcagaagtagagagccatataacagctctagtggacatgataaggtccagaacaatgtatgaaattgattttgatgttatttcccaacggtaagaaaggatataacataatacaagcaacgccccccccc

SEQ ID NO: 822 - DNA, 1212 bp, Phytophthora cactorum alphaendornavirus 1
  source 1..1212: mol_type = other DNA
gatctaagactagccagtacactggccagtgggaagcggagaacagagaagaaggtcatcatgacgaaataccccgtgcaatctagggtggtgttaaccaaggctgctaatcaagaattcaacgccgtgactggcagaataggtaatgccaccatcatacgtaaacacaatcttaacgtggagtacgaggttaaaaatatgtgtgagacgtacttcaagccaggttggcaaagaatcgtggcaggatacaaatccaaccaattaaatttcgatgaggcaggattattacaatggctcagtgaaaaaccagattgcatcaaaattgctgatgagttgttgaaatatctggatgaaggatttatgattaatcctatctcggatgtgaatgttcacttaaaactagagtctcttttaaaagatgatccagtgcaagataacagagcattgaaggcaagaattattgtgtggcaggccaagggaatttgtgccatgtatagttttgtgtttattgaggcaaagaagaggcttaaaagtttactcaaatcagaggttgtttacacagatggattggaaccatcggacattgttgctgaattagcaactgttgatcaatttacacatttcattgaggatgatttgacccgccaggatagtcaaacggacaagaacaccattgatgtagaattcgccatttatgcattgttgggtgtccctatggacattcttaaatcctggaggaaagtccatgaacactggaggttcaaaggtaaagatgttagaggtgtgtggaaagagatgagattaacgggacaagccaccacagctctagggaatgcaatagttaatttggccgtacattggagattatccaaacaattgtccagcagcctcaagaaatacttactgttgggtgacgacggattattcttcacctcctcttccattgatgccacactgttaaggaggtcaattgctgactactacaatatgaaatccaaagccttcacttataaaaattatggcacgttttgttccatggttagttataagcactctacaggtcaaccaggaataggacctgactttgttaggttaaagaggagatttgaggttccaaatggtgtgtctcaggccactttgtcgaatgtcgtggcacgaaaaatgagttattgcatgatgctaggagatttgaagcccgtcagagaattgata

SEQ ID NO: 823 - DNA, 13363 bp, Phytophthora cactorum alphaendornavirus 1
  source 1..13363: mol_type = other DNA
gccgggtatccggtgacctcccagtcgcattaaatcacgaacagattcgcgcgttaaagagcaaattgaatttgaaaataacgcgcgaatacaaaaatttggaaaatgtcaaccaattctacaagaatagaatgagaatgaataagacaccctatgacattataccaatttgtaaagccttgccaaagaataagctggagaaagacagaggttctatcatgatggcagacttcttgaatccctcctcctttttaggtattaaatgggctttagctaataacacggccaagtggtttattacacaagaagctttccatgaactcaaagagactagcggattgtaccgaggcagtgaacaagacaatagaatcacccagatgaggtcccaatggtacaaattcttgcaaattgggaaaacagtggttgaaggtgagaaaaatttctttaagacttggtacaagtggttcaccagacaattcgggaacagtttgtatgagatgtgggcacaatataatcaaagtcccacgatcatgagtgacagaatttttgaaacgtttactggagttaaaatgttcatagattgtgagcaaacggaggaggaacaagtgtgtatatgtgcatactgtggaatgctcaaccacaaagagcgagacgatcaagttaaatgtggagcatgttttggagatctagaattgacaatcgagacagccactgaaggagaaccgattactgaattaatcttgaatatgttacaaggacacttcggtgccgcaatgctggaacaattagcactatgccaatacttggacttaggagcattaaccagctcagccattggtcccgcaatcatcaatcacgatttgatgattgttaaacaggtattggcaagagcaatgaacagagtgttcaaaagcccctctaatttatctaaccatcagattggtcaaatgaaatttgatttaggcagtgatttggctgtatttgcggagccttgtttgcatggagcatctcaaaccattacagagatttcctgggtgaccagtcaactactgatggatttgcatgaagacactggcgggctagtcatactagatagtatcgacttgttgagttgtctacgattggaatctagaagttgcatcgtaataaggaatattgaagaacaaattgttgctaaatgtcgtaagttactattaattaaccctaacggacctgaactgtcttacgccattggattgatgcaacacggagttgaagtaaccgtagttcaactcaatcatgatagtaaggatcttgatagtgagtgggatgtgattaacaaacaccaaactactactgtatcacctatcttctctagcgtagttagtcaacaatcaaacacgcaagtagaattctgctctggcaacaagtacacatcagaagaaggcgttttggtcatctcggaactaatcaagacttacaagttcattacggaagtagagttgatgataatgccatacatgactaaccatgtactggaaactgtcattacaagtcaaaataaatcaattaaagaatttgaaatccctatcataaacgaggaagcaatattgactaaaattggcatgcccattttatcggaagttgtagtacacatcgataggacatttatgaagatgctgttaaacaagaatattactggtaacatgacctatgaacaactcaatgaatatgccatctctgtatgtcattcacgttacgtattggatggaaaagagcacaatttcaagcatatcacctctctggaatgtcgccagcatagttatgtcagcttgatggtttctagattaactcacacagaggtttcaagtgcagtctctaccttggccaacaacaacaacctacaacaattattgagtacactagggttgacagccatgcaaggcatgttccactatcttttggaacaacttgctcggcctgggctgctagaactggaggaagctatcacgcaaacaatcaggctgttgaaaaccagcagcttgagtggggaagataatctagatgtttgggaagcgataaagaactggatcttcaatccagtgtcagagcactcaggttactatgttaagtccgattgggacatctctgtggagtatttcaattgcggacaccactatctcaattgtggtgacgtgaggatcttggatgtcaacgtagaaacatgtgaatgttgcaacatcatgagacccacccaagattcaaaattctgtaaatgctgtaaggtggagtcagaatgcaagcataactgtacccatgaatgttccgggaaagataatcacatttgtaacccggactgcaaacacaaaaagattaagtgtaattgctgtggtgtagacacttgctttgatgtatgtccggtgtgcaacaatgacgtaaaatggtttatcccatggaatcacccgggtccgttcaagctgctgcaaggaaaaccccacagacaagttagaaagaccaataagtttgtttctaataaaccagttgaagtggaacccaaacctttgtccaagcaaatttctgtaaagaaagaagagcccttgacattcaagtgtcatggagttccactaggtttgaggggttgtgatgaaaacacagtcagagataacgctaaagaaatccacgagttcctcaagacagttccaaagagtagaatagacaaatcagagttagaggtattatccactttaggattatatctgttgactcctgaagagttagtcacagcccctgagttgccagcaacattgactattggcgacaaattgggcccgatgttcgatggaaaagaacattctcgcgagccagagaatagtgtgagcccacctgagggtgcggaagacctggtgaacatcgaccatgagtacttgaacagagcttctgaagttcataaacgagccataattaagggattaagtgccgaatggccttacttttacaactatttcaaatccaatgatttagaacgacaaggagtcagtcacatcgtactggtaccattctcagagtcagtgcagtatacatctgaatggctgtcagttgcgtttgaaggaacagcttcaggaaaggacgctctatgtgggtacgaagccatcagattgggttgcccagaagtatcattgagagaattgagagattcttcaggaaaacaaaattggttcaccaatgaagatctcagtcgttatttgagtggattagacaaaaacttattgatattgagaaataatcaagtacaaatttataataatgacccgtacagttcagaattcgtatcaattaagtttactatggatgcagatgctggacattgggatcctatcactgtgattcagatcggaccttgtccgggacttcccaattggacaggaacaagtgactcggacaccaacgaacgttggttgagatctcaatcctgtgatattgatacatcatttgacaatctgacgatcaatcaaagactagaatttacgaagtttttgttgaatgaggaggttagcatgtctaaaaatgcactgtcggataaaatagtgttatctgaggacggaacaggttggatgatgcatggcaccactgatcgaagacatgatttaagagctgggaacgtgatgatgaatatcaaatcggatctcgctggcaccttcagtatgttaaacaacaccatcgaagccgtagaaaatagctttgagttcaatgcatggaacacctacactagagatataccatcagattgtacagctagggtacaccaggagatacgcgagtgcgtcaaaggtatggtaatgctaggaatgactacagaccgcagattccacgggattcctagaggctactacccataccatgttaaacacagcttccagagaatttcggacagattagtacgaattagaaatcccaaagaaactattaagaccggtgactctttgttattgctaacggtcgacaaaaattacaaggttgtgagagtagtcaggaagaaaaactgggtgaccttccccctggagggtgagagtaaacggggagtggtgaaattgctattacccaaaacttctttaacttccatcttgctgagggttgaaaagcttttggtagtgcagccggataccaccaagacaaaacagttattaatgcagtccaaatgtgtcttggctgcacccggttggggcaagtctacaaagattgcagcggaaatcgacgtcgaaactactgtggtgtgttgtacttctgaagctgtaaaaagtctcaaaaccatgggtgtgccatctaaccaagtaatgtcagtagaacgggcaatagagtctcaggtagcaaagaaaacattggtaattgatgagtgcacacaggttgattggttaactgtacacttacttgttacatcaagaaccgaagaaattaagttgtacggagacacgttccagataggatctgtagatttctcgggctccagtggagaccgcgaattgacatcttgtgattactacagcctcaacaaggaaatattccacaccacgagacgatttgggagacctcttgtggaagttctacaaatcctcaaccccaatttggacaccttggcctcacacaacaccacatattccgtgatcaatgtagctgaactcacggttgaagatttagctgatagcattaaaattgccaagccaaatgtggtgctaactttccatcaacacactaagtcgcaaatccaaaaattgattacgaaggcatctgaaggtaagttgcatgctaaggacgtcaagacggtacacagcttccaaggaaaagaagccagtagagtcttggtaatccaggatttcatcagcccttcaggcgtacatacagacaagaaatatttgatgagtgcactatctcgagctagcaaccacctaactttgttaacagtcaattcaccaatcaactcaaagaacttgaaggaccatttggagaaattgacgatcacaggaggaatgaaggacacactgacatctaaggtatcagggttggtcacggacttaggtagggcgtcactgggtctatctacttgcagaaccatagtggagtggttgatggggagctacgaagacaaccatccaactacactgagggtcaagtacctgccaaaacaacaacccacatgttcaagtcaatccatcagaacaattgatttgtgtactgaggatcgatcctaccgtctagaggataaattgttagctatcaacttttccccaatcccatccataactaatagtgtggaaactcaagtaatggatgaacaaccaatttccaaattcggtccgttaccaccgcttaagacctcaaccagagaagtcgaaactggctggtacctaatgctacataatcagatttctacacatgtgttaccaattaacatcaccagtagacatgccaacgtgcacataattgaagacggaaatgtcatccgactaaccattagcactcaactcttctctattagttcaacttataaaccagaattacaaggattcctgctagaatttacaggagttaagaaatttttcgcagacaccacactcaacttatttgcggaccgtctgaatgagcaggtgattaacaacattggagaactggttaaactagagaccaactatgttattgatgatctggtggatgtgccggacaatctgcaacaatacaacaactctaacacagacactaggagtgaatacgagtggaaaccgatgattgacagcgtttgcagcataagtcggataggagagtcgccaacttcagctgaccctgagaaggtgcaatacctgggtcacatggttgacaactgtactatccatagcatcaaaatagggatgacgtgggctaattatgccaaggtgtctcaaatcgtcgacttggcaagacgattttgttgcgaatcggagccacttcccttgatcaccaggtacggagtaattagtacaaccagatacaatggatgcaacccatgcgccgggctgttactcgtgaacgatgatgactggtggttgttagaaaatgattacgctaggatgggttctcgcagagtgacctttagtgaaaactgtgtgtttaacaagtgtattagactattggtaaactatttgggattagggcactgctttaactcgtttacgtcacaagatttggaattagaggaatttgatgtttatccttctggcgatgaaggatggtacacgaaccaagataaccttttattcatgagtttgttatgggagagagtcaaatgtgcagaatggagtagttcttcaaacaatcacttatcatgtgccgacgaatctgaggctaatcaaaaggttttaactgctgaaaaatcaagattagaaagtgaaggaatgatgctgcacaatacaacaatggaagataatctgtctagtgttagtggcagcattttcagttgccgtgatgcaggaggcaacgatctttactacatagattgtggagagacaatctatttcacaccagaagaggatgacagtgaagttatcgtcccttccaattggacacaaatcatgtttgacgaattgattgcccacagcgtgaggaagggtaagacaatgcgcataccattgtataacctcttacaaagcaggccacttaatttcggtgctgacgagttaaatgaaggactcattttgacattggatcaacataaatttgagaagactgcagtgtttgaccatctaacacaacgactgggtgagctcaaactcaagcagtcaaaactagccagagcccccatttacattggtgatttggactccagagaacgatcgcaacaactcagaaatgtctgccgcggtagaatcattgaaacttgtcccgaaacacgagggtacacaacaggtacagaagttctcaccttgttgcttggtcattacttggaggaaccatgtacattagtgctcaacaagacagggttgttattgagcaatagtttgtggcaacacagtgtggtagactccacagaattgatggctaacggtattaacaccctggccagaaccaaatttgctaaacactctgagaaaattatcgccaagatggagtataatttaacaaactttactcgcaatttggataaggacaaacttctcaagagcaagaaattggttgctagattgacattgaatgaggcagattctaccaatgcaaaccgcatgttcttggaagtaccttcaaaggaacaaacccttatctgtggataccatattttactagaaccgcccaaactggaagaaaaatggaagcacaatggtagctgtgtttacatcgtgttaccgatcgtggaattcaaacactcccaatggtacagttccacagaacacagtaattctgagatgatcttagaagaatacccagtaggcaagtctatgaagataaataaaataaatttggcagaggtgtttaatcaaacaacactaacactctatgggcataccagacccattaccattgttgggcacttgttagattacgtggtaatcaaggtaatcaatcatgctaccccttcagtgcggaagtattggactgtgcacccagtctgtgaacgcattagggtacccctattgtcgaccaatttggaggaagtgatgcatgaaaagcgattgctgaagtggagagagttcaattttgattctactgtgctacgtagactggagctcagatgtatgcgtccaggatgtaatttcaaagacctagttgaatatggcaaaactatgcttcacaccagggaatacacccgcctaggatcttgggataaagtcaaattggacagtttagatatgttaagccactgtcagtatgcatactacgttactaaacaaggagataagtcattgagaggcgtaatagggatgttgagtcaaatgactggtaacaatggatctttatacacatgggtgaacagattgggtttggataagttacttgactctacaattttggcttacggcaaattgattaaagaaaccggattggacatatcactaccagatttgggtccagagttggtgagcttggtgagagaattgataggcaaccatgagtggatttcagcagctgaagacgtgttggtacattacaaaccagagaaattttgccgccaagtctctctactgaagttcaacgtgagacaacaccaaggaggggccataggtgcgacttttggaaagatgattaagactacgttaaataatagttttggtcaacccaagaggacacacgaagtcaaatctgaaaatttgtcagagtctaagggtcctaaaacagaatactctgaatttacaaagcaacttacggataaatccagcacccaatctagaaataaacgagtattggtggtgagtcagggaacgagaggcgatgttgaacccttttattctattatgaatcattatagtgaaagagatgttgatgttgctttgtgttgtaacaccggttcttacaataaatccaaactcgacagccgcattaaattgatcagtctgaatatggatggaccagagctcgcatctttaatttctgaaggaagtgggatgacgtcatccaagaccatagaattgattaacaagtacgtggacacggtgacggaaggattccacaaattaaataagttggaaaaacctgacattgtcatgtttaccccccaaacccggtttgctaaatattattgcaaaaccatgggcattcaaggagtatcgtgtcaattgttcccatggccagtcgaacccaaagaaactttgaacaaattcacgacttatgtttcggaattggctttggagtcagtagtggaagtcgccatacaagaacgatttgttaaattcaagggcacgacgccaccccttaagcatttactgatgtacccgaaaattggattgtcaggtatcaattggtccagcgggtctgatatgaaattccttagtagtcctattgctgaaccaatccaacccagtactaacgcagattcagctttggtatcattcggctctttggttggctctaaagttatcaaacgtaccatcaatgctttgaactggctggaaggccaagaagttaaaaagatttatttggtggggttgctgtacgacaattggttgtcaggaaaacttgatcaaaaaattcaaaagaagattgccttgatggaagagcgaggtaaaaaattcgtcatccaggcttatgttgattacaaatctattgggaatgagttgtcattagtaattcaccatggtggagcaggcacgactaagatttgggcggaattaggagttagacagctaatttaccctttgtttgcagaccagtggttgtgggcaagaattgtgacggaatcgaatattggaatggttatcaccggttctacacttaaattgttgactatgccagacgttaactcaatctcacccaatccagtttcatgggcaaaggcaaatgctatcaatccagtagattcgattagtgtagaagagattttcgattggctgaatctggagaccaacacacacggttacattgacatggacccctatgtttgggtacatttaaggagtgttattcatgagtcattggacaaaatgactgatcaaggcatagtgaagaccataatgtctatagttaagttaatgagacccagcgaatcacacactacatcacctgaatcgtccagtgtcgtagagcaacccaaagtgccgcagaccaagaagagaattgtgagagtggtccgcaaggtaaccagaactaccaaatcagtggaaccatcaaagatcgtagaaatcataaaacaaccaaaattgcttggtgacaataaatccgagattccggagccgctggtggcgatcaagccacaccaaaagccaatgtccgaccaaggaatgagactaccacgtgtcactggaatttggggaaatcacatggagttttgctcaaagcacaacgtgggttttatggattgggaacaattgtcaattggcaactatcgcggggtcaagtacacatctagtcgagttttgtacgatccctccagtgagacacaaaatgagtgtgtttacttttgcctgaagtacttgtttaacggaagtaatgaattcctagatgaatggtcatccatactacactgtagaagctgggccaccatcacagatgtgaaagctctggcagttttgttaggagtcaattgtttgattgaaactgatgataaaatgcttctctcttacattgggtcagattacaccctacctctacgcatgaccactgtaggcagagtgggacactgtgtggttacagattaccatattgacttaactgataatgcgctgttgccggaggaaccagaaccaatgtcacagttgatcagaagtcacttccccatgtgtaaacgagttaacatgcctagattaggaggacctttatgcacgagtcatacacatatatcagaaaatgactacctgctactgaccagtccaatttctgaacttttgaagtctgatcaaattgtgagctggtttgaggtggctgcgcgcataagtggcaaatcggttatagatatacgcacacgttgtgaaggaaaaaatctagtgcatttgttcaatagaagaaaaatgcaaatggtaaccagtcgaccaaacgcgtataagaatgctgttagctggcacaagcaattttgtggatttaagccaggtgatctagtagtaagtgttggacccaatagtgttgatatatctgtcgcttttgaaaggaaggacaccatttgtttaatgttgtctgattctggagaacgttacactttgtgggtgagtttatcattaaatttgaacaacaaatgtgggccttcaaaacacgtaagcacccctactgaactcacagaggtgtttttaaatgttggttccatgaattattgtcactcgctaggcttaaggactgatataaccaaactcctctcaccaagtcaaactccagatactctggtggttgcggactatgacaatagggtgcaccacatgtttaaccacacagaaataattaaagcaattgacggcgacaaactcttaatcgtgacagaccgcacaagaggtctatctattaattggattaaacatcacgggccgattagaacaagtctcaggaaaggaaagctaacgatcgaattagagtccaaagatgaattgcttataaatataattagtataggacaacacaagatcgcacaaactgaaacttcattcatctggtacttgcggcaaaatgacgagaatagtttgagaacgttagacactatcatgaaattgaataaaatttgtcaagaaaatgaacattttgtgaacttgaagagattcactcttgataagagaaaacacccagcgaaggctctaaaacaattgttgctagaatttgatctgtcacaagagggtgagacggtcattgacgagttaacaacactaactagctgggataaagaagatttcaatctaataactgaccaggacgtgatcacgacctggatagctgaacacatggttgacacgcaatattggttagaggacgttgtttataccaccaagaattggatgctcagtctggttggtcctgtcctctttaccaagaggaccaaagcggaacgattggtgggtggtcacatcaaagtggtgctaccaagtcaacaatggagcaacgttgtaaagttccaagagtcgaataattccactccacagatagtgaagcacggattcaagatggctagggaatcttcatccacacccaacatggagaaattgatgaaacatgacattatgaacttgcttcccggagtgagagacatgatcgaaggtcactacacttcggaggaagtgacagacgttaatgtgagtgggtacagttgtatggaagaagaacaagatctcatcgtgatgaagcctaacatagacacacaacttggttggactctggattcagggttcgaagaggacatacccatgcatgtgaggcatatgtgggatgacactgaattacttgattggaacaatagttacgcaccaagcaatgatctaagactagccagtacactagccagtgggaagcggagaacagagaagaaggtcatcatgacgaaataccccgtgcaatctagggtggtgttaaccaaggctgctaatcaagaattcaacgccgtgactggcagaataggtaatgccaccatcatacgtaaacacaatcttaacgtggagtacgaggttaaaaatatgtgtgagacgtacttcaagccaggttggcaaagaatcgtggcaggatacaaatccaaccaattaaatttcgatgaggcaggattactacaatggctcagtgaaaaaccagattgcatcaaaattgctgatgagttgttgaaatatctggatgaaggatttatgattaatcctatctcggatgtgaatgtccacttaaaactagagtctcttttaaaagatgatccagtgcaagataacagagcattgaaggcaagaattattgtgtggcaggccaagggaatttgtgccatgtatagttttgtgtttattgaggcaaagaagaggcttaaaagtttactcaaatcagaggttgtttacacagatggattggaaccatcggacattgttgctgaattagcaactgttgatcaatttacacatttcattgaggatgatttgacccgccaggatagtcaaacggacaagaacaccattgatgtagaattcgccatttatgcattgttgggtgtccctatggacattcttaaatcctggaggaaagtccatgaacactggaggttcaaaggtaaagatgttagaggtgtgtggaaagagatgagattaacgggacaagccaccacagctctagggaatgcaatagttaatttggccgtacattggagattatccaaacaattgtccagcagcctcaagaagtacttactgttgggtgacgacggattattcttcacctcctcttccattgatgccacactgttaaggaggtcaattgctgactactacaatatgaaatccaaagccttcacttataaaaattatggcacgttttgttccatggttagttataagcactctacaggtcaaccaggaataggacctgactttgttaggctaaagaggagatttgaggttccaaatggtgtgtctcaggccactttatcgaatgtcgtggcacgaaaaatgagttattgcatgatgctaggagatttgaagcccgtcagagaattgatagccaaatacaactggccaattgcgcctaccatgtggtacgattatggaggcct

SEQ ID NO: 824 - DNA, 1192 bp, Phytophthora cactorum alphaendornavirus 2
  source 1..1192: mol_type = other DNA
attcaatcatgttaccagttgccttaaattggcgatggagcgttacccgactattgctagaccgtctataaccaaggactatatttctgagttcaactcaatgtcaaatagacaaggtgcggtgaaagaatatcaaaagaaaaacttggtagtagacgctgaactcaatatgtttgtgcaaaactactttttgaagaatttcacagctctaagcggcagatataaaggtaatgccattgagtttgatatatcggcatcaattgaatggtcattgaaacacaattttccagctgaggttatacgagacttaaaaaatttgcttgaccaaggttttgagaaaaacccattaaacagtgttgagttacatgccaaaacagaacaaactaccaaagtcaacaaaatagcaagatggtttagtgaagtgattagtagatctattacagctagttcttattgtattgcagcattattttcacctgttttcaccgaagctaaaaaacgattcaaagatagcctgcgacatccgttctattatgttgacggaatgacgccaagtcaaatcaattacactataagttcaatagaaaacgttcgatacatcatcgaagatgacctcactcaacaagatggacaaacttcacacggaatcatcgcagtagaatttgaaatttataagttactaggtgttcatgatgacgtactgaatatatacaaccgatgtcatcacctatggaagtggaaaggtcatggttcaagtggtatgggtgatgccatgcgattgacaggtcaggtaacgacagcaattggtaatgctatcactaatttgattgtgcacaataggttcgtagcacgcaataaatcaaacatcaagtttttgggttttttgggagatgatattattttcttcagtaatcgcagtctgaatgttagcaaacatggtactgagaccaaagaaatttacaacatgataagtaaaattactcaccgagaacgggttggtggttttctatctatggtagttcatacacttggtgataaaccagcaatttgtccacattacaaaaggtgtagacatcgttattcagtttgtaactatacatttagtggtgatgaacgcatggaaaaaatcaataataggaccctttcatattgttttatgctcgggaacatcaaacaatcaaaagaaatgcga

SEQ ID NO: 825 - DNA, 12586 bp, Phytophthora cactorum alphaendornavirus 2
  source 1..12586: mol_type = other DNA
aaataaataggaataacatttccatcttccagtacggttatgatggatgtggtattcctaaacttaccaaaaaacaatgcgagtttaaagactccatgtttattggtagcatgtataggaattattttgatcctggacatgcaaaccatatgggactcatgcaggtgagcgacatatacaattacaaacatgtattgcacacagatagaccattcaatcctaaactgttcgttgccgatcaaattcgatggcgtacatcgtttgatccagaagatcacagtaaattcattcgcacttatggtgcgccaacagaattgaccaaaccagctgcaacttcttatccattccacaagtttagacgtgaatttatcaagtatgtgaaaaaacaatcacgcaaattttcaatcacacgttcaaaagttcgtgcggacctacttggctggttgtcatcacgttcagactacataatgccaggtatgccaagagctaggatcttcaatggccaagaacaatttagcaagggtttctacacgaaatgcaattgctgtggcgccataagtcacatgccaatagatgactggttatcaaacattacccttggcgaaatgccaaccagagaacaagtgtgtgaaactatcgaacaaatgtacaatgcagaaggaaatggtatcactattaatcaagtggatagggttgaggatcatatcaaatgcggcctcggattggaatgtttcaattgtggtgaaaacatcatacagatgaactcactgccaccctacgattatgtccaaacaaagtttattgaagactatggtatcaatggtacaaatatcgaagaatttaagaaaatgttgtacttggataaccctcctccagacgagttatcagcttccgcgacagcatatgacatcactaaaaataaggatattgccgcatatttacaacgggcggacagaaaatatgctaactcagcatttgctatcaacgcagaattaatggcgcgcatgtctcaacgattcactacgactcaatttgctcgcaatcaacacatttctaacaaaacattatcacaagttgaactggaagaagcattcatgttgaccgaagccagtgcacttttcaatcatgctgtttatatccaaccaagtgctattaacgttttccatgctttggcagatggattcgagtgtattacaaactccccgtggttcacaaatgcgaatatcaatttgtctaatactaacagtaacttaatgtacactattatttctgcatttagcaatgttgatttggacaacatttttgtagatcaaaatttcgtattagtgccaaattttgattcattgaatgcagaattcgttcacaataatatcgttcatttcgatgtcactggtagcgatctgccatctgaatggaatttgcaagcttcaaaacttatttgcaaatcatcaagagtgtcgcacaatagtgtcaactacctgattaaaactgtgagaactactaaatatttccaactagtgtacatcaaacaccacacgaagggtgaagtgcacacaggtaggctcacagctggtttaggtgaacttgaagtgaagttacccacaattgacgcaaacagtatgctcaatactttgggaatttatggttcaaaatggacaatgcaaacaattaacaccgatctagtatacagaatcttgataaatgcaatcaccggtaaaaaatccatcgaatctattttgacatacgttgcaggcactgcaacaacaaagtacagcgttggtggtaaaatcgtcgacatttcttccacagccattgttgaaggtattcctgagttgacgtatgtattattggtcctacaagatcaagagagaatcaaccgatggtgcgcatggaactacattggacatgtaaacttgtatgatctgcagcaagaactacacagagcagtgttctctaaaattcttaattggttgagattgtatcaaccaacaattttcaaaaatgttgaagatttcaccacaaccaaacatcaagccactttctccagagatagcgttctattaagaactggtatggtgccttctttggaaaaaatccaaccatttaatctcattttgaaaacgaatgataccaagcatttcggaacgtcaattaagtccaaagcgtgtgttcatcatactagcatctgcaagcacaagatggcattaaattcgtgcgtttgctgtggtatggaatcacaaccaaacagtaggttctgcaattgttgcgtaaacacagttgtggaaaaacacgactgttatcatgaatgcttacatgaacatagatgcacagttttcaatgacacaggtaagtgtgaccatttcaactattgcaattgctgtgagagagaatactgtggtgatatctgtaaatgttgtgaaaagcaaaatgcgatcacagtaaaagagattgttcaaaaaccacacagacatgagaagaaaaaagtgcaaatgacaacacaaccaaatcagactcgattggataacgccattaagcatacgaaatcgaagtcaaaattcgccacaactatcaagcactttaaatttgaagaagacaactttaagttaagaaatattcatgatcttaaaaccgctaaagaattgctactcgtttctactgacggaacatgtctgtgtccgtatgttagcatttgtggtgtctaccattgtttgcgcgagccatttgaaggtatacaaattgtggacgccatcgttcaagagaattattgtgggatggaatgtatttcgagacaaactgacgtcacggtggaacaacagttcaaagcagtgggtaccaagagttctactagcttgcaagatctgtatgacatctgtgaatatttctacttaaacgcactcattaattatggtaataaccagactagtattgtaaggtacggtaatctgttggacccatatatcatcatcacacacagcgaatctatcgatagtacaagacagcgtggacattggtgcatcactgtgccacctaccattacaacattcccgaatggctatttcaacaacatggatctggattgtcaaactacgcgtaaaatgcgtctcattgatacgttttcagtaagcataacagaacagataagttttacgcaaaaactgagatcagcattacaagcagatatcggtattgatctaatgcaaaaattagaaatgccaaaattggtgttcaaatcagacaaatattatcttacgaatgccatgaccactaatatcagaagtggagccatcaacgccattgtacctaagaaattttcttcctactgtgaaatgtgctttaacaatgacaagatgcctacagaattgttggcattgactgctttccattcggcaactagcagcgcagaagaaataatcgaaaatagaattttagatactatacgtgaaattgctagatacaagtcagacattgatacaggtaaagcaaccatagaggcagttatgcagtgtgacaccacaggaccagtcctgcagctcagtccacaattgcgtgttttcaagtcattggaattagtgcaagtggaattcagtagcgggaaaaaagaactagcatgcactagaaaactgcaacgcgattctttcattgcaggttttgaaggtagaatcatatctgttacctcatacaggtcatcatttggttcattggtgcgtagattgatttccttattcaacgcactcaaagactgcatcaacatcgagagtgccgtagtcgaaaagaatgtgaatggtatcggaggtacaggaaaatccacctggatcaggcagcaaactatttctaagtgtgcagttttgtgcaagctcaggggcaacattaatagaatgaagttgttgaactttgattatgtcaacacaattgagcagtatcttattgatagaccagacattaacaacattattttggatgaaagtacacttgtggactctgcagaatatattagtttgttcacaaaaccgaacatgcacgtttggttgttcggtgataacgatcagatcggagtcgtggaattttcagaaactccaggttggaccaaactacaaaatgcccaagaatactgtgggaaaatcgtagagaattggtcaaaatgttacagaataggtcaaccgctgtttgacgatgtaattaagaaaatctacccacacgctgaaagtgtcgcagaccatcaaacggtctatgagttacaccattaccataatgacaccgagttgttagatattatcaaagacacgagaccacaaactatctacactttctacagtaacatgaaagcaatgctagtttccaatttacaaggggaaggttgtgaaatcaaaaaagtgcatgcagatcaaggctctgaagatgaagtttgcatggtcgtttactcatctaattcagaccaaccggaaggaatattaacagataggaaatacatcaccacggcgttcacgagaagcgtacgcaaactaattgttgttacaaaacatgattacattgaatcgttgagtcaaattgtcgacgcaagtattacaggccgtggcggaaatgttggaaagttgttagatgactttggaagactatctaggaacattactgatctggagattccatttatcaaatctcaaatattcgagaagatgccaactgctgaaaaagtggaagttagcacagattccatttcagtagtgactgtgcataatggagttagagtcagcattattgtggattctaatggtgtttacggcggtgactgggtttccaagggcatcgtgagtttaaatagacagtcaatcgtcaaatctatgaaacaactagaagaagaaaaactccatgacgatgcgtttgaattcgagggtgacatctttttagattcaacaccattttcaccaaatagcattgtaccgatgtcgaagcctagtgtaagcaaagtgtatagattttcagcgtcattttggagcttttacatccgcatcatggatgctacgattctcctgcaatcttgcaacaagtctgcagaactgtcgcttggcaatgaaacatggcatgtcaaattgtttaatggttgttcacttttcgctgggtccatttggaaaaacaaaaaatttggcaaatgcacaatttcatcgggtcacgttcaaaatggagactccctgttgtccaacttaaatagtcatgtgcggactctatccggagattttgaagcagtggagcaaatagtgcgcttaatgaaagataatgaattgcacaaaaaattcaattcaagttccaaacacttattcaaacaaatatcaaacagaactgcaactatgctcaaacacaacacttgtaactttgggtgcatagagactcatgctgaaagttcaaaacaccataacgcagaactctatgataagtttgagtcggaaaatttaggttatgccaaacgcattaattatcaacctatttcaaaactagtgtatatggaagaaaatggtaatacgttaatgtacccaggtcttgtaccagtaaaaacgattaacgatgttcactctcagttaatgggaattcaaggtttagatgagagttacgatgcaaatgtgagtaatagattgataatggataaaatattgcaaaggaaaatccatgccgagcgtgctagagatttgcagtgcatagtaccggaaaacgtattcaataattacagtggcttgatcgctgatgtgatcaatgtcaaacaattaattaaggtcccaactgcctcatttaatgactctactggtagcattttcgaagcggtcagtattacatacatgatgaaagtattacgttgtaagagtctggtagtgcatggtttcgatgctgttgtggtaactttgcaaaactatgaaagcgtacgcattcctagggatgagcttcaagtcaatgaattagcatatttagaaagtgtgaactattcgaaaattcaacaccttaagaaaatgctttcagatggcattgctggcaaccaaaaactagatacggaacggaaattggctgagatggaaaatgtagcaccattcatcattgaaaacgacgttaacaccaatgtacacgtttactctttttcgaatgctgtagaacaaactgcagagcatgtgtatttcttgaaaactgaagacgacgattcagttaccgtgaaacaaggtggtcagttatacatgcgtggcgaaacctcgttaccgataatggaatcaaatcgattcttaccacatgttgaaatagtcagatttggaccagtttcactatgtaaacttgtcaaaaaacggcaaacaaaactcgtatgggactataaagacacaatgaaattgaaaagattctcaattggcaaaaaccgagaaaaaattgtggacattccagcaaatttatacaccaaattacaagcacgcgcaatgtatgataatgacattactatcgatgacatgctagcgtacgcaagaaatttactgagcacaatggtgtacacaagtggtggtacatcgttagttcatgcaagtcgtttggaacacatagtagaatatgtcgcagttgctatgaatgtagtgaaaagaaataaagcctatttctctgcacttcaacattacacaggtaagtctcaaggtgggaatctgaaacaagaaatttgggatgtcatattatctagggttaaaacttggttgatggaaaaattagatgagtttgacataccagacatgtggcaagcgttttccgagtattaccttgatggcgaaaacgagtctgttgtaatcaaacttatcaaaacgctgactgacacggatattgtgcaaatttttccacaaaacaagctgataatttacgatcagcaagtatcagacgccgaattgattactaggtggaaaatcaattgccctagtgggaaaaaattagtggaaaaacgattcagcaatcaatcaccatcaaaaccgacattcaaagaagaaacgtcacaccatacagagtcaagtacaaccaaggcagacgaaagttcatcattgcgccaagagatgctcaacttgatgagcagtgttgagtcgaacataccagagtacgttgaagaagctgacacttacacaagtgatgcgaagcagaccggaacaagcggtggttcagtgcaatcatcagagagtgacgatgatctttgcgaagtggaaagtgttgaaagtgacagtatcatcacaaaaagcattgtttatgtagaagaagagcgatttgaaaatttacaaactacagttctttttaacaaattgtcagaatggctgctgccagatctaccgaaaccggttccgtacatacatgattgcggacagaaattaccaaactttgacacggtcgagcgtctgaacgatcaaaacaggttgttgtggcataaagcacacacatggttaaccaataaaggttataaattcacaattgtgaaaggtacaatgctatcagcgatgaggtatgggttgttgttaccttcgaaatgttatgtagaatacatcacagaaagcacgaaaacgcaaggtatctacaacaattgggtagatagtgattatgatatcatcatcttcattagaggtgcaaacaactcgcaacagaatttggagatacttaatgacatggcaagggatatcggtgcaaaagctatgttccgtggtgaaaattactcaactgctgcactcaacaactaccttgatattgaactcaattacaacacacatgatggaatgtgggatgtgttacgagaacattgcaacggaaaattgaattttgcgagtgttgatgtgggtattgtgcattatgatgataactacgcatattttacggacgattgtttgtggcaacatgctggtttattaggcccgtgtaaaattatcacggcatacgtaatacctgctgatgatttcatgatttcaatcgattataggacagtcactctttcaccaaagtggttactgcatttaagtggcattttgcaaaccacagatccaagtagtacccaacttagaagtctaatgtaccctcacgcagctagttttgatagtgcagctatgttgagttgcacgaacattaaatacgacgatttgagttgtttacttgtaatgtgcgcatgcttgtcacataccatgaatccattcactacacttattgaaacagacaacagcgatatcactgacttgcttaattacactacagatgacgtggaatatatcaattcgatcagcagtactagtgtacactcaaaaacaaagcggaagaaattgtgtgcattctttagtggtagcaacggtgattttgtaccattactcaatgttgtttacacgctagtgaacagttttgacatcacatgtatggtacctggtgatttccatctgccactacctttaggagtcgcaagatttgaatattgtgattcaaacaaacatttagtacacggtggtgataattctgaatcactaaaaaagacaatatcatacatagctgacactatgcgtgccggaaagttcgaattcgatatttcagttggcatgttttttagtaatgaaatagagtttgttctagtgaaagaaaaatgtgtaaaattgtggccagtgatatgtgacccatggaaaggtgggaggccaccaatgtctaagtttttgcggggattaactacattcaaacaaaacaaaaacgtgcaggaggtgggttgtgttcctactgggctgagtgtcaaagaagtgaatcttggttggccaatgtcagaagccactttcaaaccagatgaaatcactttaaaattcattcacttttcacacaaattacgagcaaagttccatgtgataacattcggttctatgcagttcacagagtatcaaaaaacagtacaagcagacatcaatcaacacgaggaatgtaggattctaatttgcaccaattattattccaaagatgaagtggtgcatcacgcgaatataacagcaaatctttctgaaacattattcactgatcggttggtgattgtgaatcgcttaaatttcatgtgcattaaagaatacgtagtttccatcacgcatcatggtgggtgtggaacaatgttaacaggttatttttgggacgtaccacaaaaaattgtaccgattgcatatgagcaatttgataatgcaaaattatacattaacaccccaaaattatctattgatttagcgaaagagtgtgaaacctatagactcggtatcaagcaggtgtttgatgtggacattagtatgtctgtggttatggaaacgtttaacaatttgaaaatgtctgaagataaagtggaattgatgaaatttgaattcaattctagcgctatgacagcagaattgtcacagatgtctaataaccaaatcatgccgatagaaaccacgattgattgtgttaaattatcattacttaaggtttgtcatgacaaagagagggtagaaaaagtgtataaccagtggtcaaatgtgatgtcattcagttctatcactgatgtgatttgcttagcatcagtgatcaaagaacctatatttgtttcgcagaacaacatctgtgttaaatttggtggttttcctgtcagtttgttcggtggagatgaagaatcctatggtgttatgattactaatgatggtagacattgtaacgccgcatcatcaaatttaggaccagtgcaaatattcccaatagaagcaaactggagtgagatcccacttgtgaccaatgacgtagttggcagcattagtgaattgatgtactgcatgatcaatgaaactgatcacccattgaatgtagtgtacaaaaaactgcaattagctaagcaatttgatatatcgagggtagtattcacagctattcgtaaatcgcaatcatgcgtgctcattaatacaatggcaaactttgctggtggttttatcacagattcattacaaccttattacatttggactgtactcagtaattacggtagttttgcgtgtctaactctaccgtcacaacaaggaaacatttgttacgctctacatggatatgatgtctgcatttcaccaggttttgctattcggcatagttcagtcaaacaattttttgtcagacagatgcaaagtacgaagtatagtagcgaggttagtgctatcaatcaatctacacttaaattttgtagggctaacggttatctagttaacaccgtgactgagggaccagcaaatacattgtacgtgtacaacacctggaacagataccatcatctggagaaggaaagagaaaaaattatgtattctaaaacgttagtgatcattccaaataacattggtgaagctaaaatagaagaattacgaaaattcgattgtcacagaagagtgattatgaagggtgactttaaaactattgtagaaacgtcagaaatgcacatgcaggtcatgatgcgagtgtataaatcactcaacatatttttgtccactatcggtaataatataatcatcattaaaaacgttaagaaatctatgttgattgaattagacgacgctataaatattcaagtttcagatagtggtgctagaattgctctatatccaaatttcaatgaacaattggaatggccacaatcttcaactttaaatgaacttttcttgatgagtggagagataccaactgattggttagtagattcaattagatcagcatggcatttgatcggtgatgaagatgtcctttccattgtcatggaacaatcatcggtcacgaacatggagttgtcaacagtagttaaagttattaaaggcaacgttttaatttcggacaatttgattatttttcccaacaagtttggtatttttaggcgtgttataacaggtgcgggcgtagtagcttcaaactggatgtcaacagaaagagacatgagatcaataaataaatttgaaactgtaactgaaaagacaacaactccagccgtagatacatcagtcttgcatcaattcctaggtgttttcaaaactgatagtaatgaggaagtttcaatggatatcattagtcaagttattaacaataaggtcgtgttggatgcgtatgaaaacaataacggagaagtgagtattgaattacaaaaattggatgatattcctgatatgaaatcaatggattattgggaaaacactacacaattacaagatgatgttcacatcctacccaccaacagaaaattgatcatgaggaattcgttgcaattcaatcatgttaccagttgccttaaattggcgatggagcgttacccgactattgcgagaccgtctataactaaggactatatttctgagttcaactcaatgtcaaatagacaaggtgcggtgaaagaatatcaaaagaaaaacttggtagtagacgctgaactcaatatgtttgtgcaaaactactttttgaagaatttcacagctctaagcggcagatataaaggtaatgccattgagtttgatatatcggcatcaattgaatggtcattgaaacacaattttccagctgaggttatacgagacttaaaaaatttgcttgaccaaggttttgagaaaaacccattaaacagtgttgagttacatgccaaaacagaacaaactaccaaagtcaacaaaatagcaagatggtttagtgaagtgattagtagatctattacagctagttcttattgtattgcagcattattttcacctgttttcaccgaagctaaaaaacgattcaaagatagcctgcgacatccgttctattatgttgacggaatgacgccaagtcaaatcaattacactataagttcgatagaaaacgttcgatacatcatcgaagatgacctcactcaacaagatggacaaacttcacacggaatcatcgcagtagaatttgaaatttataggttactaggtgttcatgatgacgtactgaatatatacaaccgatgtcatcacctatggaagtggaaaggtcatggttcaagtggtatgggtgatgccatgcgattgacaggtcaggtaacgacagcaattggtaatgctatcactaatttgattgtgcacaataggttcgtagcacgcaataaatcaaacatcaagtttttgggttttttgggagatgatattattttcttcagtaatcgcagtctgaatgttagcaaacatggtactgagaccaaagaaatttacaacatgataagtaaaattactcaccgagaacgggttggtggttttctatctatggtagttcatacacttggtgataaaccagcaatttgtccacattacaaaaggtgtagacatcgttattcagtttgtaactatacatttagtggtgatgaacgcatggaaaaaatcaataataggacactttcatattgttttatgctcgggaacatcaaacaatcaaaagaaattgcgatgcagatcaatcccacggttgatataccagattggtatgaagtaaatgatgcaataattgctaatgctttatatgatcaatctacggaattcatagtgagatcacacttatcatctatgctatcaatgatgaaaaacagatc

SEQ ID NO: 826 - DNA, 1209 bp, Phytophthora cactorum alphaendornavirus 3
  source 1..1209: mol_type = other DNA
atgagatcgagattgcaaccaaacagtttgtcaaagtgcatcaaaatcgcaatggaaaagtaccctactgtggccagaccttccatcactaaagaatatctagctgaattcaactcactgtctaacagacaaggtaaagttgttaactattccagcaaaccattcaaccttgacttggaatttaaactattcacgcagaactacttcccaaataatttcaatgcgataagtagtaagtataaatctgaaacagtaagtttagatgtggatgcatcaattaagtgggtgcgggcacataatttcccaaaaagagtgataaacgacctaaaactgctgagtgaacagggctttgagcgtttaccattatcaagtgtcgcagtccattcaaaaatcgaacaaaccactaaactcaacaaattgagtaggtggttcaatgacgtggtgagtagatctattattgccagcacgtatgcgatcgctgcattgtttgcgccaccctttctagaactaaaaaagagattcaaagacacactagtgacaccattttattatgttgatggaatgacaccattgcaaattagtacccttttgtcaactatagaaaatgttaaatatgtgatcgaagatgatttgacgcaacaagatggtcagacgagttcagatattattgaattggaattcaaaatttatgaggcattgggattggatttagatattctagaaatttacaagaggtgccatcagatgtggcgctggaaaggtcatggtattcatggtctgggtgacgcaatgcgtctgactggtcaagtgacaacagcacttggtaatgcaattaccaatttaatcgtgcacaacagatttgtcgcacgcaacaaacaccacatcaagtttctcggtttcttgggtgacgatgtgatatttctgagtaacagcatgcttaatgtatcccaacatggcacagagacaaaagagatatataacatgattagtaaaataactcacagagaaagagtgggtggtttcctatcaatgattgttcacactttagatgatgtaccaaccatctgtccgcatttcaaaaggacacggcaccgattttccgtgtgtaattacacctttactgctgaaactagagaggaaaaaattagcaacagaacactttcctactgtttcatgctaggaaatattaaagaaagtgttgccatagct

SEQ ID NO: 827 - DNA, 12675 bp, Phytophthora cactorum alphaendornavirus 3
  source 1..12675: mol_type = other DNA
acacagccgcccccacgggggcggcaataaatattataaaataaacagaaacaatgtacaaattttccaatccggattgaaaaactcgaagctccccaagctaacgattaaacaatgcgagttcaaaaaatcaatgtacattgattctgccttcagcagtgcttatgctgaaggacatctgaatgatctagacatcactcagatgatcgatgtgtatcacaacttggactaccgagatgatgccattaatggtcggcaaacgtacattgcagacagaaatttcaacccaaagtatttcaatggtgacaaatggcgctggagaaacaactactacggcccaccgaaagccgaaccagaaccgaaacaaagtattgtacctttccataagtacagaagacagttaatgcgatacgtcaaaactggttcaaggaggtttacgggctacagacaagatctgttgggttggctgtcatctaggtccgattggatttactctggaatggctgtcgagcgcagcagagtgtaccaaggtaaatgtgaattctacaagggtttctatgctaaatgtaaccactgtggagcactcagttatatcccattgtttgcaacactatcgtttggactaggtggggatgaagctaaggttgcaagtttgacgaaagatcaaatttgcaacctattggaggtgttctataacaagaaaacaaccgaagatggtgcattggatctcgatcctgagatttatggcagtgcaatgggtttactcacaacattcttcggtgcagctaaacttgaatgctttaactgcgataaaactattttcgaaacaagtcatgaatcaccagatggttatgtggcaatgactcatatcaatgactatggaatcaatggtactaatattgatcaattcaaaaagatgttgtatttggataacccaccgcctgaagaattgcaagccgctacaaaagcctatgatgtcaataaaaatagggatatttctgcttacttacaacgggcagatagaaaatacttaaacacagcattcgcgacacatgcgggcaaactagcagcgcttgcgcaaagattcactactgcgcaattcgctaaaacacaatatttgtgtgagcaagaactttctacgtatgagatgcaagagattatgttattagcagaagctagcagtttgtatgctgctgattgctacttgcagccaagtgcactcaacacgtatcatgctttaagtgatggtttcgcctgtgtagtgaattctccttggttcaccaccacaaacattgtggtgccaaacgccacagacaactgttctcacactgtgtttagttgctttgataatgttaatgtagaccatgtgtttgacgatggtaatgtgttactgttcccgagtttccatgcactgaattatgaccaggttaacggtaatactatatacttacctgttgcgggtagtgatttaccatcaacgtgggattacaacgtttccaagacactctcagacgcgtccgcaattagacacaacggcaagaccctgaaaattaccacaattaggtcgactgaacacttccagttagtacgtttcacattggtgagtgataatagcacaccagcaaaaatgcacacccgcctactagctggacaaactacactgcgcgtcaaattaccaactattgactcgaactctgtgctgaatactttgggtctgtatggtagtaagtgggaaatgcaaactgtaaacacgaacttggtgtaccgcattttagtgaacgctatcaccgggaagaagtcaatggaatccatgctcacttacatagcagccaccgctaccaccaagtacagtgtaggtggtaaggtggtagacattagtggagtacaacttgttgagggtatacctgaattaacatacgtgctgattctcttacaagatcatgatcgtctaatcaaatggtgccagtggaactttattggtaatgtgaacttctctgatttgcaatccaacatacaccgagtagttttcagtaaattactcgcgtgggtcaaggacatgaaaccaaaactttatgagaaaattgaagccatgacgacaactaaacaccaaacgatgttcagcagggattctatcatcttgcgcacacacgcagttcctagtttggaaaccatccaaccattcaaattgctagatgccactaaaacatatagagtaactcctcatcaaagttcgacaatttgtgcgcaccacccgatcggttgtgagcatggatacacttccgaaccttgtatctgttgtggtctacaacgtaaaccaaacagtaaattttgcgactgttgtgagaacaaagaacaacttgatcacaagtgttatcacacttgtgatcacgttcacgtttgtgaagagaaacgtaatactggcaattgttcacaccgctcggtatgttattgttgtagactgcctttctgtggtgatcgatgtttgtgttgctttgatgaagagagagacagtaaggaaattaccaaacctgtaactgtcacaccagagcgcgctaagacaacgacaacaaaaccaaggagagtggaattcaaagcacaagaaccaaaaccacacacaaaccaaactcacaaggcgaagtttgcacaaacaatcaaaaaggtgcaaatagatgacgagactattaagttgagaaatgtcttggatctaaaggacccaaatgaaatccagattgttagctcaaacggaagtgtgttgttaccatacattagtatttgtgggatttataactctactagaaagcaaattgagccatggcaaatcatagacccgattttaacagataaatactgtggattattatgcattgaggcacaaacagatctcacgctaggagaaatgcaaacattcactggattacaaaaagaaatagatatcgctggtctgtatgatgtgtgtgaatatttccatctcaacgcaatcatcagttacggcacagatcaagtatccattgtgaggtttggaggattactacaagcatacattagtttggtgcacagtggagctgtgggtgaaggtagacaaatcggtcattggagtgttggttctcccgttgaatttaccagtttccctaaagggtttttcacgaatgtcgatttcgacacaaccatcacaaggaaaatgtcattgccaaatactttcgaagtgaatatgtcagaacaaatggacgctacccaaaaacttaaagcagcactacgtacatcacttggcatggaagtgagtgaacgcttgcaaatcccagtggtcaaagttatagatggagtgtgtactctcactaacggtgctaaaaccaatttgcgcatgggtatagttaatgagactgtccctgatcgatacaaagcattagcagaaatggcatttaactatgaaagaacaccagttgagatgcaagccacaactgcattccacaacacagaatctgaacctgcagacatcttgcataacagaatagtggacactcttagagaaattagtatgcacaaaacgaacttagctactggtgagatgtcaacggaggctacttgtgaagtgcagtcattgagttcaacagtggaaattccagcggagatgagtgtgtacaaggcactggatttagtaaaggtaacttacaacgatggatccgacagttttgaggctgtgaaaaaacgtagcggtacgtcttacatagcgggcttgacgaaacaggtacacagcatcacttcttatagagcgtcttttgcatcactaatacgtaaattagtatctttattaaatggtctccactttatcaaaaactaccacacccacgttatcaagaaaaacgttaacggaattggtggtactggtaagtccacttggatcaagtcggaaatgaataagaattgtgccgtcttgtgtaaattgcgatcaaatttgaactcattcaagaatttgggtttcaggtacgtggggtcattagaacaatatctgattgaccttcctcctatcaaacaaattgtgctcgatgaatctacattggttgatgcagcagaatttatctgtatgcaccatttggaaggcatggaattctacttgtttggtgacaaagaacaaatcggtgtcgttgatttctcgcagacacctggttggaagaagctccctagtgctcaagactattgcgggaaagagattgaaaactggactgtgtgttatcgtattggagagccattagtaactagcgtgttgtcccgaatttacccaaacatatcaacaaaagctgatcacccaacgttgtgttctctgacacactttcagaacttagaagagattgtttccatggtggagctgtacaaaccggaagcaatttacgtattttacaccttgcacaaaaggttgttgacaggattgcttaagaaaactggtgttgtggttcgtaaaattcatgccgaccagggttctgaagtttcaactggtatagtcatttacgctggtctcgcaggttatccagagggtatcatgttgaaccgaaagtatattaccacagcattaactaggtgtagagatcatttaatcgttgccacttcacactacgacataactgagattgaacaaattgtcgacgcatcgttgattggacgtggtgaaacaacatataatctagttaataatgcgggtgaattaattaggcctattgaaatgcttgaaattcctttcatagaatcaaaaatcaaggaacaaagtgaaatgattgaatcggtaaaagtctatagggatcaaataaaaatatgtgcacaagtaaagggcttgaaagtcaatgtaatcgtggatgctaatggtatccgaggggatggttttatgtcatcaaaacttgtctcccttaacaaatcgatgatcctgaaagcaatgcacgatcttcaaacggaagaagtacgcatgggcgctgaaatagtagatgatgaaattttttacgatgttgaagagcacatggtagaagatgacaagaatgttccaacaagcggtgtgcttcaagccaacgctcacgcaatggtgtctaagtcatacagattcagctggtcattctggagtatgtatgtgaaagtgttagacgcagcgattttaatgcagaaagcgggcatgattccatgttttaaaattgccaaccgatcctgggtggtgaaagtatacgatggttgttccctattcgcaggttcaaagtggacgtgtgaagcaatcggatattgtactatttcatctgcccacgttcaaaatggtgattccttgttgtcaaacttaaacagtcatgtccgcacaatagttggtactgatatgtgcgtgtctgccatcgtttcactgatgaaagataacgaattacatggtcaatttggagctgatacaacacacctagtgaaaacaatcatgaatcgtactaaaactatgttaaagcacaacacattgaattatggttgttttgaaccacactcggaaagctcacaatctgaaaacgaaccattgtacaccagatttaaaaaagagaacagaggatttgtggaagaaatccactatcaacccgttagcaaactcgtgtatgttaatgaaaacggggttggttgcatgttccctgggcataatgtggtcaaaacagtgaacgatgttatgcagcacttacaagtcataagtggtattgatgaatcttatgaagctaatatgtccaaccgtcaaaccatggacaaaattcttgcccgtaaatacatggcagaacaatctaaaaccattcaagtattgttgcctgaagctgtgtttaacggatatgcacactgtgtaagtgattggattaactacaaacagttagtcaaaattcctgtggcgagtagtgatgactctattggagctttgtttgatgcagttaccgttgcgtacatggcgaaggttttgcgaccgggcaaagtaatcattaaaggaatggatattgtcagtgtaactttacaaaattttgaaaattttgtataccttgtggaagatttggatgaaatgtctaaatcgaaaataattgacttgacaattgcaaagaaaaacaatctcaagtctttgttgtcaaccactctcgacgctgaaaagaaaagacaatacactcaaaaacttgacgatctggaaaataatgaagcgttctgtgtgcgtgacacaattggcgtgcaatgtcaattatggtcaccgtatatgcgagtggtcgacaacgcagaacacacttatttcgttaaagtagacgaaaatagtacagttgttaataaaataggaggaaggtacttcttcaagggtgaaacttccaaagagatagtaatgtcaaacaacctgttaaagcacgttgaaatttgcagatttggtggagtgtcattatgtaaattggtcaaaactaaacctgttaaatacgtgtgggacatcacagaaacgcttaaaacacgctctttcaggattggcaacaccggtggcgaaatcatcaaaattccaaacagtatttacacaaaattgtacgcacgtgttctgtatgaagatgacgtgagcatggatgacatgctagcgtatagtcgaagcttgttgagtacaatgatttacacacatgctggtcccactgcagcccacaccgaaagtatggacaatttggtgaagtatattgctgtggtcatgaatgtatcacgcagaaacaagaaatatttcaaggcggtacacaaatttacacaatctgccactagtgacgatttgtttagtgaaatttggaacgtggtattgtcaagagctaagacgtggttgacagaaaaggtggaagaatacaacattccggaaatgtggcaagcattcactgaatactatactaatgataataaaaacagtgtaatgaatcaaatgttaaatttgctcaaagatgtggatattgtggaaatccctagcaaagaccacctcattatttatggaaaacgtattttctcacaagaaatcaccaagcgcggttttcctgagtgcagtagtggcaaaaagttgttgcaggctcgcttacaacaaccacccggtaatgaatcacagacatcgggaaccgctacgtctcttgcagagcagcacaccgaaaatgtccatgaaagtagtagtccaccagaattaaccaccgacactagtgaagaaatcgaaggagtagcacaagagatcagatctctcgggtcagatgggccaccatctttgctggacgatgagttgtttgacgaaagtgaagaggaagatctgagtgaagaaactcacctgtatgattttgaaggaggaatgctgatcgaaaatgctgttttatccaccgctcacggtgtgattggtaacattgaaaacaatgaactcttcagaaaactagtaacttcattaaaaccaactgtaaattgtgttattccatatatccacgattgtggtcaacaagtgcctgaacttagtgaggttgacgaattcctaacactatcgattgaatactggaaaaaagcgcatgaattcttgatggcacaagattataaattcacaatcgtgaagggcacgcttatagcggccatgcgatatggtacactctcccctatttcttgcaatgtgcaatatgacacaccacacgataactcacaagtcactggtgcttacaacaattgggttgatagtgattatgacatagtcatttacttaaatgagaaatcatggaaaagggaagatagaagtaaagttatcgtggattttgcaaaagcaatgggagccaagccaatgttcaggggaaataatgattgcgttgctgcagtgaatattaccaacgtaccaacactggacttcaacatgcatgataatttgtgggacatcatcaaggatcattgcaatggtaaactgaacttcactagtgtagacattgcagtcgtgatgtactccgatgaaaagtgtgattttactgaagattgtgtttggcaacactgtggtctactaggaccttgcgtgatttcatctgacgcagcattacccaatagtgagttgaacatcaccattgaaggtacaactgtgtgtctgccgaaagcatgggccatgcatctgactggtataatgggaactgacactccaacagttgcccattggagacaactggctatgccgtaccaacaaactttcgactcagcatcaatgtattcttgtaatcgaataatctatgatgagatgagtgcagtgattgccatggtaggtaatagcattattgaaaaaagcgcactactgtggtgtttaaccgacttgcgagaattggtatcacactttcgttacatgcatgaagaaatcaactatgtttctcaagtgtcaaacaaaccaactggaataaattcacatgacaatgtttgtgcaatgtttagcggtagcaatggtgattttgtaccgttgatgaatttagtggatttgattaaagaccattgtcaaatgaccgtgttattacctgaagattttcacttaactattcctaaaaattgcactgtgaagtactactgcgaaagcaacgcacaccttgtgcacggaggtaatagttcagatgcactcaagaccactataaagtacgctactgcagcattgaacctatgccagatcaaatttgatgtagttatagggatgtttttcagcaacgaaatagaattcattccagcaacaaagttccaattgagaatatggcctgtagtgtgtaacccttggaagaatggtgttccaccaattagtagattcatcagagcggcggctacaatgacaaagaaacccaacgaagtggagatgggcgttgtgcctcgaggtttgtcaacgcaagaaaagaacattggttggcccatatccttttggcaattcaactcagactctaccacagatagagtgattgacttaatgaataaagcaaagtgcaagtaccacgtcatctcatttggttcaatgcaatttgacagttacgtgaaactagtacagtcagatcttgacaaacatgctgatgactctatactgttatgtacgaattacacaaatatggatgctaaaatcacaacacacggacaagaatacccattaaatctcgaattgctatcagacaaattgataattgtgaaaagggtcaatttttatctactaaaaagattcgtcaaaagttttacgcatcatggtggttgtggttcattgttgacgggatactactggggcgtgcctcaaacaattcatcccattgcatatgaacagtttgacaatgcagctttttatttggaaaacccacacatcacgttaaatctcgaaagtgaaactcaaaacacgtatgaacagatagaaaagtattttgacatcaaattagattgcgctgaagtaatagacaagattagaactattgaatacagtggtatagagcaaatgtgtttacttgagtgcatgatgaacggcatcactgcagtgcactgtgagttaactgaatttaatgtactaccaattatggtctcacgtgactgcgtattgaaagcactactgactttttgcgacgatgaagattgggtcaaatccatcttctctcattggagcagaacgatggaattgtccacctttgaagatttgtgcgctttagcatgtgtgctcgggaaacccatgtttgtcaagacaagtagtgactgtatacttttcggaactcaggagcaaattagaatgaatggtcttgtgttaacagaagacttgcgtcactgcaatgctggtgaagctatagtgacaccaacaatcacccagccagagatgttcgactaccaagacgtggtgttgtatgacaagctaggtgacatgacggttaaccaactaatgcagttagtgagtggacaattatcgggtgtagacgctaggttggaaaaagcattgagttccattaggaattttgattgttcaagaatctctctaactgccatgcgtaaatccaagttatgtaacttagtggtggtgaaacaagtattcgctgggggtgcgttagttgagaatgctgcaccattctacacatggaatgtagttacaaacaaaggagagtgtgtgtgtttgactctgcccagcaggttgcctcacaccactctgatgatccatgggctctctcaaagtattgaacctgtagtgtgtttccggaaaaattttgtgggtgatgtgttcatacccaaatcacagcagaacatagaattaacaaaagttgctgcaattaatcagtcaactttaacaaaatgtaaacaactcaaaattcctgtgcgactaatttcaaacgaaccaagtgacaccctatacatttacaatacatggaataggaaacatcatcttgaaaaagaacgagagaaaattgtcaatgcagtgaacattaaagtcataccaaaagacatcacacaaaagcagaaattgtacctcaaggattttgagactcataaattgatcattttaaaaggtaaaccaaattatgtttgtgaattggatgaagaaaccaaatcagtgtgtgagagattctacaaaacgttggatgtgtacaaagcctctcatgatcaaaacatgattgaatttaagccactttcaagagcgctgactaataggttggatgacatcattgatatcaaagtctcagatagtggggctaatctagtcaagtacccgctcattaaacgtgatattgagtacaaatcagaggcgactctgggtgaagtgtactcagctattgagtacgagagggacgattggaaagaggatattatacgcaggaattggcatttgcagcctgaagaggatgtgtggagtgtgcaggtgacgcgagggcaagtaaataatctttcattagatattgttgagggtataatgcgctccgcggattacattggtaacgactttgtgatctttccgcaaaattggatgatttacgtgaaacgcatagttggggcaggcacagaacccaacgcatctgcatggatgcacaacgtgcgcgacatgcggtcagaaaacaagttttcattagagaaagaggttggccaatcaaatgtgcaaggtgaaagggtgttatatgactttttgcacgtatttaagggaagtgatgctagtactcaagaattagatgttgtatcgacattgcaaaaagacacaaagtcggttgatatgtatgaaacagaagacggtacatttgaaattgaagttatggaaatagatgaaataccagatatgaaatctatagattattgggaaaccacaaatcaagttcaagatcaaatagtaattttgcccacaaatccgaaattcaaaatgagatcgagattgcaaccaaacagtttgtcaaagtgcatcaaaatcgcaatggaaaagtaccctactgtggccagaccttccatcaccaaagaatatctagctgaattcaactcactgtctaacagacaaggtaaagttgttaactattccagcaaaccattcaaccttgacttggaatttaaactattcacgcagaactacttcccaaataatttcaatgcgataagtagtaagtataaatctgaaacagtaagtttagatgtagatgcatcaattaagtgggtgcgggcacataatttcccaaaaagagtgataaacgacctaaaactgctgagtgaacagggctttgagcgtttaccattatcaagtgtcgcagtccattcaaaaatcgaacaaaccactaaactcaacaaattgagtaggtggttcaatgacgtggtgagtagatctattattgccagcacgtatgcgatcgctgcattgtttgcgccaccctttctagaactaaaaaagagattcaaagacacactagtgacaccattttattatgttgatggaatgacaccattgcaaattagcacccttttgtcaactatagaaaatgttaaatatgtgattgaagatgatttgacgcaacaagatggtcagacgagttcagatattattgaattggaattcaaaatttatgaggcattgggattggatttagatattctagaaatttacaagaggtgccatcagatgtggcgctggaaaggtcatggtattcatggtctgggtgacgcaatgcgtctgactggtcaagtgacaacagcacttggtaatgcaattaccaatttaatcgtgcacaacagatttgtcgcacgcaacaaacaccacatcaagtttctcggttttttgggtgacgatgtgatatttctgagtaacagcatgcttaatgtgtcccaacatggcacagagacaaaagagatatataacatgattagtaaaataactcacagagaaagagtgggtggtttcctatcaatgattgttcacactttagatgatgtaccaaccatctgtccgcatttcaaaaggacacggcaccgattttccgtgtgtaattacacctttactgctgaaactagagaggaaaaaattagcaacagaacactttcctactgtttcatgctaggaaatattaaagaaagtgttgccatagctaagaagctaagagaaaatgtgcaaatcccaaattggtacaaagtgtctagtgcgatagttgcgaacgccgcatatgatgaaagcggtgaatttcaagtgagatcccacttatccgcgcttatccacatgttggaacaacg

SEQ ID NO: 828 - DNA, 12820 bp, Phytophthora heveae alphaendornavirus 1
  source 1..12820: mol_type = other DNA
ggaaatgagcgaaatgggtcagttgagcgttgctcaactactacgccgtccccctcagggggacggcaacaaaaaattaaaaatcaatcggaacaatgttcaattgttccgattgggagtggaaggacctggaattccagtactttcactcaaacactgtctttacaagcgcgatatgtatatcgattgtgcttttggagacatgtatagtgatggccatacaaatagtatgggcatcactgaattaatgaatatttatcacaacaaccagacatatgacgtagacaaacctttcaacaagcaaatgttcaacgcggatcaattttcatggagaccggaggacccaatcaacgcaccgatggggaagatggaatacaaaccgccattccaagctccaccagttagctctagttacaattttgtcaagttccgaaggcaactaatcaagtatgtgaggaataaatcacgccggttcactggcaaccgagccgatctactaggtttcttgtcttcacgatctaacttcatttactctggaacaatggttgaaagatcaagaatctctcacggacaaatgcaattgtatgatggttactatattaaatgcaattgttgtggtgcgctgtcgtatatacccattatcaacatggttagagagttgccagtaccactcaataaggatcaaatttgtacactgctagaaaaattgcaaaacaaagagtttaatgaagaaggaatgttagacctggacatggaagtttatggttttgaattgggcatgctgtgcatgatgtttgaaaatgctaaaatcgattgcttcaattgcgataaatcgattttcgaatccagtcataaaacagtatatgaggtgttcagtcaagttaacccatatgattatggaattaacggagtcacaattgaacttttcaagaaaatgctctacttagataaccccccgccagaagatatgccagagtccagaaaggtttacgacaaaattaaaaatcaggacatgcaagcatttttacaacgggtggatagatcttatgcgcatgtgaacttcaaggtcgatgtgcaaagtaacgctggtttgttccagcggttagataacatcagattcgcagctaatcaaaacttatctgaacagagcttgggagtgatcgagatagaagaagtgttgctcctgtctgagatttccgcaatgttcaacaacaccattaacatatctccaagcagtttgaacattgctcacgcgctcaattcgggtttccactgtttgtacgattctccattcttcgaatgtacagaattgcccttcactaacactaaagaccctcaaccctacagtctaatatcagcattccctggaattgacatggaggcagctgttcaagaaaacaatttcatattagtttacaactttaatgctgtggattacaatcttgtacatgggcatgctatttgttcacccgtcaccgggtgcaactttcctgctctatggtccatccaaatgtccaagttagtgagcttatacgcaggttgtgaaatcagaggtgacaggtttgatttccaaactattcgaagtaccgaacactttcaagtagtgcgggttgtcaaaccatcagcaaagcccacgagattgttaattggcacatcgcacttacgtgtaaagttgcccgtcattgatactaattcagttgtgaaaacggtaggattgtttggaactaggtgggattggatggaagtcaacgttgatttagcaaggagaatcatcattaatgccatttcaggcaagaaaagtatagatgctttgctctcttacattgcaggcactacatcaactaagtattccgtgggtggaaaattagtagacctgacgagtgttgcattgacggatggtctgccagaactgacctacgcattggtggtgctacatgatcaggaacgcttagtaaattgggtgaaactgaatgttatcgggggtatcaatgtgcgcgacgtgcagactcacgtctacgaagtgttatcatctaagattttgcagttaatcagagtaacattaccctcagcttatgaaaacatcgaaaagctatttgttgagaaacacaaattatctttcaagcgtgacagccttattttgagacaacatcagactcctgacctgaattctattttgccatataaagtgttgactaggatttctactatcaattctaactacatgtttaacgttacatcatgcgtccaccatgaagctagttgcgtgcatgaatactccagcaaaccttgtatgtgttgtggtctagcagctaaagaaaactcaccttattgtgaatgttgtttgccagcggacactgaagagcactcttgtatgcatgtttgtaagggtacacatttttgcgctcttaaaaacgccacgggaaattgtaatcatgcaggattttgtgactgttgtaaattgccgcactgcttcgagttctgcatgtgttgttcagttgatgttgaagtggttgaagtggaaagaccggttacgagtctgaagaaaaccgctagcaagtcatcaaaacctgactctcacgatcgtgcacgccctaacatccaagtaccgaacttgggacaagtaccaagtacgcacacaaagaaaggtaaagttttggctaaacttacctttgaaggtgaaacgtacaatgttcgaaaaatacaaaatattaaagacccggaagaattgttcgtcactacggctgaaggttctatttattgccctttcagaccactcagaaatgaggtagcgatgtctcacgccggtgtggatgaacacgatattatcgatgctgtggccgtgtcagaatcatgcgcgattgaatgtattgtgcgacagtcagattacactttcaatgaggtgtgcagtctaactggctataaaacagaacattctctcacagatattttgagtatctgccaacaattgaaacttaacgtgattgtcatctactccaacaatgctatggtagttgcacgaaacgcatccatcacagacaaatatatggttataacacacactgaagcagtgttgggttcgcgtgtcagagggcattggtgtatatctaccttgccaaagctcaccactttaccaaacggtttttggtgtaacattgatttttccaccaccatgactgatgctctcaatgggcctaacaccttccatacaactgaaaatgatcaaaaaacctttattaacacgttgaaagaattaatgcgcactgagctccagttcgatggtgaagtagcactcaagttgcccaccgttaagcaaattggagatgagtactttttctccaattctgcaacgcaccaaattcaaagaggtgatgtgaacattaagataccgaatgaatacgccaaattacttgagtcagcatcgaacttcgacactgtgcagattgatgtgttagctactactgccacacacaaagtttccaccagtaataaagaattgatacatgaaagattagttgatacaattagagagtatggtactattcggggtgagattcttagtggcaggggtaatgtagacattaactttgacgcgatatgtgatgcgtcttctttcgtgttaccgcaatccgctcatgtttacaaagcactagaacttgtccgagtgaggtatgaggatggcagtagtgttgtggcggttactagaaaacatcgatcagattgtgttattacaggtttgaaacaaaaaatatctgggttcactactttcaaaacttctatcgcatcgttaatacggaaaatgtgcatccttattgacggtttaagaactgtttctaattatgattctctacaaattatcaaaaatgttaatggcattggtggcacgggtaaaaccacttggatcatgaatcatgtgagtcgtgatgcagcaatagtgtgtaaactaagggctactttgccagcattcaaatctaaaggatttaaatttgttggcacgcttgaacaattcttgctggagagaccaaatgtagcggagattgctttagatgaatcgacgctcactgatgccgttgaattcatttgtctagctatacacccacacatgaaaatttctttatttggtgaccaagatcaagtgggggttgttgagttctccaaaacacctgggtggactgcgttagacaacgctcaagacttttgtggtgtggaagtcgagaattggacggaaacttaccgatttggtgaaccattagtcactgaagtgttgaaaaacatctacccaacgatcacatcgaaatctgatcattccaccacctacgagtttaacaaatttacaaaattgaaagatttagtggaactaataacatctgctaatgttgacactgtatatgtgttttactctcacgtggaagcggccttgcgacatgaattggaaaacgaacatggtattgttataaggaaagttcacgcaaaccaaggaacagaagggaacagggtgttagtggtgtattctaatttccaaccatcgccatcgggtattcttctagatcgcaaatatgtaaccactgcacttacgagggctaagtcacatttgatagtagcaacagatttcacgtctataactgatatcaatatgatgattgacgtctgcttcacgggggcaggtggcagtgtgtctagaattttttctgatgatggtagtatgatcagagaattgtcattgcttgaaataccactaatcaacaatttcattagagaaaacgtctccaacatcgacaactactctgtttcgccagattcaattaaattggatgtgaattactcaggagtaataatcaaggtgctagtggacacacacggcattcatggtcgagatttgaaatcaaaaatgattttgtcgggtcgaaaacacttagtgacgagggagttattgaaaattcaggacgaacaactagatatgaacccagaatttattgacgaggaagtgttttttgacaccgtggaaagtgaccaacagccagacgacatcttagaagttaaacactcaaagatgatccaagtcaagaattacagattgtcattattagcttggaattggttaactaagattgctgatgctaccttgctgattcaacatgcaagtggagcagcgtatctcaaattaagaggagagactattcaggtgaaatgcttcaacggatgttctttatttactggtttcaaattaaacagtgataagattggtgagtgtactattagtagtgcccacgtgcaaaacggtgacagtctcctgtccaaccttaatagtcatgtcagaacattttcagggaatacagaaatgattcaatttttgttaactactattaaagaccaggcattccttagatcgcaaggtgctaccacgggtaattgtgttaaaagaatcattgagaggaccaaaactatgctcaagcacaacacctgcaacatgggttgttgtgctgaacacggtatgtcagcgaaacatatcaatcaagcactgtatgattcgtttgaatccgccaatctcggcattattcggaagatcaatttccaaccaattcctttcgtggtatatgttgatcgtgaaagtagactggcagtttttccgaaccatgtctacatcaatacgatcaacgatttgatgaggttgtctgatggcatacaaggtatggatgagggctatgaagttaacattgccaatcgtcaaatgatggataaaattttagtgcgtaaattgcaggtggagagagccggaattaaacagtgtataatgcctgagcgactgtttaacgagtacatgcacactatggactcagttatcaaccaacgccaaattattaaagttcccgcagtaactgcgagcgattcgttcgcagatttcattgattgtttagctcttaattacatttataaaattttaaatgtgaggcactttgaagtgcgaggagtggactcaaaaatacacacccttcagaatttggaaggtgttgtttgtaatgtcaactcattggatgtgcaatcgaagaccatctttgatgtcgtgcatacatcgaaaattgagcatttgaaaaaactcatcgatcaaacaacggtgaaagaaataaaagacaagctgacacatgatttgcagcaggaagagtgtcacccatctttcttgtgtgatgacaacacattgccaacatcagtctactacaatgctaatcaggaggtgtaccaatcccatgagcatgtgtatttcatcaaagtagacgctgatagtccgcacataattcaacaacacggtcacagctttttattaggtgaaaccagtaacccattagcaaagaggaatgccatttgtaagcatgttgaattatggcgtttcggccattacgctttgtgtaaaatggtgtcaactaaaaccattcgtctgcagtggagccctctcactactagaaagattcggaggttcacgtcaccaatgcctagcatggaaattatcgacatcccgtctgatatctaccgcaagttactctcacgtgcgttgtatgacacaaatgtgtctgtcgatgatatgctagcttacagtaggagtatgctgagcaccatggtatattccagtaccggagttactagttcgatagcaactgatatgtctcaaatgatgcaatacattgcggtggtaatgaatgtagtcagccgcaatagagcacatgctgaagcagttaagtcatatttgtctactggtgatgatgggggcataatgtccatgctaatccagacggtttcatccaggattaagacttggttagcggaacaacttgacgagataggtttaccagaaatgctaagtgcttacaccgagtattacgacactcatgcagctagtaattccattctgcacaaaattattgcagcatttaaggacgtagacattgtggaagtgcatcccacttgcaaattgatcgcataccagggtaaagccaaggatcactctatcattagacaaactaaacggaattgtcctagcaactcaaaattagttcgagaagagcagagggagactaaacacgtcccgatggggatttccagtatgggggcgacagagtatcaggagagtggtgcgccatcacaacaacagcgacaacaaggaaaatcaaccaaacaattagatggaaagaatattgaggcatcacataaagacagcgttggaaaaatgttgaagggaagtcaattgatgggcgactcaaatattccattagatgttcctgatattccagaacttgaaaaatcggacgcaagttctggttctgagcaaaatgactcaaatagcgaagacgacgagtctgatgacacgtcttcaggtctggaaacaccattagaacaagatgaattcaattcgagtgtgttgattaacggcaagattatcagggatagctataacaatgaattttcgagatacatgggtttgtattatgcagacttatcaccgattcaagtttgtaattgtaatgagtatcatcccgaccaaactttaatcaatgaatatttaacagcttctaaaaaattgtggacagaagctcgaaagtggttggaagcatcagactacatatataccataactaaaggtaccctcattgcagctctgcgaactggaaagctgtcacaacccacttgtaatgtgcgcctttctggtggagggacaaaaatcgtagggaatatgttgaactgggtagacagtgattatgatatactggtatttgtgaggaaaaattctcgtgtttctgctaaagctgtaatcaaatccctggcggactatataaaactgaaacctttgtatagaggcgccacacaagctacggctatattgcacaaaaaattgcgcaaaccgatgccaatggctaagcactccaatgtgtggtcagtgatcactgaacattgcggaggcatacacgatgtggtttccattgatgttggtgttgtgatgtatgatgatgattacgcatacgtccaagatgaagtattagcatcacactttggactatcagatccagctatcattcctactgaggtcattttgccgagtccagacaatcagatcttattagaaggtaatcctgtcagtttacccgggcgatgggatattttgttgagtttctacaatgacaagaatgcatctgcagttgataatgtgcgcaatttgatgatggcccccgtggagcattttgacaacgctgccatgtttagctgcaacaagatgtcttacaacaaaacagcttttctgatgattctagatgcatgcgaaagaatcggtcaaagcagcggttttagtaaatggttggaattggaaatgttggttcccaccacttttgatttcattatatttgaaacccaggcgaaggaagctaaggtccacacaatgtgcgctatgtttgctggtagtcgaggggatcacattcctatgttaaatttcgtttattggttgaaaaattggattgacataacttgcttggtccctagtgatttcagcatcaccctgccacatgaagtcacagaagttaggtttgaagtggattcatcacattttgtgcatgggggtggtaaagacaatagtgtgatcaagcaaaacatcaaatacgtatctgaagtattgagcagaacgaattctgtgtatgatgtggtagtcggacccttcttttgcaacgaagttgatttcataccggcgagtcaattcaaaatcaaattatggcccgtaattatcaacccttataagaacattcctttgatcaaacagcctctacgtagtttgatactcaaaacttttagtgtgaccaataatgttgagacgttggattttgcatgtgttcctaaggcttttaatccagtcgacaaaagtttgggttgggcattgtcaccgttgaactttgaatcggacgatgtgactgtaaaagtgattcaagccatgagtaggactagtgatttatttacggtagtatcatttggttcaatgcagtttgccaattataaagagactattgagaacatcttgacaagtgagacggggccttttctattgtgctgcaattactcacatcaggacggttccattcatttcaataatactacatacaatttggatgagttaacatttactagggacctaattgtagtgaaaacttgtaatttctacctacttaaaccgtatgtcaagaaattgatccatcatggtggatgtggtactttgctaactggatatttttgggctgtggaacaaaaaattcacccaatcgcctatgaacaattcgacaatgccaaatattatttagaaaacaaagcgccaatcttgaacatagaggaatgtctaaattcattccagcatgaagtattaaatctctttggtttgaaatccaagtacactgaatataagataccaaatgctgtattgaccaggttggcacttcccaccacagacactattcaagttcgtaaaagcatcaaagtaatgcatggttttgtcactgacatggagattcaaaaaatcagcgtgtccactgactgtgttcttttaagtttacaactgctcttccctgatctggcggatcatgttagtgaagtgtacagatcttggcaacaaattatggatttcactagtgtgtctgatatagtgtgtttggtgttgaccttgcaggtctcagtacatatagttcattcgggtgagtctattattgtcgaaattgacgattctagcaatgacgccgctttaataatttcagaagatttgcgtcattgtgatgctgggcacgtagtcacagccaatgtaccacacgtcagtgagatgattagtcctatggaagtgactgtaccaggcgtagataacctaacatttttgtccaaggtggttcaagttttctctaaatcagattttggagaaacggcattggaaaaagtgttgttggcagtattgagtaaaaatcccactaagttgagtttttcactaattagaaagtcaaaatcttgttatttgccaaaaatcattaaagtatcagcaggagctgttgtggtagacaatctaccgccgttttacacatggcagttgttgaccaacgttggtgtcatacccgcagtcagtctcaaatcgtcagacgggtcaacaactattctatacaccgggtttagctcagtggttgtgcccaccatagcttttcgatacaataattttgagtcccacttagtagttaagggtacccagaaagctaaatcttgggttaaagcatgtatcaaccagactactcttaattactgcaggtcaaaagacatccccgttttcggtgtggcatcagagccagtgtcagaattgtatgtttacaacacctggaatagaaagcaccacttggaaaaagaaagagaggtgattatgcatagtgagaatattagagtcgttccaagtcaattatccatgaaatggttaaggttgctgaaaacattaactaaacacaaggtcataatacttaaaggcaaaccacactttgctgtcgaattgagtaataagcagccatcccgtgaggtcactaaaaaattttatgcatctctagcagcatttgagacgatagcgttggaagatgtggtgctactgaagaatatcactagtgaggaaattgcactactagacgagcgtatgacctttgctgaagacgatgtcggtgcaccacaagtggcatatccgtgggtgttgaacacaacgccattagaaatgggcacgattgaagagatgttcgatcaagtgaatgtagatttggatgattggaaagcccaaattatagcagaagaattccatattccagtgaatgaagtgcatcaaacaatagtggtgcgatgtgaaagaacgggtttgcgggttagtacagcacttgagattcttgcaacaagtgaattttgcaacaatggcatcctcagctttagcaaacattggttacactacaaattgcagccagtgggagcaggccaagatcattttaacgaagctaatgcgtggcacacaactgaacgccaacatcgttcagaaaacaaatttgatgtggtcacagcgagttctggcactagtaggtctttaaacacgaaagtgttattgaacatgttgcacttaacaagtggtatcgcacgtgagagtgaagcagacatgttcgctgaggtgtgcagagatgcgaagctaattgaattttataaaatggaaaatggggagcacagcatcgaattgcaaaaggtagacaatataccagacctaagcagtcaggattattgggatacctccgcagaattgcaggatcacactattattcttccctcttcgaatcaaatcaagatgcgtggacggttggaacctggtgacttgacaaaatgcataaagttggcaatggagcaataccccatttacgctagaccctccataactaaagattacttggcagagtttaactcttttagtaatagacaaggccaagttaagcgttatgcattcaaaaattttgacattgagtcagaacacaagatgttcgttgcgaattattttatagaagatttttctaatctatcatctaggtttcaaactatgccggtcaattttgatttcgaagcatccgtcaattgggtaaaacagcataactacccagaggccgtaataagagatttagagagattgtttgatgaaggttttgaatcaaggccattagcatacgtagaagtgcaccccaaaacggagcagacaaccaagatgaacaaattttcgcgttggtataatgaagttgtgtccagatccatcgttgcgtcagtgtacagtgtagcagctttgttctcaccccctttccttgagctgaaaaaacgattcaaagatgcgttacgtgatggtgtgatttatgcagatggtatgactcctgagcaattaggagcgtatttaaggacgagaaaaccctgtcgcatgtttattgaagatgatttaacacaacaagacggccaaacgagtatggccatcatcgaacttgagttcatcatttatcatgatcttggtcttgatccacacttgtcagaaatgtacaaatcctgccacatgtcatggcgttggaaaggccatggtatatccggacttggtgatgctatgcgtttaactggacaagtgactactgcgcttggcaacgcgataaccaatctcattgtgcacaaccgctttatggttagaaacagaaatcatattgatatgatggcatttctgggtgatgatgtaatattcactagtgaccacgcattgaatgtttccaaccatggcactgaaactaaagacatttataatatggttagcaaagtaactcagagagagttagtaggtggtttcctttccatgatcgtgcacaacgtgggtgggatcatttcagtttgtcctcactttaagagaatgcgccacagatattcagtttgcaattattcattttcaggggcggaaagggaaacaaagatcaagtcacgagcattgtcatattgtttcatgttgggaaatctgaaggaatctaaggatattgcgagttcaattaccactggggtcaacataccagactggtttgattggccacaagctatagaagcgaatgcattgtatgatgactccaatgtatttgcagtgcaaagtcatgtagggagtttatgttccatgttaaagaacttccaacccattgaacatgaatttgctatagtgggaaaaccaaagttcaattgagaacctcatagaactttctgaagttgaaattttaattttttgttgccaggcatctatatgagc

SEQ ID NO: 829 - DNA, 14445 bp, Plant associated alphaendornavirus 1
  source 1..14445: mol_type = other DNA
aacctactatcatggcatgcttgttagatataaaggtcctgtctagaatctcgggtggtctgcacccacactcatctgggcgcaggggtcgcaatttgacccctgtgtccaatcaaaaattacacaagaatgattccattcggaaaatgtttcgcggtagcaaacatgtgattaaaacgaattacaacacagaagcaataccggcagtgatgtcatgtcacaaacgagaacacgatcagttcatacaagccggcgctgatatgtgtgtaccagatttgagtcacttggacgagagggcgttcagaaatttctttatgttgtacatggaagatcattgccatatggacatgaccaaagaaaatgcctcagaactttttaagtcagctgacttacaaaacagtgagcccaatttgggcacaagggcgtactggacgaccatgagaccagaggtgatacctgcagtgaaagatgatggaactcgagatccagtggcactcaaattcatgatggacttgatcaaacaaaaatttgggggtagcctgcgatccatgtgcacgatgaacttcaaactaaatcccaatctaaccccgcacatataccgcagatgtggaaagtacgggtacaaggccggggaaatggctagtccacatggtatcaagcagtgtgctcaatgtggcacctgcaactttatttggttgcctcaccatgaagacaagctgagcaatcagcactgtggcatgtgcttcttttcactagatttaaaacacatgaataatgaatggttcatcccgaacattatggttgaggacataaaccaattgcacgtgggagcactgcagaaagacatgtcggaactgatgaaccaactggatggtgcagaggagttctccacacaaaccactaacaagttggttgaacaagatctcaaaaatgtgagagctataatgtccaggagaatgtttagaacaatcaaggtcaataatgggatgacaacccaacaactcaattacttgaaaaaccataacttgtcattccatctggtacagagtagatccaccccgaacccgcatgcaatgctctcagcagaaaggaaaataatttggtactcttttgcggaaaaattggggcatgacagaacattattagatgtcggaactagaaaattaagagacaacagcttagaacaacgatggcgcggaatgggaccaatagtcgactggagagatgccgagcgttactcagccattggcttaccaaataactgctgcactcacaccgtcaacacctgtgactgcctggtgcaaaagcgacctctaatcatagcagttgacagcatctacgacattgccccgggcgacataatacgcttgatgcgaaggtgtgagtctaacaacctgttatattccatgaccacagcagcagtggactttgaggccgtgaggggggacttgtattttgaccagggtcaatggtctcgtgatgctgataaattgcttacggtgttaaagcaagatgatagaccatatgagaataactggcacctaactaagttgtgggccacagctgatgtgatcacagatggtgagtggtctttgcagatcaacacctacaatgtggtgggaaatcatattatgaggagtgctacactaacaaaatctaagctggaaaaaatgaaatataaagaagcggaccaaatcaaagcacacatacgattgaatgttccgatagttcaatgtgatagttatttgaataatcagtttgtgcccgtaatagcatatgaaaatcgaaccattgatgtcaatctgtttaaggctctgtacagcaggaatttaacagccaatttgtcgtttgataaaatggtagagtttgggttggcttatgcccacaccaaatacacaacgccaactagaatggtgtcatatcaacatgtaacggcagacgatgtcaggttgcatgtgttgcttgccactgtgcacagcaggaggaagatgttttgggtgcaagaaaccgaattgatgaatgatcccaagtccgtacatggagtaagcatgacgggaagcagttggacagtagtggttgagtacttgttaaaactggtgcttgaatatggtacaaaacaattgagcagatttggtcagcttgagttagcaagcaaagttcactctaaattgcagccatggttagaggatccattctgggacctgttagatcaactttgggatgccaaccacaaaactggtctgatacagtttgacgtgtcagatattgaaagtttagagtcagtgcagggccaggccgtgtgcaaccaccacaacatgacttgtagccacgccgtaccaggtgagcaggtttgtgcttgctgcggaatagcaagtgtggagaagaatgatttgtgcttttgttgtaacactttcaaatgcgaacacagatgcaatcacaaatgtgtggatccatctgagcacatgagaggaaatgagaaaattaaaatttgttgctgctgcggtatagaatttaacactacacattgtgtgccgtgtgtaattaatccaggaaagcagcctaataggcaagaacccccaaacccaagagtgaaaagaacacaatttaaggtgttccccacagacattctacccacaaatcaaacactggactcaacagaacctccacagttgcatcctaccaaacgaatgagaacccagaggaagtggaaacctagaattgtagccacaccggatccagcggacccaaataacgtgagtgacactgaaatacctgaggattttgtgtttaatcaccaaactaaaagaatcaccctgtatgatggatggttaaaagacatgtatggggacgaacttgggagtgaagcgaaaacagtggcaaatctcaagggcgaaaatggttcaatcaaaacatcccaagcagaatctgttgagttgagtaatgcacccgcaaataacctatccgcagcggagcgaaatgcgccaggactcgaggacgaggagatgactgatgatgacatagctgcaatcaagttgatgtcaatcacttcacatgcatatgtgatggttgtgataaacggactccatgttgctgtgtcccaggggttagtggcacctatggacttcaatcctgagaacagggtgggaatcagtcagctaaggtatcacaaatttggtacatcttgggtagatacagacaattttgtcatagagcaaaccgccgaagtaccgggagacggattgtgtgggttccatgcaattaagtatgtgttaggtgatgaagcgaacttaccagagatgaggcacttaaccggagtaaaggactggtggtctgatgaggagttggcaaattatttaagacacttgggatacaatagtttgctgctgttaccagcccgttcactagtaacagtggtaaacggcatggatgaccggtttgtgtgcattgtccacggaaccatcaaaaagaccaactacatgcactgggagcctgctaatgtactgcaggtagataccaagggcatgatgccatgttggcagggcatgtggaccatcacacaagaaaacaaaatgatcagcagcgtgtcagaatatcaactaattgacgatttggatgagagggagcgcattgatttggccatattgcttatcgagaagcatcgcattaaacacacaaatcataaagggcaacagagcaatatagtggtcaaagttattgaaggtaaaaattatttgaataacaacggagcaaatgtgatgatgccaagagcaggcttgttccacttcgaaatcccggagacttggaagagcgctattgagttgacaaattctccactgcacgggaaaagtgctgatgatctgatgggtcgagtatttgatgtgccaccattgtacaatgccgatgtgccatcagcgttggcaagcttagtggccgaaaactgtgcttacctgaattccatatggttgcaagcaagtggacgattgaaagttgaaaacagtatgtggacaaaaagtgtgcagaggacaaaaatgatcaacacaggcaaacgcaggttcccattgggcagcactaaacttaagacaggtgatttgatcatgttggaactagatacaactaccattcccgtgtacgtgaccgtgcaaaaggacgaagtatgttttacaccaccaatggagatgagtcaatcactggtgacctgcagaatcaatgtgcctaaatccagctacaaatccagattgttacaggtatggtttgcttcaaaagctcaaaccaaccaaacaaagctgctgaagttgttagagaattcacatgtgacatatgggccagccgggagtggcaaaacaacaacaatgatcaaaaatttgaaagcaggtgacgtggtggtggctaggaccaaggtggcggtggagaccattaaggccaaactgcataactctagtgtgagagtgttgacatacgagcaattctgcgtgcagagccccaaagccagtcgcgtatacattgacgaatgcaccatgttcacatggttggatgtagctctgatgtgcactgaggatttactggaattacacatgttcggggatccacaccaagtgggtacaatagacacaggaatattgtcgggcacacgtgacatcagcgccgctggagaatacagcaaaaacatcgaacatttaaacaaaacatacaggtatgggagaacactatgtgaatatttgaatcgagcaggaattgaagtggaaagcgcagccgatcatgacaccgaggtcaaatggtttgtggtcgacgaactaaatgacgaagtgtttcgacaagccgtaacaacgtccaaacctgatgtgattctcacattttataaccgagtgcgagaaaaactctccaagttgaccacaattccagtggtcacggtacactcgtaccagtcaaaagaagcagacagtgtactagtcattcattgcgcagagcaaagagtaacatcaaaaatctggttgaacagacagtattgtttgtctgcaatcacaaggtgcaaaaggcgcgtggtatggatatcagtgggtctaccacactcaacgcagttgcatgacatattaaggggtgacaggcttgagaccacggcaataggtagtcacacaccggacatgatcgtgtcagagatggtgtccaactggcaaaacgtttccaacgacattgacgatggggattgcatagtggtgagtggttcaccacaacccagcacagggggagcagatggccattatcggatgaatggcaaattgacaaacagtgtgatagccgaattggccaagccgtttaaacacaatgttctggccaactggacacacaacacggtcggcgacatggcagtgatggccagagcggaattgccaagcaatgttaaagtagaagtgcatggcagagtaataaccattgattgttttggtacgataaccctggaggtgtccagggacaatgcttactgttcagtgtcttacagcaattttgtattggcgcgaacagcgaaacctgtaatactgaaaggttatcaagacgaagtggttaacaagttgacggaagttatgagcagtggtggtgagaccgattggtttgctcaattgcccatttcattacaaacggaattgttcaccaattatggtaacgagttagctatccacaaagtcgaagaacagtcagaagacagattctatgactgtgccacggacttcccagaagaagccaatgtgttccgcagcccaaaagaaacatttgacgaattttgtgtgttgaaactggctcacatattaatggatgaccacgttaaggagatggtggaaactaccattggtagattgtcagtagggatgacaaaacatgtaaccgaccaaggtgaagtggtgacattgctaagcaaaaataaggtattgttgaaatactgggtggtaaacgcagggttggaactcaaattggtaatggcagagtgtcaacctcatttggttaaaaacctcaccaggttggttaacgcttggaatgatattgtgctcgaggcgttgggtcaatccaacttgtggtacaccctcaagagtgaacacaaacgccacattgccgaaaacttcagacaagttgtgagagtggaaagcatgcagttcatgtctcccacagtgttaaatgaaagattcaagcagttaattgcagaagaggggattgaagggatggaagcgatgaattccgaatcagtggaacagttattggttaacataagggctcatccagccagttaccctgaagcggtagagctgacaaacatgcacaattcacacaacagtttgtgtttgtgtggggaccaccaggcttggtggaacaatgctgaacgagagcctgaatttatgtatgatgtggtttggccaagtagcagatcaaccacgctaattaggctgttggcagagaatattcagttgtatgagacttgcggggcaccatgtttcataacaatctgccagaccatgataggactggaaacattcggtgggtgctcgctgtgttgcggtatagcgttcattgccgatggagttgtatttttaaaattgagcccacggaaaaccattgtcgacaagcgaatgttattgattagacaaaatcacttgcaaaatgaagcttgcttagttttgtctgccttggaaataacagactgccaaatatttaattatgttgatgcagtgatgcctgcaggtctagccgagcagtggttgcatgacatcatccgactgccaggttatgagctaggaatgttgctggaacgaattagcatagttccagctgcgatgattgcaaaattaaaacacccagtatctaagcgtctgtgcatgcaatctgacaatgacaataaggaatatttgagtgaaattaagcaccagttaagacctgaatggagcttgaccagtgtgaataaaatatcaggacacgtgagcgctaggtatgggttggtgtcaatagaaaaagaaaactttatggcatattgttggtggaacgattctaaattatatgttacctctccgcatgttggaatgcatccagaaaataccatagtgttgcaactgcacgagttggttgccaagctgctgagtcatcgaatcaataggtggcagtggagaattgcaatgcgctgtaagttatcaagaaacacacaaccgataggatttggatctgacgagggggctaaatcactaaatttaccgttgtcgtatcacagggccaacaaaaccgcagtgttcgagcactttaggcagcgagtggaaagcgaaaaattgtcctccatgatcaagtctcaccatattgtgtttgtgcattctaaacagttagaacgttatggacatctgctgcgccatgagtgcgccaacttaccagtggaagtgcaatcatatgatttaatggagcgtggattcgaccaattggtggaaacaattggggtcaaatatgtgtacaacggtttggactatcatggtcgaatgacagtggcaacagtgtatccttacttgagcatgtcaacttccagttggggtgcatattgccaccctttgatagaaagaaatgtaacgaggtacatgagaaatgtgttggattgtaatccaattttggcgaagatgaatatggttttctccaaagcagatttggggcctaaagataaagtgagcagtgagtactacgaagacatggcagcatccattacacaccagatgacaagtaaagtgggaccttggttcactgaggaagaatgtaaccctcccgcacgctcgacccacctgtatttaggtttgcatatgttggcttccagccccacagaattggtaacaataattgccaatcaaaaaactaatgtggccattgtgttatgtccactactattcaacagcaacaacatgttgttcaagatggtgtcggagacagaatatacgtatgaagtggcatacgatggatcacctgacacaattactgtcaacaaaaaatcgctggacatgatgttaaacggggcgatgcaaacagtgggaaacaaggttctgatgagtcatagcacgtctataatattaggacacgctgtgtgtagattgatattgtgtgactcaaacacacccgcgccaaactactgctgcccacaaatgcaatatgccgtgtctaggaaagtcgtgtttactatgccaagaatcaatgacattaggcgcgcgctgtccgaatgcaaactcgtggaaacgaagaaagtggagattgacagcaaattctaccgtgccttaagtttgcgaatgcttcgaccaaacaccagttttactgatttgctagcttacgcccgaacctatattcatgcagttacttacagcaacgctgcagaaatcagcattaactccagatatgataccgacatgatggaagcctgcctgtgtgtgttttacgagagcacaagggctaacgaaagtatggaaatgataacggagttgctcaccaacagttacagacctgccacaaattggaacaatgtgaagacatccgtggtcaatctgatgcgcacgcagttgggtagcttgcttagccccctgcgtcctgaaacaaaagtggacgaactgctagaattgattgcgttgttgctagacagatccgagattgccgccattaagcagttaaaggtattgaccattcacaaaatcaagcgtccgagtgaacaaaaaagaatcatcaaaagaaccgacaacaccctggtccaagctaatttgaccgagattctcaaaaatgccggtgacatgttcaccaattccatcaacttagtggccgcaggaacaaacaggtggtggagattaagtcgtgaagggtttcacgatagcacactcaaaacctctgtaaaaacagaaagtgacataagtacagcttgtaggtttctagaaacgtgcgaagggctgcctttgcgacaagcagttgcaagtttgttaaacgctaatgtgttgcgaggagatcttacgagcattgaaagggtagtaaagcaggtgttacaagatgtggccgaccctgtgtccttaaaccctgttagaaaagcccacactcagttggttgaagatctaggtatgcccgattctctaaagctcatgcaaccagatgtcagtcaggatgtggtggtatcgatggaggaaatgaaaagacgagtcgtcaaactcaagtggatgtacccaacacagtcaatgaagctggtaggcaaaaccattgtgtttagctccataggatctatgggtgacgtggaaccatttttgtccatagcagtgtggctgcgcgaaatgggcgcacactgcaaacttttggtgccggagaattttgtaaagcatgtaaccttggcaggatttgatgctttgggcttgccagtagactccgagaaaataatcaaaaactgtattgacttcgaaaaaactggaaacaatttattacagaaggtcaatgtgctcatggaattgttcaaaatgacaagtgctgtattcagtgtagacactgaaaggtatttgaatttcatcaagggagctgatttgttgcttgaaacaccgttcacgcacatcgggtcacagctggcgcaaaagatgaatgtaccctttatgttgtgtgcagcatacccctgggagtatagtaatggttacaacgtaaaaggtgaaaaacaaggactcctggactttatatctggggcactcacttatgccccttttattcaagagttaactgattggcgaaaattacacctgggattggaaaccacagcaggaacattggtgtccgcaggagggacaccaatgttgtaccttcacccaaaagaaacaacaaactggaaaattagtgttaaatcgaatgagataggatattgcgaaaaacctctgctggcactgtctcaacttgaattggagacactcagttgggttcagactaaacccacggcagcggtgtgctttggttcaatggtgatagaggattaccaatccctgttgaacttggtgatgcatagaatccctcctggcattaagcaagtgattgtggtgggttacaaaggccttccatttaaattggggcacaacaaagctgcagaaatcaagtttattgagttcattaactaccatgcattgttcagtgtgacttcaatggtagtaacgcacggaggtagtgggacagtgcacaacgcattgcgacatgcaaattgtgtgttggtcaacccattttttggtgatcagcatgcatggtctgagatgctgcggaagaacgacgccggttggggaattcatgactcgaatttaaatcttaaagatggacattggatatccaatgaacaatttctgaggaaaaagaaagctgcgaggaaaatagcagaagaaataaaccaatctagtccaatggccaacgtggtgtccaacatttgtaacatactggaaattgcggaaacgaacacagctaacatgattgaaaacagatactggcatggtgccatattgccaatatataatcatgaaaaaatcacaactttaaaactcgtgtctcggaattggcgggagttggcagaagccgattcgttagcagaagagttgatggcaaattgggcatcgcaggaacagtccaaatttttaattaaccagaatacaaatcttgatacctcaaatcacagtagtgggttcagcagcacggaaggcagcggcaaatcagatgacattgtggatggagaaaataaccatttaaacatcactactacaagctgggatgacgaagcacaccagagtggatcaaatgaaacaaaatcatcggcagtggcaattgaggtgaagacacgcgagaaagtgaccgatgatagtgtgaacccaatcaaaaagaggcgcggattcacgggaaaacttgtgcccaatcccgtgttgaaaccaccgcagccaagtaggaatgaaccaattacaacccatcccagcgtggatctgaaggcggattgtttgtgcgagcatgcagcagatgaaagtcacatcgaccacttgtggagcttttcagacgtgggatctaagctcaatatagcagtgccatctacacgaatgagcatacaccgattaatgtctgcaaaggaggtgagaacagtgttagacccacaaaacgacggagagtgcgtgttcgactgcttaaaagccttgttgcgggcacaccacgtgcctgatgttgtagcggaaccccagattgttgaaatccggcgaatgttttgtgctggaatcatgcccaattttaacgaggtaatcggaatgatgactttgttgggtctaagtgtggtgcttagcaatagcgtaacaaatgtggtcatatctcatgagtgtggtcagccatgccaattcaagttgtccattacatacaacgctggtataggacactgtaaattgatagaggtgcaagacgtggagttagggcccgtaatcacaactaagacaatgaggttcacatcacttaaaaaacaaatccaacaatctcttggaatcattgtgtccgattaccaagtgtataagacggatctagtgtgtaaacaaactcgaaaccaaacattgttatatgagtcgctccacgtagatatagacaacactagggccagaatgaagttggataagcttgtgtttacaatgaggaggcatgtacagagatgctaccatgtcagcttgtgtacagatggagaaatttattacacattatctaacatccaggtcaacactggccagatggtgttgattcagtgctcagatacttatgtggctagtttagccgttcaggttggtaatggtttagcattgataccactggcgcccccaaaaaacatgagggcaacaggaacggtcgtggtgaccgaaataaaattcggcgggcccatacaacctagatccgtgaccaccctaatcagattgaatgatgtagatgtccacacctacaccaatctcaacgtgataacaagggattttgtgatgaccagaaccaatttagtgggttgcaacactgttgcaaacgaatctgctacgaaattattaatctatgatcatgatggtagggcacatcacaattatgatgaaagaaatatattgatgagatttcaaccaaccaacattgtgggagttggtttcgattacacaggggacatgcatcatgctttgacttgtagagacaccaaatggagattgtctgtggtgaacggttgtccaacaatcacaatggagttttatgacacacataaaacattgggcacccaaacattgcttcatgcgattggattgtcacctgttaaggtgtctaatcagctcactgtgccatatagcagtgtcacaagagagagaatgtcgttgctaaaccacattgcagataacttaggattggcagagggattgtgcacagccagggtggatggtaaatacagtcagtgggtgcccataacccaagatgtgctgaaagagtttttggtggatggagacgccttatcacatttattgggcgaacgatatgacagatttgatattcgtctgcgaaccacgcagctaacgcacgtgggagaagaagtgaacccgacgtacgtaacctgtgtggtctggtcaaaaaacacactgggtttttcgaaggcctgcctaaactttgattaccgactcagggtggtcgtaggaggagacgacttggaagagagggtgttgtggaaactacctacccattttcaggccagcaaacattccaggtggtgggaccaaatcacagacatgcctgaaagcaactttaccagggaaaaatgggaaaatgccttgaccacagaagcattaagtgatgttttttccagccttcaaatgggagaggaaaggcaaccacaagtggacggcaatgagacgtttggagatagtttctttgtaccaagcacggagtggcatgtgaccccacaagaatggaaatatagtgttgagattcccacttgtgatgacatctgtttatgggaagacatagatttgtctgactggaacgaaaaatttgccccgatcaatgaggccacagtgaccagcagagtgccgcctactgcattaacaactagcaccaaatctactctagtggaatatcccaagtatgctagaccagtactaacaaagtgtgcaaatcaagaattcaacgccgctacagggaggttgtgtaaagtggtgaagtatcgaaaatataattaccaaatggactttgagtggaaccaatttgtggcaacatactttgacaaggccaaattgcatctgctcaacctttttcaagtggaccaattgacatttaatgataataaagtactggactggctgagtcaacgccctgacggcaacaagatagctgcagaattggaagggattctcagctccggcatggaagttaacccgatcaacaacatcaacgtgcacctcaagttggagtctttgctgaaagaagaacctgccaaatctatcaagcaggtcaaagcacggccattgatgtggcagtgtaaggggtactgtgcagtcttctctcactgcttcaaagaggttaaacaacgactcaaacaattacttaagcacaacatagtgtacactgacgggctgagggcggatgagctggcagcccgcgtcagggccgcaggtgatttcaaatatatatttgagaatgatttggcacagcaagacaagcaaaccgacatggaaataatagaatttgagatgtatttgtacaagaaacttggtatgaacccaggaatggtgaacttgtggaaaaattgccaccgacattggaagtacaaatcaaggacggtcatgggagtgagagatgctatgagactgactggtcaggctacaacagcattgggtaatgtaataacaaacatgcttgtgcacagacgaataacccagcagttgcaagattctcttcgattgtttttgttactaggtgacgacggactaatgttgcttgattcttggattaatgttgatcatctgaacacggaacttaaacatcatcacaacatgatgtgcaaaccttacattagcaccaaagtgggcactttttgttgcatgttactgacaaaaaatcatttggggattagtacactaggtccagattttattagaatgaaacgaaggttcgaagtgacaaatggagttagtgagccgaacgacgtcaacatgcaagctcgtgccatgagctatgctatgatgctaggtcgcacacccgaagtggcagcgttaataaagcgtaaagggtggaaaatagaaccaatgcgttggtatgatatggactctatagtgtccgcttgtgcttccaagtataacgtgtcagtggatagtgtttgggacaattatcatgaactgattgatcttatgggacaacaacatgtgtatcagcacaattttttgcattgggtagaaaaactataaagatgagtgtggg

SEQ ID NO: 830 - DNA, 14889 bp, Pterostylis alphaendornavirus
  source 1..14889: mol_type = other DNA
acttacaaccaccacaccccccatggcatccacattgcacaccaccgcaatcgttccccatctcatgggcgcctcacggcgcccttcttactctcaccatgggacatcgcggtcagtccacatggtgagtagaaaagacgcagtcgctaaacaaggaataagtttaagaaaagcatttaggcaagctaagaacaagtttcaagtgacaaatcaaatgagcgtcgtggccgcaacaatagcttgccgaagtgatgagcacatggagatgattgcgtggggacctgaagatgcgtcccctgatttggcgcatatgacttatgacacgatgcgcaatttttatttgctttatagagacaaaaaatgttgctttgatgtcaaagaggatgagatcgacttgttgtgtcacaaaacaagattgcaggtggaggatagagcgtggaattatagcaccagacactattacaaacataagcacgcagacctcataccaccagatgttgttgagtatgggcaaccagttaatgcgttaaaattgatgacaaagatattggcaaagtacggcggatcaatacaatctatgttggagcgtagtttggctatatcacctaacagaaccccacacataagcaagtgtggtaacacttatgaagccagatgcatggaatacaccaaaccgaaaggaatatttcagtgtagccattgcaaattgttgaattatgtatggctggaagatatgcagtatggtatttatgggcagcattgtggttgctgcttttatgaattggatttgagggaagtcaacccacacggtgaacaaacgaccatgccaacgatcgttgacataactcaaatacaagtaggggctatggagttaagtatggctgaagcgtgcaaccaattagacaagcaagctgctatggcaccggaagtgcttaacatgctagctcaagaggattacaggaatcttcgaactgtagtttctcgttccaacagacaaactttgagagttccaaacggaatgtcacaaacccaattaaaccatttggtcaacaacgcatatggcttcgtgttagtggccggcattcagacgcctaacccgcatgcaatgttggcagcggaacgtttaatttgtgaaaacataatttatgaccaccgtggatccaatcaaacatgcacaatgttgggtcaaagaagaaccatagaagaaaatgtcattaaaaacaagaggtacctggcaccagtcaaaaactggagagattatgagagattttgcgacaaacatctcaacccaggtgactgttgccacgagttatcacaatgcgattgtgacaagaaagttgatacaatgctggtcgccatcgacaatatttgggaatgggaaccagaaggggttatgaaatacttggagcgaaacaatgtacaaactttgatgtttacaaccccttttaatcgcgtgagttttgacaaaacaaaaggcgaattggaatatgaccaagggcactggtgcaaagttggtgacaagttgatcgtggctatcgccggagacgataaaccttatgttaatgattggcacttgtgtgacatgtggcaaaacgaaaccatattatcaaatggtaaacatgatttggtgatattgacttacaaacggctaggtaaccacacaattcgtgtggccaaactaagtaattgcgggttaaaagaccttggatcccaatttttaatgcggactatgtcagagaatcttgaaattgagttgccgacatttagtcctgattcatggttaagattggcaaatgttccgccaatggtaaacacaacattcactttgaatgtagacatgttcagagctttgtatgcccggaatttgacagctaaaatcagtctggatacaatgatagagtatggactggcttatgcccatgttaaatattctttgcatgacagaacactcagtcactcgttcgttacagcagacgaagtacgcatacatgccatgcttgcaatagttgcatgcagacgaaaacattcatggatgacccaagcattgagtgtttcagatccgaactcgccatggggttttaacatgacaagcatgattatattaaccgctctgaatggtttgtgcaatttgttgttgggtacagggttgaccaaattgacagattgggtcaaaacgcacacaggaatgaatttattgcatcaaaaaatggtaccgttattaaacaaatggctgagccagccgatgtgggacattctggataatttgagttcaatgcccaatgcatcagaagtcaaagttaggcagttaaaacgcaccgtaacaccaatgatcatggtggaaggtgtggtttgcaaccaccaccatcaaatgtgcaaccatgaatacagtgactttgacgtgtgtgtgtgctgtatggttgtcaagaaaagcatcaataaagaaacatgtgagtgttgtgtatcacatagaacttgcgtgcacaaatgcaagcacaaatgtgcttcgccttatttgcatgttggggacaaaccaactcacaaatgccagtgttgtggtgttttcaccaccactgtagaatgtgaatgttgtgtgaccggtaacagaaaatatccagattatcaagggccaccacttaaccatgcagcctcaagtgggctgagtgaaccaaggcgagaagtgaaacctgtcagtcatcaaaaaccggaaggagtgccaagacaaccagtcgcaggaacaaaaacaccaattcacgttgaatcatcacaaaccaaaaagaaagttgaagtaaacatttttgataaacctgacgccgcccagagcaagccaactaccgtggaagaacctacaccagttgtggatgtgccagttgaacaagctagcaccaaagacacatccaacgcttacacaacaccacctgtggacacgactgcgcagttggtaaacgggttagccataagaactaatgttgaatatgcaaaaattgtagaattgggaccaataatggcatgggaaagcaatttaatatcaatgtgggatccatacccaactggagagttaggagtgagtgaacttaagtattatgtgtgtggagagtcatttataaatacagactatctaaaaattgtgaagaacattgatgttccaggggatggtctatgtgggttccattgtttgcaaaaatctttgggggacatggtaaacatagatgacctaagagtgctaacaaatagaaatgactggtggtcaaatgatgaattgtcaagctatttgacacatctaggaaaaaatcatgtgatagtgttgccgttcaaatctatggtggtcagaaatgatcccgacagcaacaattatttgtgtatcatgcacatgagtgtgttggaaaaagattataagcactggaatttgtgccatttggttcaaattggtccgcaggatagtgagccagttttcaatggttggtacaatgataaatatagaaggaaaatggccaaatcgattggaaaatcgtttgtgaaattgttggcaaacaccatgccagacgaaaaattggaactggaaattaacgtggtcgataaaatattaattagcaaaactcacgcaggaagaactgtgttcaacttcaaagttgttaaatctggaaacaattattatgtgacgaacaatgcagaatgcagcaccaactggaaagagttaaacatgagttttaaagttccaccacacttgacagatcaggtttcaaaactagctgaatgtcagttgagtgcactgaattgcgatgagttgaacatggtgtttgatttgcctgctttaatgccagaaaattgcactagtcaactcaaaggtctagcggcagatatagttaaaaaatttttaactatcaaatatcaggcaatgggtttaatgcaattggacgttcaatcgtggaatagagagttaacaacgatgagcaaatactctcaagacagtgttaaactaaataggtggaacagaaaactgaaaaccggtgacatggttctgattaaaacgcaaaatgcactgcacatgctgccagttattataactccagatgggtgctgcataatgccaatgtactttccaaatcttaaaaatgccatgcacattgaggtgtggacgccaaaaatgagcatcaacagtttgttaaaattgttaggtgcagttgtggcagcaaacgtggatgcaagccacaccattaaattgttgcagggggcaactggatattcagggccaggtggttgtgggaaaacccagcaattgttggcaaaatgtgagccaggagattgtttagttgcgcgcacaaggagtgcaatcgacaacattcgtgcgagattaaatcgtaatgacgtttattgcgccacgtatgaacatttgtgtgtgtttgacgtggatccaaagaggctattgattgatgaagcaaccatgttttcatggttggatttacatttgattattggtaaaaacacgcaaaaattgttaatggcaggagacacttttcaaattggggttgttgacatgttttgggccggtggcactaggcacacgcagagcgtgatggcacattgtaaaaacactgttgtgatgaacacaacgtaccggtatggtgcgacactgtgtagcttaatttcccccatggtgggcgaaattgcaagtaaaagttcagaagacacacatgttgttctgttggactgggaagtgtacgacgcagagaggttaaatcgaacatacaaagagcatggtccaggaacaattataacgttttacaattcagcgctagaaaaattaaaaagggacatgccgtcagccgaatcaagtacagtacacacattccaatctcaagaacgagatgtcatctatgtgctgcagtggaacccaacaacgtcaattggaaacatttggttggacagaaattactgcatatcagcagcaaccagagccaggaaaaagttaatatggataagtgtatcattgggcacggggaagactcttgcacaacggatgacaggtgtggcagagactatgcaaggaggaggacaacctgcagatagagaaggaatgacctggaaattttgccgctggttaacaaatcagaagaaatttgaagaggacattcttgcagaagaacttgaagagttttttgattgtgatagtgaagagcatgagcatactgacgatgagagtgttaatgttgcgcatgttcagatagaaccaaaactgacagtggaagatgtggatttgttaactcacattggaactaagaaaataacattaaatgatgaaattatgatattgcagcctagaacaaggcaggaaagaatagataaatttaaaaccacaattgcaaaaaattttggattgcgtggggaaattttgaatgaggaagccacaaagtacaaaattagtgacatgacaggatgggtgtttagtgccacagtggagctacacaaaggtggccacatgggaagcatgaaattgataaggggtgctgctaaatacaacgacatgtacgttaattcaattttgcaagacaaccgtgattatttggtggcttgcaagcatgagcctgttggcgagtggatttccaagtacagtgcagtgttgcaacagctgctaattgcacaactaccagcacacattggcacgttggtgattagagaattggaaaaaagaaaagagttgcagtcagacagtgaatcaatagcacaaacaagtgaacatgatgttgacattaccactaacactgaacaaacttcagtggcgcccaaagataaatggctgcgaaaaccaaccaaagactcgagtgggccaatgacaggtgatgaaaatttgagcgggaaagttgaaaataaattgtctgatttgttaacaaccacaaattcacaaatgaaaattgtcagttttgccggaatcacacaggagtacgtaattagtgtggcaatgcaaagtggcatagatatcaacacatcttgcagtaaacaaactaacgggtgcattataagcataaactcaggtggagtgttaatgtggcgtgttagtctaactgacaatgggcacacagtggagtcacaagtcgtgtcttgtatacccgaatggtgggaaaccgtgcaaactgaagttatggcaattaattgtgaagcagttaaagtatatcaagtgtcaccaaacctgttgtggaaagcttgtgacccaatcacagcaaaatattggtcaaatgtgttgaaagaaaattatcaagatgatgagttggatgaaccgaaaagcttcacacctttgattggaacatcaaaaattaaaaaatcgaagcaaaaaccacaatgggaaattaaaaagaatctaaaaaaatttttgagacctgatgtgatagctggtgtgaacgctatgaccagttcacgagagcatttttgttgtgggacggctggtctcgctgacgctgaagagttacatgacaacgcagttgtgcgggcggcattaataaggccgacagtggactcagagcaatgcgtgagagccattgcagagtggtgctttttcacgcaagctggaggcacaacggtaaacttcaaagcccacaacaaagtggtgactgtagtttggaagattcagtgcacattgtgcgggcaattggagttttacatagggaaaactaaattgctggtaatttcaggaagaccagaaatgcgcaggctaagaactgtggaactgttttcgaagagaaatgatgccatagtgtctgaaatattgagcactgtgagaatggaggaaatcatagaattgtggaatttacccaaaccttcagggttttgttcaacagttttgataatccccaatgtgttactgcaagattggtatcaaatgggcatgatagtggaacgatgcgtgtttgccgcactcaggaggttgaagggaagagtaaaacaaattggtgtaatatatcaagaaaaatattacataaagcaaaatgaacagcatatcgaaaagattgtaaaaagactggagatttacgggaaatgtaaatatgagggcaagttaaaaggtgccagaccgatggaaaactgtatgtttactttttctgtaaacggtgtcaccgttcaagcagcgttgctaaatgacaaactatggataagtgggtcaaatttgacaagatttccatcatcaaccttggtgactgcaaaagatcttctattgaagtgtgtagcagccgaaggggaaaggtggcaatggtggttagggtattgcattaacaaactaatacccgaaacaaaatacattggagcaagaacggggttcaatttgccatttgaataccacatgaccaacaaaacagagatgttcaaattactgcaagaaaagaatgatgaggtgatcaaaagaagtgccatcaaataccatcacattgtgtttgttagtggtgaacagtaccaacatttcagacctgaaatagaagaagattgttacaatatgcccgtagaaaaacatggtatagatatgtatgaaaaagggtttgacagcttggctgagcaaattatggcacgatttgtgtacaatggactgcccgtggggtccaaaataacactaataaccgaattcccaggagtttcattaatcaactcgtcatggggaatgtggtgcaaaccgcacagctctcacacaagcacgagatacaccgtaaatttaatggactgtgagcatttactgcgcaaaatgcaacaagtttatagtagcaaacccgacgttgtgcaatccatgactgaagaaacaagaaagtactacaatgacatgttaggttgtgtcaaccaacagattgaacccaagagcaatgaaccatggtttcatagatcaggtgagattgtcaattcaaccaattctgagtatttaatgttagggctagcaacttgcaggtacaacccggaagagatagcagattgtctgaaaacgcacaacatgaatagagcctggcaaatatttcctataccagacagcagcaaccatataaacagacatgtgaaagatggaaaaatttttattacttactcaaattgtgaccatccacttgaaataaacaatgagacagaaacgctgatcaatttgggaaaaccctacaaaatgaaaacagaaacattggtatggcacagaactgcagtagttttgggacacgcactgttgatagtgacacggttgccgagtgagtgtcagccaccactttgtgcgagacctatggtgtatgattacagagataatagtgtagaatttgttgtgccagtagttaacagtcctatagtaaccactgcaacatccaacctggtggacacaaaaaatattaaaattccatttagattgtacaaagcactaagtttgagaatgctgagaccaggtacaagcttggctgatttaacgtcatacgctagaacatacatgcatggcgcatcatttacaatgagtgggaccacatcaaaattgcccaaaactgttgacacagttatgcaggcatgtgcttgtgtatattatgagagcacacggcttaatgagagcttacaatttatgtccacagaatggggttcggggcaaaccgcaggttgggataagaaaggcatttatgactcacttaaaacagttggactaaacattcttgcagatgtactaacattgttgggcaacaatgtgagcacaaatgatttgttgagtttaatcaacaagttgttgacagttcaagctgacagatttaagatacaaacactggaaattcataaactacacaaggttgtcaaggttaacgagattatattgtacagtgacgggtttgacaatcaacccaaagagtatgaccttggtgaagggttttctatgagagaattaaaggccaatttgaacaaactaacacgagggtatcaaatggtcaacgagaatgcaaaccaattaatgagcacaggagtgggctgggcctgtgccccaaaaacagttgaaacaattgtttcaaaaatcaacacaacaaaatatgattgggaaggcttaaattgtgatgatttcataacagccttagacgaacaagtggacagagttgtcggaaaccatccaaaatacgatttggttaaacgcaaattgcaagagcaactaaagtttcctctacatagatgggatgcaaacttgtggcccaagtcaagatttgatggaaacgccatcaaattggccatagaacacaaaaaatcttggatgaaagccagcgacaactctatgtggaggttgaatggtctgctgaaagagatgaaacacgattatgcagcggttagagattggtgtggagtgagggttgtgctgagtacgattggtaccagaggagatgtggcacctatggtcggtgttggtcaaataatttcagcactaggaggacacatctcaatcgtgtgccctgccgaccaggtaaatcttgttggaaatagttgggacgtgataccgctgaatatagacacgacaaaaatggtagagttattaaacgatctattgaattcgaccaccactctaatgtccaaactgtctttggccacggagctgcaaacaatgttgtcaacaatgttgtccacatgtgacgaaaaattgtcttccgcaataagagatagtgatttagtacttgaaagtccattcagcatgatttgtgcaaacttggcaaacaaaatgaacagaccatttctgtactgctcatcatttccgtggcaaaccatgcgggttaacaagaaaaattttgtgacaacttggatatcgaacataaccaactacattgtagatagcgggtacaaaaaattgttaaacagttggttgagcagcttctgcgattgccccactgaaggtgtgattgcaggaggccaactattgaatttagaactaaatttggtgtcaaatgatatcaatcggccctcaaacgtcattagtgcaatgtacacaccgatgtggaacgcagagttaacagatgatgattatgcgtgcatgtcgtttttgctttgtgagctgtcaattgtggtaacatatggttcaatgccagagtcaagagtcacagagaggttggagcaactgacaaatcagattggggatgccactgtgcacatacttgtcttaagcagggagagatgtatgattccgcggcacactaagaatgtgaaatttaagcaatgccaaaaacaagtgaacctattaatggtatgtcaatgcaccgatttgttaatttgccatgggggtattggtactttaatgtctggtatatatgggggttgcaagttagtgattgacccaattatgctggaccaattgttttgggcagactggtttgcaaacatggggctggctaagttgtggaaagaaggagagacgcttgacataggaagttttataaacacaacacacaccagcaattatacaaatctccatcatcgcatgagaatgcaacatggagtttcgtttgtagcaactggctttaaactgtttttggcatcagggaaggtgaattgcaaagccagtgactgtgtcagtttggaaatgtacgcgttaaaccaggagaccatcgggaaccacagcagaaaaacaaattgggcggaaatagcagaaatgtccgtgcaatttgaaaatgacgaaactaccaattttgagacaagatttaaaacttcaatatcgagagacttcacgatagaggaaaaacgaaccttcatggaccaggtgcgcatgtacagggctcaaggtgatagcattggaaagccattttgtaaacaaaccattggtgacaatgagcaacccaaaaatgtttcccacagaatttcaagtcaacatgggctgcatttaccaacagtggggagacaagagaatgaatcagttgcaggcaacgaatcaccagaagtaatccaaaaagaaaccagtgacaacattgacgagactaaccagcaaactgacgatgtgcatgaagcgacaacgcaaagcacaacaaaaacagcagaaaccaataatgcatctgatgcaaatcaaccagagccggaatttagtgataaagttgaaccaaacaaccttgaaaaggagtttccaacggctgagaagcctgctgctgaaccaaccgctgacaaatctgagcaaagcgaacaaacaactagagcaagtttgggacttttggagggagctgccagtgaagatgaattgttaaatttgatggaggcaatgatgtatgaagacgtgttgaacgcagacagcaacaattgtgcactgcttgatctaatattagaaggagtcctgtcaggaggtgtatgggcctcagaaaaacaaataatcaacgacatgattagctacgtggacaacaaattgcaatccgaggccgtgttgagaagattgaacaattcagcaaagttggtcaatgcaccattgtctcttgggtttggtaaagtaacggaactgggattgccatggtatgtatgcctcacagcgaatgttgaagttggagacttggtgttcagttcaaaaaacacaggagattgtgtgttcgaatgcatggaaaagtttgcccagaaaaacaacctggtttggcaatcaaacgttgtgagccacatgttgggtttgaacagctggccaacggttcaaacagtcatttgcatagttgcaattttgggttgggatatagcgattaaaatggacgatctgcaaatggtggtgtcaaaattggatgatgatttaatttggggaacgccagaattagcgctgaacataactttcaacaacaacattgggcattgtgaactgagaaaatgtgtttcgtgcaaacatcaaagactctttgtgggcagcagaatgccattggacgagacaacaatgacaaacgttagaagcaacttgtggaccattatagagtctcaatttggcaaatcagaagatgagtccatcacgttaaagccagactattttaatgaattgaacggggacaagttgattcaccattttcaaattttcatgcaaggcagagatcttgaagactggttggcacaattggagttcaaacaactaagagtgcagtcattgaaaaatttgggaacattggtttacgaacggttgcatgaacatggaggtttcttgtgggccatggacgtgcgaaatgcgagggacaacggaacagtatgtttggtgtggaccaggggtggatggagacctttttgtgtgttacaatataacttcaaaacgatcttgtttccaatgggccacaattctgtggatctgaatgaaaatgtggttctgcatacctcagttagatggattgaatttgctagtgttaaaagggaaagaaaaatagtgatcaaacctccaacaggtaaaactatcacagcactaaacgtcgcaactaaatatggtatgcttaaaaaatcaaccattggattatgtgactcagtcgcggacacaaccaaagacatgttggcaatataccaatatgacaaccgagcacaccacaagtatgatgaactaaacattattaaagctttcaaaattgaaaatctgttgccaataggttggactatgacctctgaattgtaccaagaattgacggttagggacaaaagttaccgtgtggtgatagacaatggtagcgttaaaatattgttggagtatcaatcggtccagtgcatgtcatgtatggagttgtggtggcacaagaaaaatgttccaaccataaaaacgagcaatagcatatcagccagcaagcaacaattgttgcgcgcatttcctgatttaaattcgatgcttaaaaatttttatggttcagaacacgggtacattaaatgtgcacccgaagcaatggacgaccagtggcatgaagtaacaaagcaaaaactgcaggagtggtttgacgacgattacgacaaagtcatggccaacctggggatcactgacaattgcacaattaggattagagcaataaaatgtgatacagggacggtactcacatgggacacagctatgagttacacgtgggtccccttgggcaataggaaaggcatggtgagagccattcaatgtgtgttagagtttagagtacaacaagtggcaggtgagcttcaatctgaaaacgttaactggtaccacaatgagttgtccgatgaatccgttattagccaatggtgggagcaaaagaagaagcaaacaaatgaatttgacatggagaaatttaaacacacaattaatacccaagccatgggacaaggttacaatgattacaacgaaacgttgacggcgtcaaccatgcctggcagtattgtgcatgacgttgcaacgcaagaattgcaattaatgcattatgttccggccgttggcgggccaattacctgggactttaatgacatacatgaagataatatcaccagtgacatcgtggacatgtgggaagatttggacttttcagattggaatgaaaaatatgctcctgcgaacaatgtcataattaagagcaagctaccagctactcgactcatgctatctcagaaaactagtttgacagaatatccaatgtattcaagaccagttatgacaaaagcggcaaaccaagagtttaatgctgtcacaggcagattgtgcagagtgcaggaatataggacaaaaaactatgacatgcagctggaaatggactgctttctatcaacttacggaaacaaagacgcagtctctcaaatacaagattttcaaaacaatttaatagggtttgacgaacaggcagtgttagactggattaaatcaaggcctgataataatgcgatagcagaagaaactgagcgcatcttgatggaaggaatgcacgttaatccaattaacatggtgaatgtacacttaaaattggaatccctgcttaaagaagagccagccacaaacttgaaacaggtgaaacctagagcactagtttggcaatgcaaagggtactgtgcaatgttttctcacgcgtttaaacaaatcaaaaacagattgaagatggtattaaacgaaaaagtggtctacgctgatggactgcaggcagatgaggtgtcaaacagactgagactagtggtaggtgatttgtgggtgttagaaaatgatctggcacaacaagatagacagacagatcacgaaatactgaattttgagatggagttgtacttgaaattgggcatgctgcctctgatggttagaatatggagaaatgtgcacaacaactggagatacaaaagcaaaacagtgagtggcatgcgcgacggaatgagattaactggccaggcaacgactgcgttgggaaatgtcatcaccaacttgttagtgcaccgacagttagtacaaaaattaggaaatgcagtcaaattgtttcttgtgttgggtgacgacggaattatgttaacgtcagttaagccagatactgacagactacgtcaatattgtaaacattatcacaacatgttgtgtaaaccaaacgtaacgaaaaatcttggaactttttgttgcatgatggtgtacaaactgcacactggaaattgggaagcaggaccaaacgtggtgcggttaaaaagaaggttcgaggtgactaacggctgtagcgaggcaacattggctaaccatcaagccagatgcatgtcatattgcatgatgcttggcaacattccgccagtagcacaaataattaacagcaatggctggcctattgaaccacatgagtggtattcaacggctgagtgttgggctgctgcggaaagattgaacgggttggaatggggtgatgcggaagcacacataaacaaattaatagatatgatggccaattttaatccatttgacagaaaaattctacattggactgaacgctgggagtaagaagggaggagcaggtgaggggcccccccccc

SEQ ID NO: 831 - DNA, 15098 bp, Pumpkin alphaendornavirus
  source 1..15098: mol_type = other DNA
ccgcacaccaacagtgctatcattgtaatggcttcatcccccattacgtgtagtaatcctagtactctgtataccgtttcgagggagagacctcctttttggaggtctctccttaagaaactaaaactaaagatgaaatataaagattataaacccattaaaaaggtagtaaaaccttctgtagtaaagagagaattttctaacaaactacagggatggattaaattacctagaaattgtagaatgagtttaaacaagaatccgtttcaaaccagttttagaaaagtgtttaaagagaataagtcattaatatttgataaaaataaaattaaattagtaccagcaatccgtggagtcaaaaaatttagagatacttgtggatcagtggcagccaacatacgctttgaagaccctcttgctggtgtggttaacttcgaagctatgcacccattagatatagctagaatctattacaacgtgataagtggaggatgtgaaatatggaagccaccacataaaccaatttccgactatttaaaccataccaaacatgaaggaatagatgacgaagaagatgaagaagaaatgttcttagacagcaataacctagataataatctaatagtgcgaatcgtgggtcctggacgcggaaattgcacttccgagatgttagaagttttaaacaaacttgtggctaaatttggaggttatgaggcttattacaacgtttatttagaaactcaacatagacatttcggatacctacagaaagaagacaacgggaagtactccttcatcaatgcaaaattcaatccactcaagaagtgctcagtgtgtaagtacatgaaccattatgaggagatgataaggggtctcaggatggtccattacagtttaaaacattacagaccgaaatcgaaggtagtaactgatgagttcttaaccacgtataatgtaggagatgtaatcgaagatgtcccttggcgttgtggatactgtttttcagatttaaatttgcaagtgttcgtgcgagaggataagttacaacaattaattcagattgtcactcagcatttgtttgtgctcatgggagatatcgagcaacttctaaagatgggttatggagacctatatgatgatatggatgtggctagcaaagaaaaattaaaatcagctgatcaagtgatcgttaacgagtatttctaccatttgcaacgcaaaataataccagtggggcacgattttgatgctgcacagagtaagactattacagaagtattgggcggttgtttctttaagccacaaagcaaattaaatagtgtgaaacccgaatttatagccgaactatcaactttaactgaactaattgaaaaatcgtgcgctagcaaacaagttgctagtgtagggcaaatattaccaggcagttcgaaggagaatgtgcaccattggatgcatgattctacttggtacagtccagatccggcagtgttctgttgcagtgaaaaagtgtgcggacacaaacacaattacattgtatacgccggtccaggaatttacaatcgaagtttgtcaaacattttagcattggtggatgaacaacgaactttgcaaatcattacacccattaaaactaatcagaacactttagcggatggaacaggagcatatcagcgtaccaatgagcacttaaatttgtatttagatggaaatcccacgcctttaaaacttaaattagacacatacacaattataaacaactatcaaattattaaattagatgacaaattatattatataatggaaactcagaaattgaaattaacaaagatcatgactgtagtcggacctttctctgacaaagttacttacccacaaaaattaattaaagatgataagggtgttaaattacgcatgtacctaccgaacattgatagttttatgggagatttccgaggcctgaattatgaagagcaggagtttgaattgaacgtgtcattgttcagatatttatgtttgcgtaacacatcaggaaaggtaagtcatgacacactacgctcttacgctgtaggctattcactacgacgatttgtagtacacagcaaagtagtatcaaatcccactattgtgtatcaagacatcgacatacatgtaattctcagcagggtctgtatgatgaagttgaggaattgttatgacataagttatggctactcccaatttgcaaagaagctaggtccattcaggagttggctaggtgatgtggagagtgccatgacctcttcgtttttaggcttaataaacaaattggtaacagatgctttgggattagattggaacgtggttcttaacttcattgatgacatcaggttacaaaccttaattgatggtatttcgtcaaccaacttctgggaaaaattattagctatggcagagaatattaacacagaagatgttaaagtagtggatcttgaccaaggggttgatgtgttccttggaccaaatataggttcttgtgaccatcacaaagaaacctgtgaacatgtaggacacactggaaataatcgctgtctgtgttgtaacatgcctataactgaatttgaattttgtgattgttgtacccctaataagaaagaagcaggtaatttctttgacgtggaagaagccatcaagaatgagtctaaggcagaaactgagttaaagaagacaaatcctgcacgtaaagatgtgttaagtcagttggtcaacgaaatagaaaaattggtgtccacaaaagaagcagctaagaacggtgttgagaaatcaagtcattggaagcagacgtttaaaaatgtggcagaaggaatcaagcagggcgtaagcaatcaaattaacagagtaattgagtcgagtgtcccaccagttgaagataccaagcaaactcaaacggcaaatgctgacgaagttaagcctactaaaactgatgaacctccaaaaaccgaagaaattccaacatcatctgaggggtggaaacgtgtcacaagacgaaaatataatgacccccaagatatgtcagatcggatggtggttgagactctagataagttgcaacctttgactgtcagttcagacagcgctgaggcaatacagattttaggctatgattttgtcagacattgtctaaatccactggagtacgagaatatactgaatgatggcacgaaaactatgtacacaatgcctcatttgcccatgggagaaaccgtatcacagaatagggtatttgaggtaactacaaagatagtgatccccaactctgattccatgacgtgtgcttatgatgcgtataaatacggttacgccacagcaagtttagaagaaatgattgcaataaatgaaggcccaccacctctatccacgacagttcttactgtttatgccaaagccaggagagaaaatttaatcattataggaagtacaggtactttacaaatttcaaggaatagcttgacgtcaaataattaccattgtatttggtttgacgagccagaattaggtggtgtagggcacttcatgcctgcaattatacggcgatcatctggtgatccattttattttgcacacacattacctggtagtctagatgaaagaaatcagctcatgaaattgcattacggaccagggacttcaatgcttacattaccggagtcctttaacggaaaagaaaatctattaatggaactgactttttacaacttacacacttacatgtcaaacaacacctctaccagtttgttaacgatcgagaaaaaagacggtagagtatttttgactaataacaaggattcaaaagtacacgctacaaatagagaaaaaattcatatagagataccatcacacttatgcaagtttgcagacaaattgcaactagcattacaattcaagttaacagccgaggatgtaccggaaatgagacatataagtgatgaactccctaacaattatgaatacgaaattgaagaagaagttaatgagatattgcgcagttttattagagtgtcaaatgttcaatccggtttagatgctaaagacattaaatttccttataaaggaaaattgaccagttggtatggtaggagtaaattcttattgctaggcggagaaacacacaaaatgaagagatatgatgtccttgctttgaagttagatcggaaaatagaactagtgtacgttctgggaactgaagggaatagtgtcattttagacaaaccagtgataactagccaagaagtcacagtatatgagttgaaagaatccattggtagcaagatcaggttgttggtcggcttatgtcaaccccacatatcaattcaaagtctaaagaacaaactaagtgttgcaaagtacataactgggccagcaggctacggtaagtcaaccatgatagcacaacaagcaaaagctggagacttgtgtgtggcaatgacctcaacgtccgtacaagcactaagacaaaaatgcaagaaggatgtgagtgttctaagtatggaaagggccatttacgatcactgtaaaactaatggcaccttgttcatagatgaagcaacaatggccaattggttacacctaggttatttgtgtggcgaggatgcacaaataatgttatacggtgcggacaatcaaataggaaagaaagatatgagtgccactcctggagtaagatataatgtaaccgtaaaggatttcttgaagaaggagaacattatcaaagaatatcattcttataggatcggtgagccaatggttaatttgctacaacctatagaaccaggaatgactagcaaggccgaccacaagaccacctacaacataacaaccttagatgacactgagttcgaaaatattaaaacgatagtaacaagggctaatccagatgtaattataactccttattcacataacagaaataagattaaagcactactggggtcgctagacgtaaaagttgtgacaacgcactcattccaaggtatggaggtgaacacagcacttgttgtattgagggaggacatcaataggtcaagggaattgaacggtaatccggagtatctaaactcagctttgactagagcaaaattccacactgacatagtagtttatggacagtacggcacaataaccgacttgcaccctctgttaaggagagtaggtggcatgccaaatctaaagaaattgatagccccatcaagtagtaaaataccaattaaagataaaggaattataatagatcctgacactggacttccattggaaatcaatataagaaatatgcacaatctaactcaaaatatggttgacaaattaaatgaccttagcatatctaatagtggggtgacattaaattacgagaaattggctgacggaactagagttgtggctaaactcggaaacagcacagttagtactgtaactaacaaaaatggagtgatagatgtacaggcaaacagttttattaaaaataagataatgaataatctggacacgaacataaccattccggttcaaaaagagaaaattgatccgaattacaatgtgatagaattgataaacgtgagttttagacaaactaacaaactaagagaattagcttggatggtagataaaggtgtcggaaaaaccatggagatcactttgggaggagaacggataaaagtcactaaagatagtggttgtccgttattctctggtgcaacatttgagtgtaaagatgaaaaattaaaaatatccaatggatggcagagttggacaaagaggaaattatattttaacaagaacatagaatatgttaggttaagtcctatcataaattggttagaactaagtcatagtgaattgagacaccataagttaaaatcgattggttggttggatgtgatgaagggcgacactgtacatactttatggcaattccaggaaaggttgacacaagtacacttatggttattaaatttcctaacagccaatgcaaaccctaaatgttactttaacaacgtcaagaacgtctccaggtacaataagttggctcggtcactaggattaccccctgtctctcaccatcaatcagtggtatatcatgaaaacttcatagttaatacaaaattcggttggtggcgacaaaataagtacaccttaggtaacggcgatgaaatagtagcagaagttagtagccgtgataatgaagtggtgtggagagtatttgcaatggaatgtttagcagatatgagacacacttaccctaaatgtcagggaatatcagggactgattttgatatacctggattacatgttccactacataagcatatggccaaaaacacagctatccatcaattggtctgtaccaacttagcaaagatcaaagagcaaattcaaccacacactcatgacattgtcagaatggataagagaggaatggctctagttaaaaattacctaaatcagaaatacccaaagatgacactcacaactggaagttatgaattaccaaactccccaatcgaaatcgctttagaacaattaatgatcaacatggtaggtagtcttgttaagaacagtacgaatttagtagcttatgccggttatgtcccattagctgtagctatactagggaagtactacattaagatggccatacctcccttggatgagtatggcaggttttattacgatatgagcaagccacagcttgattctatgttggatcattttaactccaccagaaccaagaaagtcgagtggtacatcggaacggaaactcgattggaaagattattgttaggtactagactttcttgtatgacccctcgaaaaattgatgaagcattaaaccagaccaaaaatgtctatggttggttacccatgttccggaaaagtacagataactataactatgaccacaaaaacagcctgctaagcttcaaacatggtaaattgtctaatcctttgaatcctgaattattcaattgtggattaaatggcaaacctatttttgtcaattccaaagaaaattattatctcgaaatgtcaacactcaccgaaacgttcgatcatagactagtgcaaatcaccaaaagacaaataccaatagagaggtacattgataggaggataggtagttattccgaaatgaataacataataaaaatcaaagtaccatggatagatctagatttgcttagagttatgtctgataggcagatcttaacaatcaaggaattggtgataaacaagaaattattaaggaatattctcttacggttaatgactggcgaggatagtcatgacgatgcattaaactacgctagaactttagaatcaacacaagtgatcaccgacaaagggatagacgatttgagcacgacaaacctggttgtgacattaaatactacgtggtatgccatatacattcacaatgattacttacgcaaattccaaagtttaatatatgcagtcaatagcacgcaaggtcgcccattagctgtaggattactagagcaattaatttctggatttagtaagttgttaggcaaggtgagtatggtggctcaagacatatgcgagaaatacttaacgaaattgaattccgcaattaatctcaccaataagatggcagattgtatcgaggaagcaaagaaaactaactgggcccctgagatgagaaatgtgtacttcaatagattttacttccatgacgatgatttaggtgacataaacgcatggtttaagccaggagatgacgatgatgataactttgatgatgataaaaatttaaagagacaaatgatggaagatgaaaatgactatttcgattcacaagtgggaagtaatattgggcgataccgcagtattttagataagggcaaatccccacccacttccaattatgaagaaccaatgaatgcatctacatctaaaaatcaacaatgttccaaaccgtcaagtgaccagcaagcagatgacgatgaaacagattttgaagatgctttgagttctcatgaagattttaatgaattaatagaaggtacaccaactagcgaacggatcacaaatgaggacgtgacttttgtaatttctagcgataataccctttatctagaacagaaattcgaggatctgatgtgtagaaaaagaattttgcgctacttagaacaattgtgtcaatacaaacaaatgacacaagaagaagtaaagagatcattagacgtactacatgcagaactaaataaaaacaaagaatttaattttgatgattatacagtcttagtaagtgccggactctgtcaacaagatgactttgcatctccaaaatacaatgttacaccattgaataaaattgaaattccaaccatatcaaagtgggaggtcaaacccattaaatatgtgcgaaacaattatcatatgatacccaaagttatatggacttactggcattcaaatgtaaccagtcgtgtaattaagaaatgtatggattcaatacaacatcataatcctgattatgaagtcatagtaattacggataagaatattcaagtttacctaactattgacaacctccctgcatctacatctagaaacctagaagcgaagtccgattggattaggttaaacttattgctgaaatacggtggaatatgggttgatgctagtagtatcggaatatcaagttttgatgattatttgcaagaggcaattgattcgccaacaggagttttacaagtgagtctcaactctagggaagagcctgtgaaagtgtacgagaactggttcgtagtagcaccacctcataatccattgattaaggaatggttacgattgttcgaagaggtactagctagaaatattgtcgatttatcagcattggatgcttatttagaggataagttcattgaatacagtgcagtcaaagtcaagttaggggacagtaagaggttttacctgaaatgttatttgactgaaacgttagtgagcagggaaacaggtttgaaaccagtcgctgtgatagaggatgatcgtagagttgatgtccatcacgacgttaaatgggaagattggaataaaattgctctgatgtactgtctcaagcatgatggaaaaatgaaagttcccatggtgaaaatcatcgatatacatagaagaaacttagaatattacctaaagatgggtggagttgtggagcctgaatcttggctaggacaagccaataataccgcaaatttagttggagtaatcacggatcctgaactaccctccaaaataattgaattgataaactcacattatgtaaagatgtgtgtagataacaaaattctagctcacaaaaagagtagtgtaaacaaaatacacaaacaagtcataaaaattttgggagataaagttgatgtcaagattactgatagtttaagtaagataggcaatgttttatttgagctgggtttactacttatactcaacaaatatgaattgcaagatctattaagtaaaataggggaattagaagatgtcaatcaaatgaacgaaatcagaattgtggatttcgtagaacaaacactcaatatcaaatcaagacacaggtacaagttagtaactagcaatttagttcagataaatcgatccaataagtacccctcaagaccaaaatacgctgaaagaaatggaatcaaaataccattaatcatatggtcctattgggatgacacaacagtcaatcaattccaagttgatatgatagacaattggcattaccacaatcaagagtacagaatcgtgattattaacaagaattctttgtcaagaatgttgagtaaatccacttatgaactaataatgagtcaaactcctcagtacagatctgattgggtacggttatttgtactacaacaaataggaggagtctgggtggatagtactgggatcttccaagattctgttcatccgttagtcttggaaaccttgacacatgaatctggaatgtatcaggtcagcatacaacctagaacaacttcaccacgttattatgaaagttggtttatcatagccaccgaaaataacaaattaatgaaacaatggtttgataatttacatgaaatgaccaaacacgttcatccaagtggaagtaatgcactcagttggttagaacaaaattttggtgagtattacaatgctagtaagcatttgatagttccaaatctcagggtgtatttgagggtgtgcttgatcggggtaataacttgtatgcaattaggaattgagcctttaagcatttgtgaagacgagggtgaagtgagtatgttccacaaattaccaagaaacaagtggctaaacttctggaaacttttgacggaagaaccagctgaacaatgtaaagtgacattcccttttattaaatggataggaatgcaacgtagtattatatttaggaacttcaacccgatgataaagcccaggccaggcagtttactcgatcaacaaatgtacaaaatcgaaatcgattacgatataactaaagcaggtgagatggtcattcctaataaacatagtgaagcattagtggcaaaacccataacaatcagtcaatatagacaggcaagtacgttgataatgtgtataggtagtgggggagacatattgcaattcataactctctatgacatattggaatcgatcggaatgccaccagtcatcattacccatgccgatcatgagaggagtttgggtaataggcgaaaacatttgttaagcgtcaccgctgaatcaataatggagaccgtagatacaaagttgacaaaaatagatttgagttccgatcttaggagtatgcgacaaatgaaaatgatggtcaaagaactagaagaaattacatttaattatgcgcatttttctaagttcataatcattaacagtgccgttccaaatctaaaatgtttttctgaaatagccgagtttaaaatcatagaaatatcaaccttcccagtggattgggtgttcggagacaatactagtgataaaggatacagtgcagggattaggcttaaaagatggatcttcaatatgatgagtgacagaaagaagatacacaattttgagagtcggtactcttattacaactcttgtagtaaattgttgtatccagagggtgataaattcattggacctttgaccctgtggggttataaaagtactgcagattacataacattttcggatagagacatattggtaacgtttggtagttgtgataagacaatctcagtagatcacaaattgagtttgatggacaatttgattgcaatgggacatagtataatttatcatgacccctaccgtttatgctcaattggtactagaatgtgtgatgaagtacacaaaagacaaggtaaaattattgtaattgagtcttttgatttacggaaggtaatcggatcagaattgatcatgcttactcacggtggccacgggaccgtcatggaaggtttaatggctggattcaaattggtgatacatccgataatcgctgatcaatttcaatgggcgaaaaggttaagagatttaaaattggcgtcaatcatatatgatattagtgacagagaacaatgtgaggtagcattgattgaagtgaatagacatatcaagtacagcgaggtattagggtctgtccaaagtattgacacgttgagattcctaaggacaatcaatccaaaggcattgttttatgacccgtcagtaagtctacgagcattgcgaggtgaaggtatactagatcaacaagtaacgtataagaaaggtatttacagaattcgaaacgttgctttctctattaaatacaaccctgtagttgtggataaatgtgtgtatgaaagcaccaaacaccagttgacacccgaaggagaacttgaatttagtatgctcagggtattaagtagcaacaaattaaaagaatctgcagtcaccgagcgggatttgattgatggggtgctcagcatgggattgaatattgtcattatttacaataatggaagtggagttgtacacaacgtatttaattctaagtgtttaacctatcatatagatagaagttgtctaccatggcatgttagtgttccagaggtgatgagctatcaagagggagaagtgatgaacatgttagcaacaccagtacgggagttgccagatgacattataaccgagagagataactggagaagtgatttctctgtgatagaattaactaacccgagggtgttatgtttgaaccaagggaaaaagaaaatagaaaatttgactgcccggttacgcggatttatgttgaacgaactagggtccagggcagaaatacattgttgtagattagaactacgtagacacggatatgttcatgtgggagattatgcagccccagatcagccgttatccgtcggttgtataacgtccgatcaaggttggatgttagttacgtggcaagttaagaataaccaaatgattatatatggagaacaagggatatatacgtactccgtattagtaaatctgcacatacaagtagggatcccgaaggccccaaaagcaatcttgagcaagacaatagagttaatgagcttaaacaagactacaaagcaacacaccattatcaataatttaaatccaaggagcagtcaaatagtaagtagttacatgcaaaaatatcgtttgattgtgagtgattatgacaatagggatcatcacatgtacgatgaaatgactcttttaaagagagcatccgagataatattccacagtaataggaaagttacgttggatgatttcatagaaagtcacggagctgcttacaacagattaactttgaagcaaggaatggcaatctttgagcattactttgaagataaagatataggtgccctggttgtaggtgctcacaaccgatatgacagagataaaggtggatttgaaactgctaataggttagatgacgacacgattgcatttatccaacattatttttacaatctaaacggcagattaatagctagagacacttgggaaattaatggagttgaaatactgagttacgatgagattttaccgcacaccaacagtgctatcatgttcacattatcagaaaaagaaaacttacgcacagttattaagagacatcctcattgggaagtagcacgtttaactctagctgagtttaagaaaaacccaattatccacgtgcaaaccaccgacaatggatgtataattctgcagaactacttaatcatactccgaccaccgaagttgggaggagatagcgagctcgaacgacagtggtggagaataacacacagaaagactgagtcacttccaacacctggtaattggtgggggatgaaagtcaaagaatccaataaaacaaaaagcaacttcaatgatgtaatggcaattaatgaattacactatcatgagccaacaacactaagtatagctttatctgacgacgttgagtatcaaccaccaatggacatatacattgctccgtacgaatcagtgtaccctgggagtatattagaaccactaacagatttgcctgacaccattgccatgcaattgtgggaagataatgatttaactaactggttgaatttatacgccccacttaataattgtatcatcaaatctagagagctaccaggaaagataataaaatcggaaaaattaacaatggtaaagtacccgatccgatctagagccgtattgacgaaagtgtgtttcgaagaagggagaagtatcattggaagaatgaaatcggtggccatgatacgtacaaaaacacccaacccttatagattaacactagacattgcagatacatactttcgaccagactggcaacagatgatcaacaactataggcaagaattattaatcatcagacccaaagatgtgaagaaatggattgaagagaataaagattgtgagaaaattgaacgagagttaattgacctattgtgtggagaattgatatcgaaaccaatcaatgatgttaatgtacatcttaaattagagagtttgttaaaagaaaattttacgattatgaccatgcaacaacaagcaagaatcatcgtttggcagagaaaagcagtttgtgctatctactcaaacctctttgtagaagttaaacgtagactgaaagaagtgttgcacagaaaaattgtatatgcagatggactacgaccagatgaaatatcagccagggtaaggttagtcaagaatgtagctggtttttttgaaaatgatttaactaaacaagatagacaaactgataaacctatcattgaagtagaattgatgatatatgatttattaggagttcatccaaatgtaatagcatcttggaaagaaatgcatgaggtgtggagatttaagtcaaatttgtactggggtcaaggagaaggtatgcggttgactggacaggcaacgactgcacttggcaattgtttgaccaatctgcaagtacaccaaaactttacaaagacaaatttccgtatattgcaactagggttatttttaggtgatgatatgtgcatggtgttcagtgagaagccagacacgtcaaatctcaggaaagatattgcaaccaacttcaatatgcaaagtaaagattcttgggtgataaatggagctactttttgcagtatggtgatgactagaactaactttggagccgaattagcaccagatgttgtgagacttaaattcagatatgaggtaccaaatggagtgcatgaggctacaccaaccaatgtactaatgagaaaagcttcgtacctaatgatgttgggtaaaggtcctaatgttgacgatacggttaagatgttaaacttacctatcaaaccaatagcatggtacaactttgatcacatggtgaccgctgtggctcataagtataatatgaacgaggagcaggttagaggttattatgatcaattgttagccacaattagaagtgataacatttattcacatgtatttagacatttctctaataaatagtttcttaaggagaggaaaaatcctctctccccccc

SEQ ID NO: 832 - DNA, 17486 bp, Rhizoctonia cerealis alphaendornavirus 1
  source 1..17486: mol_type = other DNA
actatttaaattagtcatgcaaaccaaccaaaacactacacaaaatacaatatcatttaatgaacaaatgcgggccatacaggcccgctacaatcagattggaataacccccgcgtcctcgtctgataacactctaagcgggggaaaacatgacaaactaagtcatgaatctgaggaacctatcggctatctgccgacgggagtcccgtactttaaaagacacgttggtttcggagaacacgatgaaagcattgcctggatcggcgattgcgaattgcttctaaatgctaggacatacattttaaactcagagcataaaaggaatgatcctttatgtaaaaaaatagtatcaaacaaaacgatggaagaatttttaaaatcttcctaccctgacttaatcactaaaatgaaactatttgatgagtcagaacacacatttggaacatgttttgaaatcttatgggtcatttgcccttggatacaattaccatacttcaagtactgcgttagcaaggacgttactctctccgaaattaaaacttgcaattggctcactacagccacttatgtgaccgacaagtgttggcataaattattcactcaaccaccacaggatgataggtacccttggaccaaagaagactggataaccaagcaacaagccaggaccctctcaaaagattggcccacacaggaccaaccattgatccaagcgcagcaaatcacgccagggatgtggctgatcaccgagggtgaattaacatttgaacaagtcatggacacattgccaacgaaggctcgaatcggcggaaaagactcacacatgattgatggcaataccgttaatacgtgttggaatagcagcactaaagaactctacgctgcaacacaggtaacaatcgatgtggcaaaaactgaaccaatcgagccaaaccacacaatgtcgttcgtgagagacaaagacatgaaccttaaacgacgatccaggcacttctctgatgccgacgctaatgcgcaagctaggttgttaaaatcatatcaatccattagaaggaataggaaactaaaattgcacgctagcgagggagatgaagatgatgacagatttactataaagacaagagaaatcaaagtgccagaattcacgatcaagtcaaagccgaaggcccctgtcgttcacgaagaaaactgtcggtgtgacccttgcttggtagctctagtgacccagcaccctgacagcagtaactggtctgccaaggagcttctagagaaacaaataactatgataaaggaaataagggaagcagagtcaaaagggacttttaacacttacattgaaccaaaaccagaagcgccaacagctgagtctaagccaaaggtgcaactaatgaaaccattgacggttggtgggaaaggcggttgctggaagtggttaccagttaagaaacctgctgtaaccagccttaatgaccctctggcagggcagatcgttcccgggtatgaaggattatattatgccagggaattagacggtgaagccatgccaatcaaggaaattatagcccaaatggaaaaaacgatagaccccaaattcatgatatacaagtctatacgcgaaatgtgggaacggaaagatatcaaactaagcaaaactgctgatggaaacctgcatgttgaaaaatgcaggatcttgtacgaaggggaaaagtatcaacctggtgaacctcaacccaactgcagcgttttgtccatcttgcctattctcaaaaagttagatgacgataatgacaagaaaatgatggccaaattgaaagatgaatcaaatacaacagtgacaacgccaaccagttcacaagcagctcctacaccagtagcggtggcgacaccggctcctgaaccagtaggcctgtttatgaggagcgaccaaaatatatcaaacttgttacctttaactgacaaaacgccaggacccaagttagtcaaaaatctgcttagccagatggcattaacaacccggcaagatctgttacccgacaacctaaaagcaagatactccattgtgaacttgcaaatcgccaagagtgcagacaaacacgtatatctaagacaatgcagaatcttgcaaccaggagaaacgtacgggccgggcgaagccaaacctaactgttcaattttatctctaataccattgcttaaatctctagacgaccaaagggacaaagagaacttggaagaacagatgaaacacgtcaagtcaacggccctactgggaacgaaggaactcgtcgaattcgttaagaaggaaacatccggagaaggtgcaatacaactcggaacaactgaatgggacatagcaattaaatctgacctcgctaaagtgcgcaacattttggctaggacagctgcagaagtcactaaagtgaacccaggcacagaacccaaggaccttaaccggattgaagaagcattaccacaattccatctggtagagaagaagggtttggcaaatccacacgctatgattgctgtgacaaggaaaatgatttacaagtcactgaagaacatatacaaaggtcgacctataattgacgttggtggagacccaacccaaggggctgataatgtgcacactatgcgtccaaacttggacgttcatgatggattaaggaaaatcacaaagaagaatgaactaggttgtgaccatttacttagtgaatgcaactgcaaattcaaacccaactcagggttgattttcgttgattctatttacgatatacaacctaaggacgttgtaaaattctgtagggagaacaaaatagagacattctactacgcaatttctacgcatggaattcaagtcgataaaaatttgaacgctttgcctttttctagtggtactgcgattagggaccaagagtcgatggtgactttcttgactggtgagagcaacccttacttgaactctgaaaatttaacgcaattttggcagaacgttgacttgattcatgatcaacacacaggcttcagagtgcacaccatttctaaagttggaatgcatgtggtaaggtcttgccatctcctaacgactgacgctgctgtttacaaagaattgaagatagtcagtacaaaagaacccacacttagagtgatggtcccaaccctaaagtacaacacaatcattggatggaagggagcgagctacacaattgtgaggcaaccattggaccttaatgttaatttcttcaatcaattgtgtgatcgaaacattaatggcagggtcggccttgacaccttgacagagtatggactagccatcgcacacagtaaatattccatgcatgacaaaactatcaccaactatgacatcacagctcgagatatcaggttgacatcatacttagccatgatgtacatgtctcgagtgaattacggccttacagaatacgctgacgcttcatacactttgggttcattccagcaaataagctggtcaacagtcatactgggggcgcagatgctcaacagctgggcaccccggatcttagagaagcttgggggtgaaacatttgctaaaatggccgacaaattgctctcaaacggatctattaagatggacgatgacgctttcaaagggatctgggatcaattggacaatgtcaaacacatcacaaaaactcaatccttgaagattatgccaaattatgaatccgtcaaatcaagctttatttgccaacatcattcaggactttgccaacacaccggagatgacaagtgtacgtgttgtggagctgacgcgaccggtgagttctgcacatgttgcaaatcagcaggccacgcacacgcctgtggtcacatatgtatgattgggcacggagatggatacattaagtgtctgtgttgcaaaaacctgggatcagccaacccttgtgctaattgcaaggaggtacgtgtagggttggtggatgacttagtccaaatcttaaccacgacaccatctcaccaagtgacgaaaacagcctatgcaaagccccacattgcctctgaaataatagattatttcggtaaccaggtatacagtaaaagaccggagggtacaatggacttgggacaaaattggcacaggcacagttgcgtcaagtgtgggggggtgtatgaacaccaacacaaatttaagaacattcaacattaccaacatgctaatgagtgccctcactgcaacgaaaactctaaggctgttaaaaagaattacgtcagtgtaaaatcagttgacgcgggtcatcttgacactggaaaaccaatacactaccaccagtgtctgtgtggcaagccaattgcatgcaattcctcaactgcagcccacacggaaaaatgctctgaatgtaaagctaaatcgttacaaaaagacaacaaaccttcacgatcctatgctcaagcattagatactaagcctgcccaaaccgagcaacaaccatctcaaagcatgattaaacctgcatcgatccatgaggatgaacatgtgcacagatgcccaaactgtggcaatgactatgcacactctcacccttatgagaacatagtgcacgagcatccaaattgccagatgtgcgctgttgatgctgaacaagttagtcctggagcttctttgagcttcaaacttttggaaatatttgattccgaattcgttaaaatcctttatgaaggttggagcacacactgggagtcaaagactactgtagatgcacctttcggaccaggaagaactaaagttcattatccatgccatggtctaaacacctacccagcagggtctttcctggtgaggagcagagtggaagtttctaatgatgacaagatgtgcggattatacgcgttatcaatagtgttcaatggtgtctcgcaccaggaattgaaggatgtgacaaaagtacatgatacctggagcatgattgaaatgttgcaattcgctgaacacacggggaagagcctgttagttataactgatgaaatatgcatggcctacgtcagtcctaatgatgaggatgttatcccgtccattttacatgtatttgatgatgaacacccaagtggacattgggaaccttgctcggctgtacaggtcggagcatcgtctgtttggccttgcccagacaaaatgtattctatgcacagcttggctctggacaacaacaccgacgtacagaatatgccgaactttgacactttaaccatggaagaaagggtggaatatttaaaacctttaatcacttcattggaacagatcaaagaattgggggcgaacaaaatggaagactggaaattgaccactaggaataaaatcacatatatgaccaacaatgctggcaaccaacatgaccctcaccttggcaaatttaattggctagtacccgatcaatacatcaggatgcatcaagatgcactatcaaggatgaagacgaaactgcctacaaacctgtcgatagtttctgtggatgctctcagtgtaaatgatttgccacaagccctagatgcagaactaagactatgcctagcggctttcaattctattgtggggccgagtgccacttctgcaaaaggcatctgggtgtcagcagagataaccgcaaggaactcgatctccttagtcggaatcacaggcaccaaattgatgcctggcgatgtaataatattgaaggacaatcaatacagttactcacgcaccatcttaaatattcaagccacccacatagtagtggcgaaaataccaactgtgaagcgaaacttgcaagttttgctacctaaagttagcatagctagtttagcaataagaattgtaggtattttgacgtgcacatggacatctgacaaactagctgaagttctacgcaacgccatcacttatgacggggtgccaggtgcagggaaatcaactttcattaaatcaaagtttaaatcaggggacattgcttgtgcgaccactggaggagccatacaatcaattagagataaaggcattaagtcagctatgagcatagagaggcttacatacacaagaccgcagtgcaaaactttattcattgatgaagcatccagtttgagtttagccagctttgccatatgcttacccgaatcagttgaatcagtacacttattgggagacttggatcaagtagtatatgttgacatgtacgaaacatttggcactagaaaacaggctctagttatgcaactcgccggaaccactgttccaatgtacaagtcttatcgaatcgggaatcccttggcagcagagctcaaatacatcaagccggcatttgaaccagctgctcacgaaactaaggtgacactgctgaacgtggcatcctttgattcactagatatccaaaaattagtgactgattatgaagtggacatgatctgggtattctacgatgctatgcagaaagcccttaaaaaggtggtcacaatacccataaataaagtgcatgctgatcaaggcaaagaagcaagctgtgttctggtcattcagggcactaacaggagtgacggcactggttctattcacctagacagaaactattgttattcagcggctagccgcgcaaaggaccatctggtctgggtaagtttgaactgctacgaacaaacgcacacgttgcacgacaggataatgggcagacacagcctgacacgtggaaaagggaaatatctagaccaaactaagaaaatagacggcaaactagccattgatgaattgagaatacatgcttcatctgatgtaatccgtctgtacaatgacacactcaaaccttacatactaattagggccgaatcttttgttaatgcagggaaaattgtggcactggaatctgaggatctaaatgacacgatcggatacgctacatgcaatgggtaccaaatagctatttattacccactcaagaatttcggaattgagcatatcatcggaacaaaaagggttgtgtctgtcgggccgaactcggaggaatacctatggttcagtgcaaaggtggagcagcgtgtctccgacaacatagacaatctaattgcattgattttagaatggaatttagacgaggacaagccggtacgagcgatgcaacaattaataagaggtaacattgatgagatgatacaagaaactgggctaacgggctggatggtgactaccccagacaatactgtcaaagtgagggatgccaatatggaagtgatttacacagtaatcttaagtgaggatgggattgacttcctctcaaatgacacaaatgaaccaccgcaactcgacatgtcattcttagcaaattacatgatcacaccaaatcattttgtcgtggaatccgaaacaataagcaccaaatcaatactgccacctgatggcggagtagagataatccagaaaatcaaaaaaatttacaccgtggatttaaccattgaagaagacgtaggttatcgcacaactctctaccgcctacatgcaacaaagaaagtgctgttcaagcgtctcgaagtagcaacggcgttagtagaattgaaccatgaaaaaggaaccctgagaatcgtaagtctggatttatcaaagttggccaaggcaattttaccaatgaaggtcgatatggctcaaattaactcggacatagcaaatcgtagagtgagcgttttgaccaaggaagtggtagacaaacttctgaaattggatgagtcgcccactgttacagccccaccctccccattattaaccttaaacccttggacggtggaagactcggcaccaatccaaccagataaaggcaaacagaagatggaagatatcaccccaagtgaagaatcgacaacggaagaaaagcaagaaggggattcagctgaaaacaccaaacagtccttggagtcaatcgctttccacataaacaaacaaagtaatattagatttgcggatgaatggtctgacaatataaggatgtggataagtgaacaaagcttaacaggagtgggggcattcacatccgtgtgtaatagcctgctagacgccaacaccttcagtccatcaaatgtagatacatgggccagtctaagcaagacgtgggaccatttggagcgcaggtattcagctactgacatacaatatattatcgaactgatagatggggagaacttatgcacaatactaattgaccggaatcacgtgaccgattccatcatcgtgtacactgacgaatggaagcaatcggtcatcgagatggttgctgaactttgccactgtgcaaacatgttatccgatgatgaagtactggccacttggcctgctcaagaacgtggacctgtcccacttgattccacgcccactgatacccctgaagcagacgtcaaaggcgaggaagttagtgatcaaggtgataatgcatggttacggatggccgaagcagaaccagagcgacacgcaaagtttgcagccatcggcttgtttgccaggtggtctatcacacaagctctatctacgatttcaattaacaatatgtatgagaatcacacaaaatacacatatacgcttgagggtgaattgaaagaaccagctgggatagtgtggactgattggccggaagcaaagagaaatttggaaatgataaggaaattacataattcaaagccagccactgttcaacgtgctatggtggacatccggcatggttgcaattgttgtgaacaaccagaaatggtagacattcatgcgcctacaaatgatgtcatctacttaactcagaggacggtgaacattgtgaggtcgatttcagcattgttctggcccttaagtaacacaactcaagaagtggaatttaatgtcaagggtacatcgtactcggtgtcagctaccagcgggtgctctgcttgtacaggattgacattcaagaaggatcaccaagttatagctgtgatcagctcgcaatataggaattggatgcatagaaaagtgtcctacttgggtaaagatggaatgttgatgttgacgatttgtggaataaacctttacccaagacacatcgattacaacaacccactcactaatgaatggcacacaatacaagaaactctaaaagaatatgaatcggatgagttggacccagagcaaataaccacaaccactgggttcaaattgtacaatttcaaaagagcctgttgcgtgttaagtgagcgtatgtcggtgtttattgcagccgtattgcttcaaccaacaggtctcaaagcgctatcagacgccacacaattcccgttggtcatgaaaatatatgaagaagtgggacgcctacgtgatcaagaattgcaacatgctttggcattctttaacttaacttcagataatgaaatgaaactgtatagggtaagggagtttgatgtcaggaacatgagcaatggaatcgaatcaggaattggatttgctatagataaaacggtcttgacagatcttaaagacatagacggtaaaccatataacaaatcactgaatggctggaaagtggaaactgtgtcatcattagcagtagttggggcagctacccaatcactgttagaatggttagaaggtgggccggtggggaagactttgagtctcgtggggcaaacagacatggccgaaccgtggacacaaaaatatgtaaagtttttgaatgacaattggcaaactgctgccattgaaaattctaaagatgtaatttttgatgctcaagatgaatttgatagcaaagaaaccctatctaaaaaacaagttgggcctacaataagtgagcggatggatgcacttttcggagaaagtgacagctttgaaagagctggagccatcggaccagtgacaggaagtttgacaataccatgggaattacaccgagaacacaaaactagcgtgtggaatcacttcatcaagaaagctgcaaaaatagaactagccagtcatgacttgagcagtttaccactttacctgccaattgggcacatcaaagtgttcaaaaatgtggatgcttaccaagcaaatctactcgaccttcaagagcaaaacactagcctattatccagatcaatggaagtgactataaacacaataggagccaaatgggtgagacaaacaattggcaacaacttggtttactctcatacaaatcagccgcaagcaacgatgttgaattcatacttcgaatggatccatgtgaaacctgctaatctgctggatggggacgaatgggaaaatgaaattcaacaaattcgaccagtgttgcgagacataggtgaaatgatggaaaagaccggaaacacaacagatcatgctaaatccagggctcaatggtttacggacaatgctcggggggttggcacctggtacacaaggagtccattaaaaggcaccattaattattacggcaccaccgggttagcaatgcccccgatcaaattcttggctcagcaagagacagaatctgtcgcttacatgctctgtccaggaaaatacattagtagagaactcgggtcttggttagacggagatgcaccacatttcggttacgcatttggtgaaagagccagaccaataaatcagacatggatcgattggatcaagcgtggtgatccaaaaacagatggctcgcgtgtacactatttgcgagtcaaaggtaacgtgctgggtcaccacattttggaaatattcactacttacaaaaaatattctggcccttattaccacatgaacttatgggaaggcaacacagaagagactgtcacgtacactatgccagtggtcaacctggctttgcatgatttatcgacaaagggattattcagcaatcctcaagtcacaatgcctgccaagattcacagactattagaactgcgaatgtgtagacctgcaacctccttcgacgatctccttcagtacctacgaacattgagatacaccacatacttcagttcaacctcaaaatttgcgaaagtagacggttggacacaaacttcattgagatgggcaatgtgtgtgtacttggatagcagtgtgttggcgcagcaagttaaaggtatggcacagttaaaacctgaaaccggattatctggaaatactatgataaacatggcagttgatcgagctagtgatttcatcaaaggaactgtggctgatttgaccaagcatctcaacttgaatttgagctttgaagagttcattgaccaaatagctgaagccaccaaaggtaccggcaaggttggggacgctttgggggcattttccaaaatggtacacgctacgtcagtgaggaaagatcagtacaaaccagaaatatacaaatacacgcatgcaaacgatgtgtctttaaagtatataaaagtcacaaaccccttggaaactgttaaaacgcaattagatgatctgaaaccgcaagctaaaccacggaccgtcgatgtgttaaccaaggtacacaaatcagcagacatcttgatgggaaagaaattggttaaggtagtctatattaatacaggcacggaaggggataaatcaataaatgcgtccgttatattgagtgaaacggatgaagagataatacttacagaggacatcgtgccggaattggcgatggactggggcaaacaagccgtcctggccaaaattccgaatgggaaagttacggcatttttgaatcaagtgcgtaggacgaatgaactcaagaacagcaaagtgctcatgaacgcgctttcagaggcatcttatgtcgtatgcaatgctatggacgggagcgttcgatacttggcaagtgcggcgggtgtcaaatgtgtgttagtaagtggaataccatgggacaacgaatccctcaaaaattatgatatagctggtgtgccgcaaggtgcgtacaactacatcccggtttccatggatgaagtggttgttagatcattcataccaatagatgaacaactatcatataaatatgaggctcaggaagtcaaccaaataatgcccaggttcaccaagacttgtttaaatgtaaaagcgatagaggctgcatgtcaccagcccgtgggaaaaccaattgaaaccgacatatgggtttacaccggaccggtggcagtgagtgatgagacgaaggagcgaataaacgcgctggccaggaaaaatcagatgacagtaatttatcaggaagcaggaaaagaaagaataaacgtacaacaatcaaaaataaaattggcaatagtgcatggaggtgcaaacacgttaaatgaccttttaataagccaaacaccatttgctttaatacaaatgataatggaccaattgttggtggctaaagccaatccgaaattgacttttgatcgattggaaacacttggactaactgaatacttggagcaattcgatcacgacttattccagctgacaacaccatggacaccaaatggagtagtgttgcaagccggaataaatgaagaccaatgggaaattaacgacctattaacgatggcaatgggtgaagactttgaaataaccggagggaaaaacaacaagaggagcgtgacggaaaacatggtaaaggaaccattcaagcttgctttaacacagcatgattcagtgagtctgttgcaatcaaccctgaagaatgttttaaaacatttaccaaccaccggaatcaggtactgcgtaatatatggtgacagcgaatatccagctaaccttaaagcagactacggcatagtagtccatttctatgatgaaaccaagccagaatctacggatactgtgactacgtacgttggacctttgcggggatatgccaagctggtggccacttggcacttcgttcgcctgcaagcacagttcaaacgactaggaccatcggaatgtcactttgaacacaggtggatgctgttaaattacacgaacttcgaccaaccttcggaatcagaaatagtaaatggcaacaaagcggtaggcaagctaacatcgctgacattgaccgatcctttcgatgaaaaaacctatctgttatatgccaggaagttcggcatagacaatgctgcacaactattgctgctcaccccaggcaactgtatgaaggccatgcatgcatgctctgaagaggcgttcaagcactggccgaatgtccaaaggttgacgacttctgacactcaaggcagcatcttgcagtggacgcataacattatgagggacagcaggttggaacaagacatcaatcgcggtgacgatgatgatgatgacgacacggaaggggatcaagacgatcaacctgatccaagggatgactctgactcggatggcaatgcagagcctgaagatgagcattatgacagtgatgaaggccgagattctttccacaccgcatccatccattcagattctggcatggaacgcaaagaagctcacgacatgtatgagagtgacgattctatcgtggagcatgcagacaatgaaccagacatttacgttggtgatgaagagggacagacgtcaagagtggactccacagcggaaagacaaagttcagaacttcccacgaacattgagcgacctaggacgggtgatgagcctcaaaccatgcaagtcatggatgacgacttgtccaaaacccaaagcagtggcttgccaccgcaagatcaacaacacaatgagaatgaggaaggcacagaactaagtcatcaacaaggatttgataaaccatatgaagaggagttggtcgaaataacatgcaggaaaataattgggaaattcacaatcgaagacagactactcaataccacggggacttgcttaatggacgctttgaaattacaaatatcatggcttaggtttgaccctcccatggagtatgcaaacacagcacaattggtggaattctgtgaagataacataattaattgcgcagtactaaacattgagacaaaggaaaaattttattccgatgaagaaattaatctggaagggtataaatatactattgaaccaacatcatccactgcatggctaggcatatacaagttggacggaaccacacacattgtcccgctgtactgcattgaatcaagagatcagcaagtggctgagactagactacaaactttccctgtgttcgacccaattgaatgcaagaattcggaggcaacgggatactggacaccaaacataaatgaccagctgtgtgaagggcacatacattaccaacctctacaagaattagacagtcatcttggaatcaggcccagtgatccgaacatgagaaaattgtttgacaggccaaatgagtacactgttgcatcaattacaaggaagaattggaaattaattaaaaagacaatgagagaaccttacacaatgcgtgtgatgcagagagtcaatttaggctgtttttcaccttcatacacacaagagatgacactcaaccgaattgcttcatggagattgtacttcgcaataacctccgagggactggttccgatgataagcataccgcagaaggttggggttttcttctacatggggcgagatcccccacccactgtcagttccgtcattgttgacgggcgtgcgaacctcatgatcagaccacagaagtcagttacggtaaggggtcaaatgccggatgtgaggtattgggacttcaaggcagcgaagttcgtaaaggcggaagggaaaattgtcacgggaccaggtgcatgcaaaacaatgattatacatgattatgacaatttagaccaccatggcagatcagaccgtgaatggttcaatctggcagaccctgcaatgctaaagtttacaaccaaatggatagataatgaaataatccaagcaatcaaagttaacaagttgacaccaaggattcacattaaagacaacaatgtatgcttcaacattttagttgccatgaacagagcggcaaacattgaacaattctttaaaatgttcaaaataacaacccgtgttagccgcaaggatcgccgaatcaaagaagtcaatatacacactgaaaacaagcaaagttacagcttcgttatgaggaacattagccatctagcatacgatgaacacggtgtggccgaactacacttggcactgggccaattgataactagtgagacagcatgggagcattgtgcaagcgagtatatggcgaccctagaacattccccaacttacattgtcatggctgtgaaacccaatcaaccacattgcaacaaaaatcttgtatctttaaggaaaccacataagggtgaaggtgtcattaaagaagaagctagggagcaaataaactggttcagggaaggtgataaaccgaagtatgatcggatgatgcctgtatacaccaaactgatcaaaacttatggaccagattacattttatacctgtgttctggtgggggcaaatcaaccatgagcagacttactgacaaagtttatgactgtgacagatcagtcaaagttcctgcaatacctgaccctgaagcagtcaatatgggattctgggctgacagaaatgccgttgtacggaaacagttactcgatgacgggttaaagatggtgggaaaagttctgctggtgtggcacccaaattgcgtaccacatgaatggcgaaacctaccccaattgttggtaatcattgacgacattgctggtgagaggctttttaaaatgggcaaccaatcccttaaagactatgcagctgaccatccctccatgccatcagttgtatgtaccaggaaccgtacatatgacataatggtaaaacattttaacatatattcaaaaaattctgccgctattgctatgtcaaatatgacaatggaagaaatcagtccaatcaacaagtatagtactgctgacaaagtttccacaaagtacttcattccgtacataccggctgaccgcatgcaaagtcgaacgacagaaggttatgcgagtatagaagatgaagccgacacagatgtgataaatatgttcactaacagggatttatccgattggttagtaagagtatcacccacatcaaatttagtaataaagtctcatgaacaaccaggtcagcttaaagagatgaacaagaccaccttagtcaggtacccagtcatgtctagacctgtattaacgaaagctgtgttccaaacttacaatgcggtttctaccagattgggcagtgtaactacataccgaaaggtcaaactgcaacctgccatggagatgaagaaaatagcccaagcatacttccatgacaactggcaacacactgtgaacaaattcaatgaaaacatgattacttacaacgctgaggcaataacgcagtggttgcgtgaacatccaggaacagacaaaattcaaaaagaggtcgacgaaattctggccgaaggtttcctcaccaaccctctaaacaaattgaacgtgcacaacaaacttgaatctcttttaaaggaggaaccaatcacaaaggtgcaagatcaaaaagttcgaattattgtatggcaaaggaaaggttatgcagccatctttagcccagtattcatagaagcaaagaaaaggctcaaaactctattgaggaaggatgttatttatgctgacggatacacaccacaagaactatcagccaggttacgcactgtaactgggtcaacgagattttttgaatctgatatggctaaacaggacagacaaacggaccaagaaacgttggacgtagaattcgaagtgtacaagaatcttggtgtacacccaaggttattgtcagtttggcgttcggttcatcgaaactggcgattcaaaaatgcccatatgtcaggtaatttggatggaatgcggatgactggccaagcgacaacggccataggcaacgtgatagtcaacatggctgtgcatgctgatttagtaataaacaacagagataagattcaactaattttattactgggggacgataatttgatgctatgcagcactttcttggatttacaaaaattcaggaaagacaccaaagaaagatacaacatggaagtcaaaccagactcaaacagcactcacgggacatttatccaactcattgcttatcataccccagaaggaacatgtgagttagcaccagattggatccgattgactagaagatttgaggtgacgaacggcgtatctgaagcaacagatgagaatttggaggccagatgcatgagttattgcatgatgttggggaatttaccagaagtacaaagtctggtgcaagcataagggtggcccatttggaccgaaccttggtacaacagtggtttggcatctcaggcaatggccgtaaagcatggtttatccatccaccaagttaacgggatgcttagacatctaatcgaaatgatggccagtccaacattatacactcaatcatgggatgtttgggtaccagtgaagtagcggggctctgcgaggagcgtgaggggcaacagcaccctcttggcccagt

SEQ ID NO: 833 - DNA, 16747 bp, Rhizoctonia solani alphaendornavirus 1
  source 1..16747: mol_type = other DNA
cccgaatttcccccggatccgactaaaagtatttagtcgtatttactttctcttaacaacaattaaatcaaagtatgtcgcataattcaaacatcaacgggcaaagcccgtacaacggcagagattttgaacctacccagaactctgaccgtgaactttacgaaggtaggaaaaaacaaagcatccgcaaggatgcaaaaatggatattgacaggagggcgttacaattgctttcctttaattccattaaacgaaaaactgtgacagccgttggcaacatattcccaatatcaggtcatcacaggcggggcagtgaaaacagtggagccataattgaggcatacaagaaaatagatactgcaagatccaaccgtggcaccctaatgcttaacagaaaaccaatagataaagacactgtcatcaaatctaaagtgggtggcgatggtgactgttggaagaagatatttggcggtgtgacagaagacatgttggaaaacaaaaagttaccattgaggacgatatgcgagaccatcagttatggtttggtaccatactctttgttcccttgtatcttagttggagacgaatgttggggtcgcatgcaacacactcactgggatgatgacagatcagattggttcaagcaattgccaaccgaagtgcagcaagataaaatgttggtcgcaaaaagatttggcagagaatatggtataaaattctcaatagttgggcaagatttgcatgtagaggaagtcggcgtgaatctgacaggctgcgtaatatccttctacgacatgtcagtgcttaaattgcagccactagtcgatctatgcaatgcatcgggcatcagcctagacaatgatgacgacccggccaaactagctaaagtagcaaaaactgaacaatgcgcagagcaagggtcaactgtaacccaaactacgctcggagacacggtgagtttaaatgaacttatgcttggcggacgaggcgattgttggctaaagttagcaaaatattcaatcgctttcacatttggcgaaaaatttgctgcaggtcaggatgtcgactctgacgattctgactctgacacagaagattcagaagatgatacggaaccgtttgaacaacaacccaagccagaagaagaaatcaaacctagaaatttttatgattgcatgagattactactgctatatggcgtagattatgatgaaacagaagagttagattggcgaggtaacaagaaaagaaaacaatttaatctaaaagagcgatctgagcaatacaaacttaaaatatacccaacaccaggcaagccaaatgaattacatctcgaagactttggcaccgacctaaccggtgatgacgtttacacattaaaagacatgtgggctttttgcaagttagatgaacaatccccaaaaatcctggcggcattacaagaatgcatcgataaaccatcagtgagcacatatgaggatagacagaaagcgttttcaggaacacaaaaaccgcctcaacaacgcatcagaatcgtagacagactgctagggggtgaaagcgattgttggtccgctctctatgaggcagctgggtatgacaccttcccagacgcagaatgggttgagaactttgatggatctatatgctactccaaaccgaaagaaatccccgacaaacctgtcaccttgttagaatttttaaacatgataagagcggttcaacaactgggagactatgagcacattgcttgtcacatattaaaaacaggggactcctatcacttagaaaatctgcacctactatcagaggaagatgagtgggatgacgaaacaatggatgtgccggaaggttggatatggacatgtgcctcttggtcaaattgcaaaatacaaagccacaaaatgttccgggacatcatagaaaacagatgtgacaaaaatattgactggttgatagaccccgagaactatccagaatacgaagaatttgaacgtccaacagttgctgacatgatgaacaaagtactcaagcccgaaaaagaacaaccagcagtgaaacttcaagacttgctgctgggcaccaaagccatagatgactttttaaagaataacggtctgagtggcagttcagcaataaatgttggcactgatgaatggaaagaagcgatggaacacgacatcgttaaggttaggagcatactatcaagaaccaggaacaatatatttagaggctcggcagggcttaacgatgaagacattaaaatattagaaaaagacatgcccagctccgtagtgttaacacacaaatctgtgccaaaccaacatgcactattcgctagcagccgcaaagcttgtagccaggttatggtggaactagctgctggaaacaaagtaattgacgtaggaggtgatcctacgcaacatagaagggcactaagcgacgttcatgtgttgagacccatgctcaattcacaagacttagtcagacatctgaataagccgctccctgataacccgaaagttagccagtgcagccacactttggcggcatgcagttgtgattggtcacaaagcatacccatatttgttgattctatttatgatatttcaccaatggaagtattgaacacaatgcattcaagatctatagacacgttctattactgtcattcatttaggaatacagatctaaacgctgggaagggaatgacatccatgggtttgggaatatacaaaacatttgaagatgacttggtgactgcactgcctggtgagtctgtgagttatgtcaacagtcagaagtatgcggaattatgggtcaacgctaatgtcatagtgcaccaacagatttggcgagtgtatgacatttgcaacattgggacgcacacagtgagagcagtcgttaaaacaaacgagacagcatccatttataaagacatgaaaaagacacaaatgagagatacaataactttgcgtgtgccgatccttgacgtgcatgcagtgtcacgacttaaatgggtggatgccaacctggactccaaactgctgggtagtctgctagacagaaatatgaacgcaaacctctcatttaacacgttattagagtttgctcatgctattgcgctaacgaaaatttccacacacgacaggacttttgatctaatgagagtagatgcagaaagttgcaggttgactgcatgggtcgcgtacctatatgctaagcgtcgcacaggttggttaaatgaaatcgtgctcaacacggagtttaagaacaaacccaaatacttcttccaagcgttgcttaaccttggggtgccaattttacaagagtgggtaaaagataacaaattatttgagaacacagaatttgttaacatagcacaaagtttaattaacaactcaattcttaaaacagacgacccaaatttgaacattttgttcgacaacatagatgatttagtgcacacggctgtgattaaaccattcgacataaggttcttggaccgactggccgattggaagtgtgcacatgatctaaagagtgatagcaatggaaccaacaattgccagtgttgtggtagggcgtgcaaccaatcatattgcatagattgtgatgagcattatgaaacaatcaggaagatggaggtgccagaattgagacaacagatagatcaggagataatggaaacaataatagctcaattatctgtgaccgattttgaaaaaccaacagaatcagtcacacatattagggaaaaacaaagggaaccaaaggataagaaagaacaacagtcagaacaggcgcaaatggacaaaactaaggctaattcggcagcagtggacaaagaactgtccgcatttgttgaagacaagaaaaaatattcagcagcagtcactgacacccaaaggaaaaaaccgaccaaccacaatgaactcaaggtcatggccaatggcagccacatccacaagtgcaacaactgtggcaattatttcttggaaaagaacttgacatgcaacgcaaataacatcccctcaagaaatgactgtccaagttgcaatgaactgtcacaacatattgtggtagatgaaaattatttcgagaacccacccacgtcgtttggaacagaacccaaacaggttcagcctaaaccagagtactcaaaagagatcctagaatacggcgagttgctcgggcatgattacacgcaatatttgctagaggaactggtcgagtaccagacaaccgtggtgccccatagagggggttataaaacagagttgccacacatgcctatgggcaggagcgtatatcctaacctatcccaaatcaggacacaggacgaaacaattttgtataataacgatgaaaattgtggtttttacgcaattaaaaagttaatgcctctagcatccttgcccagcatgagggcgatcacaggtcgagatggcaacttcacggccttggacttaataacaactgcagcaagtatgagcgaaaacctcctggtgatcacagaaaactacctgtatgtcaacaccgacaacacaggaccacaccacaccattttgcatgataagaatggtgaaggacattggaacgtttgctcaggaatattagttagcagggaagccatgattccagtacccaagttggcactaacgcaacaagaaatgacttcatacgatatagagttttcttgggaacttaatgctagagagcgatgggaagccctcaaaccaataatggccagcatagtggccgacgcactggtagctgtagatgttgaccccggtgtacagttgcgcacaatcaacgatgctcaaacactgagcaacaacaagaaacagagacatgaaaaacataaaggcatgttttctatcaaaataaacgataaagacttgatcgacacactgtccaagctcaatgagccgaccagagaaaccttatctagcgacctgctaacagtggtagacctgcccgaagcagaggcagagagtttgcgttatttgcgcgatacaaggatcaaactgctggttgggaattacatcaaagcaatgaacgacacaaacgttaagtggcaaaatgttaaagttgaaaagtcaattaatgtcagtcgagtcaaaattaattatcacaagatcaagccatgtgacaatgtgctgatacaattgccaacaggaacggtgcaacggacagtactcaggagtgcaaaacactacatcgtggtaaggactttgggttttgtgggctcatgcaaaatgtacatacctaaacagtcaatcgcatccatactattcgaaatcgaggcactcaacatgctggatgtcaatagaaacatcgtggaacaaatgaaaagaatctgccactctcacataggcacttttggatcagggaaatctactgagatggtagccagaagtaaggaaaaagacgtttccacttatgcttacactaccggagctctgaactcattaaatgaaaaaggcatcaagggcggagcgatgagtgttgaaaaagcaaagtttgattttaaaaggcaaaagatcgtacagatagatgaggccactggtatgacactactcgacgtagcaatggtcacagataacaggacagaagaattgcatttatacggcgatctcaagcaaattggcctgactgacatgaattatgctgttgggtacagacactacatacaggcaatggtgtatcataaagacaagacagaaaattacaaaacgttgcgcactggcgaacctttggcatcaataatcaagcagatagaacccaagctgataccagctgaccataagacggactacaagataataagtctcaacgagtttgatgtacaaaagcttgacgaaattatctcctcacataatatagacacgatattcttcttttatgatgcggatttaacgcaatttagaacacacaccaacctagacagcggttcactcaaactgtgtaaagtgcattcgaaccaaggagctgatggcaataatgttatggttgtgcagaacccaagagtgaaaactaaagacgcaatacacctcaaaccagaatacctatacacagctgtcactagatccaagaaaataaccgtttgggtcacaatcaacttatacactcaaaacattaaattggaacaaattttaagaaacgacgttgaaatattcccttccgctgggaagagatatgagcatgaagatgtgctcaccgaaatagacaagaaaataacagcaacaattcagcctcaatcaggaatgacggctgtggaaaaaatgctagcacacattggcatgatgagtgtcttggatttaatgaatcctgtggcagtgtacccaaaaattgattggccaaactgtgtgttgttggtaacaggcaaaactctagatgacgaggatgagatctgtgcagcattatcaataatgctattgtacgattacaccgattcatcgagcaactcaagagcgctcaataatattcttatcaaaccgggtggattgaactcacatgtggcagtagaaaaagttgatgggaggatgaagaaaaatgtgaacaacaacattaaaagattattgaaaggttacatgcccgcattggagagacttgataagctcatatcagcaatagcaatcgaagaggggttagctcaaaacagtctagaattacaattacatatgaacaaaatatatccgataactttagcaataccagccatgagtctcacgcataaattgtgtataattctggataaacaaaccagaggtatttattacactcgaagattagggctggacagcttggtggtggtggataacaaacaagacatatgtcaagtcaaggtgacgtcggtgacagtgaaacgtcaccaactaactaatattgatgctgttgaatttttgaacaaagctgctgatgaattttccggttatggcgtggtccacagcgacacaaccagcatctcgtacatcaaccaagaagagactctattctgtgataacactgctgatgtgctttcagtcagcacaaacttttatgttatccatgacaacaaggtgtggacagttacggaggaaaacatcgagtataaactcataaacataaacgcagcaatcaaaagacaagtgcatgaacatgtggacttgacgttggtggagtgcattacttcaatctcatccttcacagatgtcgtgtcaaacgatgagttacaactaactgggaaaatcaaaagtgttgcagacctagccgaccccatactgcaggctgaagttttagctaaaaaatacaaattgaactgcagagccgaaaccacagtagaaggccacaaaatcactatgtatgccggctacggaatattatccgtgacggttgcatgctgcgaattttccgcagattggcagctgaaagaaatcacactgggtaacggtttagcaatcataacaaagtcaataggttttgacttaacaaaagatgtggaacaattggcatccctgattaaaggcgatttgaagttgagcaaaattgaaaagaaagtcagaggtggcttggctaatacacttaacaacgaaggagatgaggattcggaatatgacaccgcttcagagggagacgatgacgaggatacaattgtgccaaacaacagaacaccaatagccactttctttgagttaccagacacactgatgaccacgaacgaaaaaactgaagaaaaagatgggaaaactgcagcaaatgtggacgacttaatagacgaactcctaccaagcagacagacttatagttgggcaagaactattgcaaggaaattaaacctagaacctacaggacagtcgagcgcaaacactcgtgagcacacatcggctccgttaagaagggcaaacttctacgctgtcgcagtcagtgaactcttgctagaaacgtttggccggcttaaaggacaggaagacgcaaaaataatggcgaaatacgtcgacacagaagagggcataaaggtgctttcgatggcaaaacagatgacatttgacagtcaaataccctacataaactcccaaacaacaccttttatgaatattgaatttctgacgagatctgcgatcttcggatcaaaaggtgaagcttctagacacagaccggtctctgaagttggcagtctagtgttgagagatattcaccaaaggtcgataaaactaaacaaactcgaagctatgacagactcgcttgtcacaagctgggttactggtatcaacttcaaagtgcttagcttacatggagggttgttaattggcctttacgctccggactggaaaacaaaaggactaatgaggaacgtggcatacagaacgcatcccataacacaagcttggagagttatgccattgtacgtggagacgcactatggtggacacactttcaaaatgacagttaagaaaggctgttccatgtgcacagattttgtcatttacgacgacaatcaagtaatgttagtcagcatcagcgccatgtataggaaaccgcatactaggaaagtcacaataaactgcaactcaccactagcaccattggcgtgtgagttattacacatccacgtaccattctcaaacattaaccatggcaacccattaacgggtgatttcaatgacgtcagacccgagaagttgttggatcagtacggtcaaaacttgttttctgagttagcgcattgggccgtgctatatgatagacttgcagcgatgacagcatcttggggtaaattgctactgctcgcccttactggaaaagaagtgtcaaacgccttgcaagatgaccatggcttcactactatgacttactacagagaacacaataagaagaagtatgatcaggtagcggctctgggttttgcatctggcttggcaatgacggacttgagaagagatgctgtaagttttgtcgacatcaactcgtgggtcgtgtcttacaacactgtgtcagatggcaacggcttcctacatgtggacgccgaaggcttggttactttggcagcaatgccaggatccaagaatgtcaagaataagatagagcaagtgggatacaaagtaaacatgatcaagcctcatgacatgatggggttcactagtgaactggaaagacaaaggttttacaacatgacaccagctctgttgaggaaagttttcctcaaaatatacaaagggtttggcgtcaccccgtttgatgatttgataataccatttgacacccacagatctttgcagacaacggtgtacaagcacgttgcaaaatacgccagcagactgaccattgcggaaatcaaaaacaagaagaaaataacttacataccggttgacacgctagacattgtacacaagagcgagccaactttggcctacaacatgaacctcgaagaacatggtgacacagttatgtcgaaggattgtttgaccttagtggatacaataggtttagaaatagtcggaaaaatgacacatgagaaattcaaagtgcatggcagcagtctaacagcgatggtgagtacatcacggctcaaacacagaatacaatcagactacggaccgtttaacagagatagggttagagaagaatcgattagagtgcgcccttacatcaaaaaactgtcagagttgttggccacaaacagtaagtccgaaacacaagaatttgcccaatggttaggcgaacaactgaaagacaatagaccatcatggttgaacaacgatcatggtatggctgcggttaactacgtatcaccgagtgtgttggaaaaagatttgtctacagtagactggcctatgaataccgttgcatacatgatggtgccgtttgttgggacgttcccaacacattgcctgatgcacgaaaacggtgaatggcgactatcatacacacaactgggcacttcaatatcggttgcccacaacaacgttaacataataaacagaatgaaggtgagcgaagacacatgcatgagaatagtgggggtccatctgaaccattatctattagaaattgtcacaacaaaattggagaaaaaattcctaaattacatttcagacccaaatcgacaacgagggaagtatattacgtacacgatgcctaaactggatctcagtatgacaaaatggctaaaagcggatgcaatggaactgattacacttaaagtgccagctaacgtggacagactgttaacaataagagcgcagagacctgactgcacctgggaagaccagaaacaatatgccagaacactgaaacagacaacggtttacaacaagagcagtacgaaggacctctataaatccacgagcgatgaaatgctgtattgggctgctgtgacattcatacacacgaaagtgcaactaaacaacatacatgaaatcagtgagagcaagttggcagacaagaacagggccatgggtttggcttcttccttatatcatagagttaaagatattctttcagctttgttcatggaggtgactagccgattacatgtggaccaatcttggctagacgtcatcaagaatattgttgaaacttatgaggaagttgaaggagacacaaaaataggtgacatgttgagaatagtcaaaaagttccaggttaagaaaactgagaaagtgtatgaaatctggaaattagatcaacaaagcacatggtacacagaaggattcaaagacaaacttgtccccgacaagcccgcgaggttacaggcatcaagagatgccagatcggtgatcaaggcatccagatatgtcaacttgtgtggcaagtccaaaattaatgtggtggcccatggggatgcactgcagtgtgtaatgctcaaggctctggcactagataaacaatatgagtacatagaaatccaacggaagacacatttggcacaacactccgaaacgatgtaccaagaccaaatgagtaggatcaagacggaagtgttgcaaaaagccataacatcatacacacagctggaaaacatagatgcagatcgagtgatctgtttgtcagatgacttaggcaccattttcagatgtctaacgaaaggtatagaggttaaactgattgacaacatgaaagacgacaagatacacaatactttggctgatctgttgtatatgacgcagcccattagcgatgaagtcatcaaacaaatcatgagcaatttgattggggtcggcaaagcggtgggagtttacgatgcatatgagaatctgaaacccggggagctaaaaatgtccactgaggccgatataggagagaatgatatcgtgttgcacagcaacgtgttaaccaagttggccactgaagcgtttgaacaagaaatgatctcgcctgaagtagctatggttggcataggcggggcacatgctaaccaacgacatgttcgaagactaatcgacatttacggttatgatgagtcattcaagtggctcaagtcacatgacaaactgcacattgaagtggcaggttacgtaatcaggaacaagagcgtggtactacatgacttttcttattggatgcacaagtacttattaggaataagagccacacagctttacatccatgtgggttcgcacaaagacgtagcggatttttacagtaccgctggcctgaatagcacaaccgacatcgagagagtgaaaaacgagcagctgcagagtatgttagacgcagagttatcattaggcccggagatcacagcagaagaggacgatatggttacagtcataaacaacagctggaatatggttaagaacaagcgctccgtcttgataacacaccacacaaccacgtatcctgcagaatgcataataacaccgttcgaactaagcaaagatgttggtgtggttgtaacaggtgaagagcgcatcatgcacataatggtgttagtgataattacgatatatcacagcagggcggagatgttttacaacaacacttttaacgaaaccgaacaatggatgaaattgatagaagctgatcaacgtaaaccatgggtcactgttatcttagattcacgtggttatctgttatttatacacaagagaccttttaaattgggtaataaggtggagccagcagagcacttgccaatggtcatggatatgtttgataatggtccagtagctatgttctccggaagcacaccaacaataaagtactcaagcgccgtgccagtcgacccaatagatttttccgggttgatagccaaacacagtccaagatcatcgagtggtgaaaaacagtcaagaacagacgaagaatctgacagtgaagatgactctgatggcgaagactttaagggatcaaagccgctaaagccaaaaccacaccaaacgaatgaagaaacgcagccagatgagacagatgacgcgaatgatgcagcttatgaaggtgctgacgagtcgcgtgacgcgttggaagaatcagagacccgagcggcaaggcaacaagcagtggcagaagacaatagcacagcacaacatttaaagttgaacaagaacacataccccactctattgaatagcaagctcagaacgtacatagttaagcaggaggacataacatatgatcctggggcaaccgagtgtggccctaaggtgttggaaaaactgggtgtcgtgttggagtcacaagaaacaggtctgagcccctctgactttgctgcaaacatgctctcatctcacaagaacgtgcattatgtcgagctggggaaattatacaccaccaatgtttatgacattggggacacagtgtcagcccctgggttgatagatgctttttcattgcattgggtcatagccaattggtcaataacagggatcgaggaaccaacacgaatggcaacatatgacacattagccaccggtcagtgtaccaacaacaaacagcaggtgtttattatcaaaaattactttgaaaatcaatgtgaaaatcacacacatagcaacttgttaaccgcatataaggcttacctgaccacaggaataccaatgtcgaaaatatttgcaagaaacaaagatgagttcacagccttgatgacaaaacacagtactttggaacataggttgagtggtcagtaccaacctgggaaagtggttgatttaacagcaacgcttgatgggttcataacacatgaaccagtaaccagcgtccatcgaggagttctgatagtaaccagagcagggttggtgagagcgatcactgctttaggagacaacaacactcagtcatatgtgatcaagccggacgacatgcacttagctcatagtggcatggcgatagtcatagacgccagagcagatttgaaactgagcggaaaagggaacaaaaagaagaagattacaagcgaagttatgcctgggtcattcttgagacgcggttatcttaatgtagaaaccatcaagcaattgagattaccaagaggcacagcactattcgaacaaggcgcgttcaacaacttgatgatagcccatttcgacaattactcacaccattcagtcggtgacagaaggatggaaaaacaaataatagtagacgctattgaatcaggcgtgtttgttgagtgcagcgaagaatggtttgaagttgaattgttcgtcatggaattttatttcatgaagtttgagatgatacatggcacaatatttgtcagtgtaatacctcatccgttcacctacaaagcagcagaagaaatgaatgcagaaattcatgacgatggcgagatgatcaagatagcgctgaattcaagaaaatacgacatcttcaaaaacgttttaaacgattgctttagcttaaacatcgagacttgtatagaagaatttagacaggggctggcctgggatgatttacatgtgtggatgaaagaactgctgccactaagacaaaaatatggtgtaacgacttacgacaaattcagtgggaaccccatggcttgcaaattcccaataatattggacacttatgcagctgcgggagagttcatgcccgagtacaggacaaccgtagtatcgacgttaagcttaagtgaaattgaggaattggactacaacgctgacgttactggtctgaactttgatgatgaacatgcagtagtggatagcagcagtgattttgaacctgggttcaaagttatcggtgggcgatatgaaaatgggaaaggccacattccgctgacaaatcaagtggcactccaaaacctctccaaggtaaatcgaaatcttcaaacactgatcactgaaattaagttgtacacaccaataaccatgaagcacattaatatgattctaactgaattggacgtaatgcccaaacacccaaacagtgaagatgcaaattatgctatgacgttcctagatcacgatgagaggtcatgttatctgcacataactagtttgggcacatgtgtcagagaactaaatccagcaggcaagcgcaaagaggacttcacagtcgaagtagagcacagtgagcactcacaattgcagaaactgttagaagatgataggataggatggtacatggatgaaggcaccagaaaccaggacatgctgatcagacaaacgaaagcgaaaccattatacatcgtgtgcttatgtagcggtggaggcaaatcgacaatatgcaacttggacgacagatttgcagaccctgacaagtacgttatactacaattgttaccatccgatttgcaaaacatgacagaacgtgattgggtagtaagaaatgacgcgggtaaaagacaattatactcagcaggcaatcagctagcaggcaaagttctgatggtctggcacccagacaacattccagaccaatggcgggatgttcccatgttagtagtaataatagatgatgtcagtgggaaaagaatgttcaacgtgaacaacgactcgctgaaggcttatgtggcaaaacacccgaagacaaagaacgtgacattaaccagacctgaagtgtaccagcaccttttaactacaatatttccaaccgtagaaaggaacaagcaagaattaataaacatcgacgtgtttaacgctctgcagcttgttgacgtggaaaacaataatttgagttacgatgaaagagcactcaccaaatggatggtgccttttgttaacgcaacaggcacgacagtggaacaaaccgaaggagtggtggccaagccagaagacacggacataatgagcatagactttttcaatacaccagaccacacagattggttcgacatcaagttaccaaagaccggcatgaaaatcaaaagcaaagaagtgttcggagaattcgtgatagaacgaaaaagtaccttaacaaaatggccaaaattttcgcgcccggtgatgacaaaacctatattctcaacactcaaytctgtaacaagtaggtatggtgaactgacagtttacagaaagaaagagttaaacgccaaagaacacttaagaaagatggtacaagtgtatttccacgggctagcaaactctatgatagagaaattcaaagcaaagcctataaaaatagatggtaaaaagaccatggattggctaaacgccaggaaagatcgggaaaaagttgcaacagacttgttggaaatcctttccgagggagtaggcatacataaagttaacgctataaatattcatgccaaactcgaatcactgttgaagcaagacccaatacaaaaaccggaagaacaaaaagtcagattgatagcatggcaaaggtatggattagctgccatctattcgcccgttttcctagaggcgaagaaaagactaaaaatgctgttaagagaggaaataatttacgccgatgggtacacagcgaacgaattaagtgcaaggttgagaagtgtcagaaatgtggagcggttcttcgaatcagacatggctaaacaggaccgtcaaacagatcatgagacgttgcggttagaatttgagatgtacaaaatattaggtgtgcatacagacgtgctatcatcatggcaagctgttcacaaaaattggagatggaaaagtaagttgcactcaggttattccgatgcaatgagactaactggacaagcaactaccgcactcggaaatgttatagtgaacatggcagtacacactgatttgatatggaccaattactccaaagtgttcttagtcttaatgttaggtgatgacaacatgtttttaactaatgcatggctggatttacaaaaattcaagcgtgacactcaggaactgtttaacatggaagtggtgccagactcacacccagactacggcactttcatacaactaatagcatacaaaacgccggaagggggctgtgagttggcaccagattggattaggctgtcaagacgatttgaggtaactaatggcgtcagcgaatcaaacgatgaaaacttaaaagcaagggccatgtcatatgctatgatgctgggggccctaccagaggtcatgacgttagttgcagagcagaactggccaatacaaccgttccaatggtatgaacccgctcaagccaaacttgccatagctgagaagcacagtgtcagcatagccacagttgagcagtttttagcacatttaattaacatgatgagatatagggaagttacagagtataattggaaagtgcctgccgccctatcaggaaacaagaaaaagtttaataagtaaagttcagtacggggcattgcccccccccggatcccggagaggatccccgg

SEQ ID NO: 834 - DNA, 15850 bp, Rhizoctonia solani alphaendornavirus 2
  source 1..15850: mol_type = other DNA
cgccgagctaccaattttaaaaccgatacgtgaaaatgaaaagagtaaatttcatttgcacacacacacaaacaccagagcctgcgtcgagctctggtgttttaataaacaacgctaatcagcgttgttcggcgcaaaatccctctgtggttaaagtatcaacaaaattttcaaaaataagaaataatagcaagcaacaagccttgtaccaatcttatttatcgattgatcaaaaccgcaaagacagagggaaaatgagattacattgctctaaagtttttgaaacccaagagcaagtgcccgaaacaactgaatcacctgacctcactttcctagatagaaaaattggtggtgattcaacttgctggcacaagatattaactaactacaatccaactgatgaacaagctgaagacttcttcttacatataataaacgattctagcttcggtacgaacgagccattaagtttgagacaaatttacgagcaatacaccgctcaaactggcccaatcagtaagcaaaaagattgggacgcggagtattgtaacatatggatgcacatcacagagatggataaagaggttatgcacttacatgaggtttacaaaacacctttggtcccgactgctccagtcaacaaaaatgaagttataatgaacatggcacaattagttttgtacttcaacccgaacaataggttcaaaaacacaatgcaagccaagccgttagaaatggaaaagaaagagaaagccgttcgcaaaggaattgacacacgccatggacgagaaggctctagagatagcgtgaacaaggttctatgcaatgtaggcgagaagaaagtaggtgttttatccggcaccaagtcttatctgctaaagaacaacttcttttcaaatatggaatacgccttagacaacgagggtggatccagatacagagatatggttgataatcacgataccagaatagttaacaatcactacgctaaatctaattatgagttagttaaaactactatgcctagtaagagattaattggaggaaattacgaggatatggatcacacacaatttgtagcagtggacacgtcagtacagtcggaagataaacaatttttaactgacgtttcgactgtttacgcgtacaacaactgtgctgccgacaaaactactgtttacggtgaatgtgcgttaacgttaggaaagcagccctggtacagtttgaacactaacttaaacaataagaatttgataacaacggaattcgatattgggacattttttgattacgaattgatttatttcatatgtccagtggttggagtagacacagatggtaaacttgcaaaggaaggcggctcttatgcttactacaacaacatgttgttggtaacgtacggatcaagtagcgtcgttcattcatattctaagaatgttgctaacataatgagcggaagcaaccatttaaatgaaggagagcactcattaaccgtgttagcgcgtaagagatttgatttcatgcaagtgatcgttcttacaccagctaaactggaaattatgcaattaaccgaaaatgatgaagcgtggttcgaagttccggttatagcacccactttgtttggtgccattggcgtgcctgacataacgatgaagagatacaagttgaacaaacctgcattgaacagactcataaacaaaaatttaacagggaaagtcagttatgaactgatgatggagtacgccatggcgatgtcgtggtacagttacaacaaaagaggagtggaactagcgtcagagaaattttcagcggaagaacttaaagtacatgtttacgtttctagggtgttggtaactctgcaaaaattgaatgaccaaattgaaaacttaatatacaacgatggtccaaacaagttgttgatagctgcatttgatgcaatgacgtccgtagccatggagttaacagatgctgactcgccaagatcaaccgtagttaggaagttcatcaacgcaatagaaaaccctatagttagggctggggttggcgcaaaaatgaaagtttggatgtcactggatgcatggacaatgtccagacatatagaagtttcaacttacgaccagccatctgcttgcaaccatcatcaagaatgtcttgagccatacactggaataacttgtttacattgtggttataacactgctttgaacgactcaatatggtgcaggtgttgctcagtaactctgaacgaatgctatcatgtctgcgagtttgagcattcgggtgacaatgtctgtacatgttgtcacaagaaccactccaacgaaggagaatggtgcgattgttgtctacggaaatacccaattcaagaagaagtggaagctgtagacccagtcaaaaccataaaatctgtggtcagagaaaggaagaaagctagcaagccggtgaatgagatagaagctccgaaagagaacaatgcaaaacctgaaccacacaaacaaaaagaagctgagaagttgcccttcacactcgacctaagttatgctcaattgagacaatcattaccggaacattcgctgaatctgttcatgggaaggtcagaaattggtaagagatacactaatgatgaaaaattgagtttgatacctttcgtgaccaacaggcaccctttggcgctattggagaagtacgaattgtatgacgttaatgatgtgactgtcgttgactgtggcgttgactgctgtaaattctacttaggtttagaattttcagagtatagattgaaggctgtgacaggcgggaaaaccagaggactttcagctgaccagatcggaaaaatgttaaacgacgctgcgctcaatgcttgtgtgatagatgcgtcaggtctgaagtttttcagatgcaatgacggtgaacagttcgcttgtgtggtacacacaagtgctctcaaggacgctgaatacaaaaaccattggttggtgtgtaaagtaaatttgatcagtgcagacaaaaatgaaatgtttttatcaaacatgaacactgtggtggatcataacaatgccgctgttcaattgttcagaaagtattacaattcgctaaatgatgacgaaaaactgttctgctgttacaccctggcatcaaaatcgcaagcatctattgtttcaggcttcaacaaattcgagtttaccaaagaaaggttaatgaacagtgatgaacatgatccttctaaaggtttgtacaattacacggttcaaagtagactcgcgaagtacgcaacgatgttggttgattctatgtcgggatctattaacgacgagctcaaccaaatttgggatataaacgacgacaattgcctggatgtgttatataatacagaatgcggattcagggactgttgttacaagattgctctgattttatctaatccagttggccattgtagaacggtcaaaaaattggtgaaacgttcaggaatgagagtgtacattgaggtggatgacgtgaggttgaaaaacggggatcttgtgttctttaaacaaggcgtacagtataaaccaacgttcgttaaagttgttgcgggaaaaatagatgtagttttgactgataagcagtcttactcatacattgatttgttaattcctaaagcttcagtgtcatcactgttgatgagaatgtattcgtacaacgaagtcaaagttgacaaagataaattgattcaattgtacaagaccggtaaattcgttatcgggccaggaggttctggcaagtcaaccagcatagccacttggagaaaagaagagccaacggtgtctgcgactttcgtggcgatgacaactggcggtaaaacttcactacaattaaaattgccaatagacgacaatcctcaatcttttgaaaaagcgtcaattagtcacataaatactcaattggttgtagttgatgaagcgacattgattaggccttgggaactagctctagtagttggaccaatgacccagaagatcatgttagctggggatccgacgcaaatatctgttatagatttgtatgcttcaggaggcacaaggatctctttcaacgcagtcaattacgcaaagaagtattctgatgtgctaacattgacatctacttaccgtatagggtccactctagttaatgaattgaagttacacaaagctatgtcagacttgaactccttggctagccatgatacgacctttgactgcttatggatggaaaaattcacaccaaacgagattaacaaattggcagtgggttgtaacgtgatattggtgttttatggcgaccaaatagctctagtaaacaatgctttggactttaggtcggtcaaaaccgtaactacagtgcataggtaccaagggttagaatctgacgtagtaatggtgctgcagatgccgctttcccgacaagcggacactcacaggcaatttgggcattgcattagtgctgccacgagacctgttaagcatttgaaatgggtgactattgcagacttttcatctgaaactcccttacatgatagattgggtggagatattggatctcttgaatatcaagtgatagagggaatcgagttacatgatgaagtacactccgctttaaatagtggagtggcgaaggttgatatcaagaaatttaatcctgaattttttacagccacggtgactgaacacacgaagttggtaaacgtttcttatgacatagatgatgacaaggttcaaattaatcttaaagctttgttccatactgctacttatgtggttgattcaggaggacgtgtgtcaaccaatgtgcctgatgaatacgttaaggtagttgaggatttgtttatcaagtcgtgtaacgtcgaatgtgattatgtggttaaaaagaaagaaaaatacatttccatagccggatctgacgcttggatattgagaatagtagcgtttgtaatcaaggtatacacggcaaacaatttaacgtactcagtcgaacacaatggcgaaaaattcaatttacaggtcaaaccatcagaatgtgccgcttgtggagaaattaaagtgtacaagggcgatgagctgattggtggagtgactagagactacgtttctttgagtggcagattagcctggggcgaaagtgctgaaatggttaaagacatgttgatcttgaataagggtggattacctgattatataatcgacccgcaattgagtcacgctattttaacggaacgagtgagcactgctctgaaagactttaacaccgccgtttcaagttcgtttactcggtttttgtggtacaataaatatgagaattctttattgtttgaggaaatcaagaacaccataggagcgaaaataacagtaaccaattgcgacaacatgagtttgtatccttatttcaggaaaactttaaccggttggaagattagtaaaattggaaataacaattctagaatagttgttactagaagcaaagcaaagaaattggaagcaatttatgaatgtttgcttatactgcatgagagatacaaagacgacaaaacagcgagatacgtgtcgaggttttacatgtcggctattggagctagaaacgatgaagacagaataccgggaatgatggaatcgtttgattggcacaagtccaacaaaacagcgacttatagggatttggttaacaggcaagacatggtaaagatgaagtccgtgaagtacatgcctcaaatgacgtatgttccaaagaacgttttcacattttgctctaaattcacaaacctggacatgtttgccagcaacaagaggatgaccacctctgaccctttagtctctgcggctgacatgacgttggctagattgattagagacacttacccaagttgtaccgtaaactttataaatcacacgatatacacgagttatgtactagactttggactcacttcaccgtcaaaggctacaggtgaggtggcgcacactttaaatcaggacctgtatcacaacatgttaactaatcatgctggtcacgttaaagttgacgatccaatgtattcgaccttgttaaatgaagtcgaaaaaggtggtaaatacacgggattacacacgaaacctgatgtgatagtaactgaccccactatattgaacattgacaaccagattttgttagattgggtgtataatgctagtgttgtgtacttctgggttcctctagaatgtcacaacatcaacaacactttaatttatgcccacaaggattccaatacaccctttgagtgcaagaaagagtggcacgatgctatagaaaaagggtttagtttgaactttgacgatgtgaaactgggagtcaaagtgcatacgttgaagactttcgacgcaataagagtgtgcatgattcagagagaagaggttggattgtgggctgaaccttggctcactaatgcccgatatgtgaacataatggtacccagcttcatatttgacctcgaatcagtagtttcgagaggcgctttgctggaaatgcaattggctacaatcaacatagacacattggaaaatttgaggcgtagactgttgaagcctgacactacatttgatgacttgttggtgcaagctagaaccttattgaacaccacacagtacactacaagcatggtgaggggtaaatatgaagaaaaagtgcatgagatgtatcgtacagctaagatcgcttgggcaattcacaacactgaaaacaaaatgttcagtttgctggttgatcccagctcgatttttgacttgctgtgcatgctaccagcggtggctgctgcaaaattcatagataaattcaagagcgtggtttcaccatacgtttcctcggtgaaagctatgattgatacttacgaaaagaaatctgacattttaaaggtgttaagcaagttcgtgaatagtctagaaaaattgaagccgttgcagttggccccgaccaagacgatagtgaattcagcaaatcaaatgttaacacgcgaatctagatgggtgccgaaaatcaagttatacattactaagaggatagggttgactgaaatcagttgggatgacaattgcccaacgtgcgacgccactatgatcggcgttttaaataaccactttataaaatcactgtcaaagtaccacaccatggtgcactcaagtgattgtgaacgagctgctggtaagacgatcggttttgaagatacgtgtgacataaaagtagtcaccccattgttaggtaggcacggtttgctaattagaccttcggatctagatcttgtaaaagggaaaaacattggcattgacacggtcaagcccaagctatatgtcaattgcaagttgattttaactgaagttaacatcgttacaaagatctcagtagcgtacagcaagaattgcatgattaagatagtaaatgacgtcgacactagtgaactattcacttctacagggggaggatccgttttaataactgaggataaccaaagattaagtgcatccacagtgtttgatgttagctcgcaagacgcttggatcaattcttgcggtttatcttataacactagaggatggaacgttacgatgggagaaattctgagttacaacaggttcaaattgggacggcaactggagccgatggaattgattaacactatcgacgcaattgattcaggatatctgacaagtttaggatttgtaagcaatggcaagttgttacagaaattaagcaattgtgacgcaagcgtggtacttggtgaagcgtatgttgacgtcgacacaggttacttgatttccgacattgcagcttattcaggtgtcagaatcgatttgtcttccaattatgctaaaagcgcacgtgaatcgatctatggtagacaattcgcaaagctggattgtttggagtttgactttgttgaggacatgcaagttgagacgaagttcaagtttaaaaacggatatgattacgaatgtttaaacgagccacaacacgttgtgtccagcacttcggtcctgttgatgaatagaacttgtgaatgcggatccaacgtcattgtgactggaggaccaatacatcctagagacgtaaagttggcaatattatcccacactaccagttatgacaaaggagtgtatcacctcaatttagatactctgataacggacaaatacttaagcgtcaaaattgacaggccaattgatacagtgtccgtcacttccagtttagatacgaatttggaggacgtttcggctcaaaatgaggatcactcgaaagatgaagttctaaatagtgaagaagttaccaaatggtttgacacttgcgatgagaatggcataaaaccgttagcaaagatgtcagatttaagaactgaatacgtaatatacacaagcgatggaacgttccctataaacgatgaagacatgttggcttcaatgtcagctacggtaacaaaaacccgagtgtcagcataccatgactcgaccaaagacgagtgggtgtatagaaatgttaacgtttatgaagttgacaactcaataaaacatccatttgaagatttacccaaagttgactatgtcgcaaaagatctagaacttgcagaatgtctaggaggggagatgaacgatgtggtcggaaggtataagaaagaagctgaggaaatgaaggttcacgcgtccagttgcgatgacgacaattgcaagtacaaaaattccaaaggaaaacatttattctctagttgtgacgaaaactgtttgactcaccactcaatagaatgtgagatgaagagagaggttagggcatcgtcaaaactgttggatgataacggtggggcaggaacgaaaatcatcgctgatttggcacacaaagaaggagttttattagggaggcacatggttaatacaccttgtgtcagagacgtgaacacgttcacaactgacgacgataaatcgatgattgaaacgatgttaacgagtgtaagaatgaaattaattgatgtggcaaacactcaagctcttgaaattgaaggcacaatagcaggcgaccctcaatattctctacgcaacatggatgattcaaaagtgtacgattacaaattccgatttgtacacttgtatagtgcagaagctgatgctactgcagaatcacatgaagccggtaagcgcttaattgaattcaatattaacttgccagagcataagagaaagagagacgaatcttacaagtataacttaatggcttatcgaaagaataacgtgtttgaagaaatcaacgttcctgaacacgcgcaacgagtttgggtttccgaaccagcagttggtgacttcagtgacgttgaaatgaataaatcaagaattttgagtaaaccctcgtactacaaaagattgaacctggacggaaaaatcatggatagaaagtattattatgaaagtacaaactttaagaaagtattgtttaaggtgctcgacgtcgtggatcgaacaaacaatctttgtgtaaatattctcaaagctagacaaatgagagaaagtcccaaggatagattgtccaacagattgattcaagctgaaacagctagaccccaactagaagtaggtttagtttacaatagcgcagtagaagttaaatcaacgtctggaacgaccattccatctaaagatcagtgggtattgcacttgaaagattggcattggttgagaaatagcagtctgaactgggatgaacggtactccatcgaaatcaattgtagacattggactctaggtgagatgttagattacctttactacgacgaaaaaggaccagtaattaacaaaatgaaaggtacttcataccaatggctcaatcacattaatgcattatattgcaagccgtggacgagtgtggaagtgccggaaacgacgaataagtggacgaagaaatcaaatggcaaattctatgatcagactggaccgttacacgcggagttgttcaccattcctttaagcgctttgtggccgaaaggtacatttttgagagttgaaggtatgaaattttcgagagacacgttaaaactcgtggattatggagcgagatacaacgcttggtgtttgttgcacatgatagcgacaatgaccaaaaacatttggatacctataagtgctccatcagatttcgtgactgcaatgccagtgataagaggaatgaactgttgcagtgacacacaaccgtatgattactcaaaacaagaaccaaacagaccaatgaacccagagcatgtgctcaagaatctaccaaaaaagcaaaggaccagctggagtccagaaatgtgcactttgagaagcgtgtacattcaaatagcagtatcacgggatggcgattggagttatggactgtgccaaaacgcatacaacaactttagaccatatatagctgcagcgaaacatggtttggagcaaaaattaatcaccccttctttaccgttagtgagggctattccacacttgccaaattggtcaggacacactttaacttggccaggcacctatgacaagtcttggcaattaggaggtgcacctttcagtcccaataccggtgcagttgttttgccaccaaacacgaaaatcaattacccaataactcaggaaatggcgaaacgtgccggatacttgcacgtgagtgatgctgaatcttcgttgaatgagtactaccaggttgttaaagaaaaatctaagggacattttgacactaggcgagctcatagacacacaccatggtcagagagattcccttgcggacacactaaatccaacatgttcaacaagtgcaggcatgatgtgctacctttaatgtttagtgactatcaagatcaaaaaggtttggatatagaaccaatggtcaatgactctacggaattaatagttgctttaaattacaatggcagaaagtttgacggaacagaagtgtcatggtttgaaacttatatgggtttcaatttaaacaaagcaaacggcttaaacacattattgattatggaaaggcaagattccgaaagtagaagtcggaatgtgaaagggaaaaatgacagcacagatgacaacgatgaggaaagtgaagacaatggggaagagttcggagaaaaaggtcaggaagacgatgcttacgacacagcaaatgaagacaatgacagtctcgatggtgagtcagacaaaaccgaacaaccaagaaaaacaagtgaggagcaggagagcgttttatccccgagtgcccaaacatacgttgaagcaatgcgacaaagattgaatgacttgtttccaaataaacgagccatggggagtcttggggaatggctgcctatcaatgaatttgaacagagaatagaacacaacgcacaaactaccggacttaagttaactggcagagatgagatagactttttcataaaattaatcggaaatgatacaaaaaagagtgatctagatgtaatgttagacattgaattgaggaaatttgtagacaagcctgaaaagtacacgtacaatcctttgttaggtggaagaaataacaaaagattagctctgggaagagatttactggaaatggagaattgtcatagtgttagcaaaatttataacaattgccctaagctagctgaagcgcattacgattttctcaagaatttacaaagtaaagttgacggattgaatattcaagagcatgaattagtgcattggtacagtttgtgcccaggaattgcaatgagaagcccagctaagttgccaggaagacatatccacataggaattagtgaccggaaaatcacagatttgggctttgaaactctggaactgggttccgatcctggacgttttggagcatgcttaagagtgatatgtgcactgttagcaaatgttcaatgtacgcactttttccattcaggaagacccaatttacatgttttgtttgcagagatggtgattggagaaatattagacgatataacggtgaacacggttgtggctcctttctcaacatgtggtccatttttagatggtatggtgttagttgacacttttaaggcgaaagacgcagcgagatacatatctcaaaacatttggtatcgtgaaatttacggcatagacgagaaagaattcaccatttttggaattaaagaatgttggtatttaggcgattcaggggcgtggtatagcaatatgaacgtgaacaagctgtacaagtcatgggctaaaggcataaacatgcacttgatatctggacaaataaggggtaagttcccgtacggaatggacaaggtaatacaggccagtagcggaaaaacagaccaaaaactagtaaacaagttggacccaaatacattgaaagaagaaaccagaggaaaagaacccttgattacaacaactaaaaccgattcgcacattgataaaacaatacagcaagtgcaggtggaggttgatgagagcatgagtgaaattgttcctgttataggaggtgttgacttccacaacatcttgttcggtgaacccaattccaacacgagtttagaagaatacaaattcactgataacaaagtgatggagactttacacaatccacaggttactagagattgtccatttaaggctatagaatgggcattgaaatatgttgtaaagcttaagtttacatccaccgttttgcgatcagtgttaaagttcaaagatttcatgaacgacgatgagataatatccagattaaagttgataggtcactcattcacgtattctgggtcaagcaaatcagtgatgtttagttgtaaaaataatttaggtgaagtggaaaaaccattcaatttgtatgtaacttctgatcaaattggaagaacgcacttgacagtagtaaaaatggcttaccgcgccttaccgctgaacaaagaatggtcaacgtttgaacctttagctgaaaagatgaatcctatagaaccaacagaatccactctcatggaaatggaggcaatgatgatgggagtgttaccagctactggtcctatgaaagaacaattacaaaacgtgaactttagaatgaacggaaatgtagcaagaattatggaaagatctgagtcagttattgaaactagagcgtcgagagcagaaggaaaatggttatgggtgtcgaatttaagccccgggaaagtgtatttattccaaaacaagttaaacagattcgagcccagaatagtgatgaattctcagacaggaacattcattagaggtggcgttgatcaaagagtagcaattgacatgggaacgcgactatggtcaacaggcaatgaaatgtcgcgaactattaggagtgaagctagtattgggtttttgaatgcggcgtcaaaaatttttgccaatgatatagctcacgaattggcggcttggccgattgacagagaagccaacttaattttgttttcggactttgacaacaggaaccatcatcatgcggatgacgcagatttgttgaggagaactagagttggcaacattagaataatttgcagaaaagaagacaacatgacttggggagtgaaaatgctagaggcactgtacaagtcgggaccggtgagactagctgtcagacagggaattccgtatattacttgtcttgttaagactccttggatacaaaaattgtacgaaggtttggacgaacagtctattttgtatgaagacatggtggaaatggtcacgaagtttgacaaagttaatttggagaagagtggtaacgatttcatgccagtagtgcaaagattgttttcaaagttcaaaagaaaatacaactttggcggaccaggacaaccgatcacacataaattgacgggagcggaattaaccaaggatttaatgtccttcggtgctggcgatcacaaatttaaaatcgaagagttcactcactatgaattaagtgttgagaggaacacaactcccgtatacttgagtggttggattgacaatgaacattatgatccaaaaagttggagtcacatggtggtgtcggctgtgggctatggaaaggaattagatgagacgaacaccgtagacgaattgcaaggtgagtttaaggggttcactgccgtagcggctgaatacaacaaagtcgccaacagtagcacaaagttgcaagaaatcagcgatgaatcaatggcgaacatagtttcgctaaacacaatgaacacgatgaggttggaagacaatagtgattcttacaagttgtacacgagtacaagcaaagctcctgatgtcatattggttggtttttcagctgcaaatgacgccataaatggagatgttgtagaagagcaagtacacccaaacatgatggattattacgatgatgagactcacatgttagatagtggaatacctcttccgaacaaaaacattaggttggtgcacaacggtgaattttctggaattaagaatgtggcaaaggcatcaatggtgcaatacccgacgcactcacaaagtgcttacattggttcttacagaggaggactcaaggctgtaagtgaattgtacggtagtaaactagaattgaggcaagtcgagcacgatgccagacaagattgcagattgtttgaagaaacgtactttattaacggctcaacaaatgcattaccggaaataaacatagattacaacacagtgttggattggttaaaagaaaggcccgacagcgaaaagatcctcaaagactttgacgaggtgatatctgggggacttgacattgtgggaatggacaaggtaaacatacacgaaaaattggaaagtagaatgaaggatgtgcttatggaagatttcgaaaaaggaactaacatgcctgaaacgctagaagagcaaagaaacaggttaatagcgtggcaaagaaaagggattacaatgatatttgcaagtttcttcaagcaagtcaaagatcaccttaagagatgtctacgtaaagaaatagtgtatgtggacggaatgacacctccacaaatttgtgcgttattgaatcaaattgatggtacggacattacatttgcggaggatgacttaaagaaacaagacagacagactgaccacacattattggacactgaaatggaaatatacaaaagattgggagccaacccaagaatagtagacatgtggcgcaccgtgcacaacaaatggaggggtaaaggtataggtatcaaatttgtaagcgatgccagtagacacacaggtcaagcaacgacagcaattggcaacgcgattgtgaatttgattgtaaaacagaggttggtcaaacgattagggaaaaagctcaaactaatgttgatattgggtgatgacaatatcattttaacagaaggaaaaattacggagtctgaaatatcattaaatagtgcaagacattataatatgcaaagtgatccatcagtgaggaaagattatggaacgtttttgcgaatgatgatctacagaaggaaagacggaatgttagagtgcggaccagacgtagtaaggttgtgcagaagatttcaagtgttgaatggagtgagtgaacaaaccgatgaaaatgtaaaaatgcgaaccatttcgtattgttgtatgttaggagataaccaatacacgagaaagataattagtgatatagggaaggacgtaaaattgcaatcatggtttgacatgggctctctaatggaagtaacggcaggaaagtatcagacaacggtggaaaaaatagaaggagtgtacggatggttgttaaaaatgatgagggagcgagaagtcgtgattcgctataaattagtaccagtcgaaaagagacaataaatagtgtgtgtgtgcccccccccctg

SEQ ID NO: 835 - DNA, 6620 bp, Sichuan alphaendornavirus 22
  source 1..6620: mol_type = other DNA
gctagctattggtacaattgcagacatatcaataatggaaaatatagttaaagctataacaatagacaagccattattcattgtaccaaaaggatacaaaacagattatgatcatgtactacacattgacatagacaatgatacgttaaatgacatgttcaattatgaaaacaactttgaccctgacaagttcttgaatattgttaaaatgctcaagaatagtatgttgaatttaaattacaaagtgttaatcactatgtggcaaacgccaattaatactgataaagtattattcagggtacacacaagtccaaacacaatgaatattaaggtcaatcttcaaatattaacgacacgtttgaaatatctgaccaatgttaatttgaaaaagaatttgaaaagtataggtcaattttggaaactcacaaatggtatcaactggactttaacacccagtgttataccatctgagaatgacaagtatattgggagagccatgccagagatgagtactataacgaaaggtccattagtagctgtgtgttttggcagttccactactgaattgataatcaaagtgacaaaagaaatcgacaaaacaattaaatgtaaaataatatgtagaaacaaagtggaaggcatattgaattcaaatcaagattactcattgtctcttaatggttgctcaatgattatttgccatggtggttggcatatcattcaattcgcaatagaatttgaaataccaatgataattgtacctgtcatgggcgatcaaatgttaacagctgattggttgcaaagacttggttgtgcaacagtagtcaaccaatacaacgcaacagacataattaaagccatagaagatacagatgtgacaaaaatacaatccaatttgagaagtttaaaatcttcgatgaaaccattggatgcaattaagatcaataatgaaatcaatgtatatcttaaaataccgctacaagctccaaccaaatttgaatttggcaaatcattaattcaccgcaaacctatacacaatttaacgtatgttagcgggaaatataatgtcgagatattgtcatacatttatgatccaataactgacaaagagtgcgtttatttagtatttaacaaatggttcgaagcaaacaacatgcatcatgtgatcaacacaacactgttaaaaagttgcacaatatcgtcagttcaggaatggttatgtttgaaccaaatcaacagctgtatagtaataggtaagcaaggaattctaacaatatacgatgatactcaaagtgtcatttgtattgaaattattttgcaaaccacaagtatgcattgtagagaggtggaggtcaacataaaagacatgatattattggaaaagtatgatgtggaaattgatgtgctcaaaatgctacgaaatgaacccaggatgttaatagattacaatggtatgatgtcaattattgcaggaaacaccattggcaccattgatattaaaaccaataatattaatgtagacattgcaagtagacttaaaactggcaattgggtacacactagaaatagaggagcaaaattgttacttaacataataggagtggtgaacaatatggatgacgtatatataactgattctacaaataatgatatgggaatatatttgattaattcaacagaaaagggcttgggcattagcttcaaaataggagaaaaagattatttgataacaaaagtcccaatatctagccaatgttcagcaacatacttgggtattagatgtagaagtaccacgtacgcgagtatagttgccaagacaacttcaataccaaggtgtgcaaatgatatggttgcattacaagtttgcaagcaatcaaaaatagaatgcaatgtaatctgggcagacaatttgatcaactatgaattgctgatgtaccattatgacaacagaaaacatcacaagtctgattcttctatgatgatagagaatgccacaagtatcagatgtgtaccaaacatgattcaagtggacaaaaagaaaatattatccactcacaatagaaatatcaataggctcattgtttacaaaggccgaattaaatattgcattgaattgagtagtgactttttaagcactctattagctaagatgtacagatcgagaaaacacaaagtcaaatcaagagctaataatctgatcagcaaaattgaatttgacagcactattatcaatcattgtaatgaatggttgaaattgaatgacaataacttaagcgagttaatagtaatagacatgactaaaacacacactgtttcagatgttttgggcaaatcaattgaacgcataataggaggtggtgtaccaagtgaattcactaaacttttacaacaaactatggtatgtttcagtaaaacggaatttgaattagttgattgcgaaacactatttaaggttggtttaggaattgcactagttgacggagaaagagttgtggtaagtttgatgcatggctgtttgtttacttcagaaaagaaaggcaacggtatcaacatagttataagtattatatcaatgatacttgggtttgtagtaactggtatgataatatatgctatacaacatttagtatcatcagaatttttctccatagttgttaatgaaattaaaacaagtatgagtgagttagttaacaaagcagatgaattgataagtgaaattaaaaataaatatgttaactggtcaattgatgttattgataaacgagctgttagaattaacaaagctaaaaatctaaagaaaacattagtagcaagtgtaataccaaattacgaagaagatttaatacaattatctaacatgttattaacaaggccattaagacagtggttgttattgcaatggaattttagacaaccagacgtcaaaacgttaatgacagtcaagcgctttaaaggagatacaagatttgacgtgttacgaacaatgatacggagaaatgataacatgttgaactgtttacaaacagaaaatgagtacttgctaaataataacattcaaattaagttcaaaacacaaattatcatgccatatttagatatgatacaagttgatttccaaagcttaagtgatgagtgtccattcattgaatgtacattaaatgacaacaaagtattgtttagtccaaattcatgttggttttattacctaattaatattaacacgatcgtaaacgaaatgccagcaaacacggatgaagattattacacagaatggttaacaaccatagacggtgttacaacatacaattcagcagaaacaggtttgcaaatattaaaacagattgtggaactgaaaggcgaaacaatgaaagttagaaatgatgaggaatgggtgatgaaagcactaaatgattttcaagcgacgtatgtcacattgtacgaaatcggactgccaagaagaccaattgcaactgagtttcaattgattattaaaaatgaaaacatttatttaataacaaaacattctaaatattgttgtatacttaacacaaaaggaggatcattggagcaagcaataataggtgcagtggttttagcagcaattatggcttttggcatctggtatttcgaattgtatccagagaatattgaggcaacgattaattcagtgatagacaaaatatcagaagggacaatgacagcaattgatacaattcgactcaaatgctctaatatgttaaaaagcttaacttgcagtttcaacaaagtattaaggaaggttgatgtaaccaacttaggttacttgaatttagaggacgtgatactaaattgtgaaatgggtattgacattaatgaagaaaatgacaatatggaattgatatttaaatcaaaggcagggggaaacatggctgtaacaatgagtcaagacaaaatcatgttaattttaggaagaagatttaaagcaaaggattttgatatacacaaagaagaaggacacattttgaaaaacgatcaaatttacttgttaaccaaatacacaagaatggatgaggatgtgtcaactctagaagatgaacacatagaaaccttaagtatgaattccgaccacatcaaaatggtatgttcaatattgaacatgaatcacgaagagtttgtaaacatgtgccaaccggacgagacaaatttgagttggctcaaaatgaactgcgatagagagagttatcaacttggaacaagttggattcatcatgctcatgaaacaatgattaattcaaaagggcaacttatatacaagattgaagacgtgtttagaaaggtcaggatgataacggcgaatgatattaaaatgattacagaaaacagaggtaaaacattcatcaatggttgtgacgaaattttgcacttattttcaaatgtcgtttacaacgctaattacaatgaacactccaatagcttgatactatcacgattgagacatagttatatgttccatatgagatcagaaaccactgagttgttacctagaggtatatacacctgtacaacagaccatttgaaaattaacgaacaacttagtgaattcaaagagcaattagagttaactgcctacaatgtactattgtgcccagttaatacaataaggaaaatgcaagaaagtgctgcaacaattttgatcaaaaagatgggaggtataatagtgacagtaatggctcacaccatattaaatgtgaaaacaatttcaatatacaaaatgccgttattatacatcattactgagcatgttgattacgtgttcaactttgaatgcgcagtcttaataatgtgcgacaagttgaaaggggcaggttttgaagaaacttggatgcaccaagatattgaaatgttaccattaacttacgacactcaaagagcaaaagtaacagcaagattaccgaaagatgtaacaaacgtaagtgcgatgtatggtgctggtgaaccagagtacagaggtttggttaattacattgattttgacgacaatgattttatacctttcatgccaatagatcataatccaataccactaggagaattaggattgtactatgaaggcacaccagattatataatagatttgtgggagaacaaagatttaagtacagcgaatactgcatatgcaccagcaaacaacatgcgtattatatctcatgagcaaccgataagcattattgagagttacaaacatactttagttaagtatccaatggtgagtagaccaatcttgcaaaagaaagtgtttgaagaattaaaatcagtaaatggtaggttgggatcggtcaaacatttgcgtaaacacaccataccaacaagtataacagtaaacaacatatgtaaagcatattttgtggataatcatattgaattaattgaacaattcatgaatcaaccaattagttatagtgacaaagcaacaacagaatggttgaaaaatagaccagattgtacaaaaatattttcggaattggtatccagattagcaggtgaacttgctattaaaccaccttccgatgtgaacgttcacattaaaatagaaagtttgttcaaggaggatccaataatgaactggaaagcacagcaaagtagaatcattgtgtggcaatataaagcaatagctgcaatatatagcccaattttcttggaagcaaaaagaagattgaaattgttgcttaaagataatgtgatttactcggatggtctaactccgtcgcaactaaatcaaagattgagattatgcaagggtgttaaattcttttatgaaaatgatcttactaagcaagatagacaaacagacaaagctattatagatgtggagtttgaaatatacaagttattaggtgttgatccaacggttgtaagtaactggaaagaagtgcacaggaattggagattcaagggaaaatttattaagggttccttggagtacatgcgcatgacgggtatgccaaccacagctctaggtaattttattaccaatttgcaaatacatgctgcttgggcaattaaaaatatggatagaattgtcattgtcttatttttaggtgatgatgctttgtggttatgtagtcaagaaccggataataaagggttaaggaattatattgccacatatttcaacatggaatctaaagatgttgtacgagacacatttggaagtttttgttgtttgatttgcggtactgatgaaacgggtgcaccatgtttgtcaccagatattgtgagaatgaagtaccgttttgaagtgattaatggtacgaacaggtgtccaaacgatatattacaaaatagaactttatcttattgttttatgttgggtaacaatatagaaacaaatgaaatagctagtaagattaaaccgaatgttactttgcctacttggtacaaacaaaacacttgttttgaagtttgtgcattgaaatacgaaatgacacctgaagaagtcatgcaacattacaattcattgatcagcatgatgagagtagagaaaactatagaacacaaattcattttatcatctagcagttggaaataaactaacaattgcaatccaaaccatttgtaaagaaaaggaaattggaaattca

SEQ ID NO: 836 - DNA, 11692 bp, Tomato associated alphaendornavirus 1
  source 1..11692: mol_type = other DNA
gtcaagatggcaaagaagcaagcgaagcagagacagcataaatttatatatagcggacactacccaaagggtagtgcccgcaatgaaattaaattaaaaaccctcgacctataccattatgggttagagggggcaccagcaaatttcccaacgtttacaaagcgtcagtgccttaaaggggacaaccaatacattgatacgtacttatcggatatgaacgatgttgtgaacactaggaaacttggcattaccggtgtgattgacatatatcataacaggaagaaatacccggtggataagccctacgacgcatggacattcaatggtaacactagtcattttaggaatggtaagtattggatagacgactaccacggtgaggtcgaagataaattatcatttactaattatcgttgtgacctcttgaatgacatatactcatcaagtcatacacatgggacaaacagaaaatatgacttggtgaactggttaacggataaatccattgcattcccatacggcaatatggcacaaaagagagatggtatgcttgaattattaccagggtactatctaagatgtagtcattgtgagtgcactacatatctgccattatccaccatgttgcccaatacgttgaccagacaacaagtaacagactttttacgacagtttagagatgagaaagagtgtttcatgcctgatgcagaggtatatggcgaaatggcaatgatgataccaatgtgtttcgctacgtcaagtggtgaatgctttaattgtaataatgacttattttctgcagtattagaaatatgtgctgcactttactcagaatcagtggcgtactattcgcgcatacggggcacccaattagatgaattgctcaaattaaatatgttacaaggagcaccacctgatgacatgccaactgcagctaaacaatataacgaattgcacaacaggcaagcagcaaaagcgcttagcaaggtaaattcgttatacataaatacgttatatgccatgtcacaaagacaacgcaccgacatgatgatggaacgtagtcatataagcatgtccactgcatcaagaattagtaataccacgttggagccgtttgaggcggaagagatattattaattgcagacctggcaagtatgtatgtgggacaaattgtgcattaccccaccaacataaatacccaagtttcattgcgtgatgtatgcactactatatgcaacgggtcattcttcaatgatctagagctacctataaaaccaacaacaccaccagctgcgtatgtagagatagtcaatggcactatggacttagtgaatgtcattgataaaatggttgacggagcatatttactcttgccacgggagatcaagggtaatctatatgaacacgtagatgaggaatattattacagtgcaacgacatgcagtacggtacctgtcaagtggtccagaccagtgctagatatcttccacaatttagcaacactgattatagatgggcaacattaccacgtacacaccgtgacaaacggccaatacatgcaagtagtcacaatgacagcagcgagtgatccattacacattagatgcatcttaaattacgcggaatttgaggcacttgtgccggtgtacgacacatccaatcccctctccacgttaggtatcttcggcaccaaatgggaatacaagaccatcaatgtcgaattattaagacgattagttacattcgcaatcactgcggataagacgtcaagtgcaattgaagcttactttgccggaattatcagtacacactataccatcggtggcaaggttgtagacttgactaatactccaataacagaagggctaccagaaatcctgtatgcaatgttgatactcagcaataacaaacttgtaatgacatgggcatcaacactacacttgcacaactactcattgcacaacggtgcaattaacttaattgatttttttatcaaccgcattgcaaaaacattcatatctaggttagaagaaagcaacccttggttcgcaaaagtgttgtcaagcccgacagaatttgcaaggcaacttaaagaccacgcagagaaattacaatttgatacagtttttaaaaatttgatgccaacaattgcaatggacagacagtacacattgggtcaaaatatggtaagcaaatcgtttgaaacaccatatgcatgtacacaccatacattggaatgtaagcattcaataggtcaactacactgtgtgtgttgtggaatacagtcaagagaaccattgtgcgattgttgttcaaaaagcagtatatgtcgacatgcatgtcgacatgcatgcatcaacaagggccatttttgcgacaagtgtaaaagcaacgccaaatgctacaacagggctatatgcaattgctgcggggtgtatggctgtatgccatgtgtacactgccctgaggagccagctatactactaaaagggccaactaaagatattgcatctaaaatagtgccaatcataactaacaacgcgcttaaaatacccaaacgacaccagatgccagcaccaacgagttcaacaataaggtttgagccaaccggtggagacgcatgtgttaaaaaatcaaccaattcatacacatttaagagcaaaggcaaatcttacacactattagcagatgccataggcataaaagatgttaatgacataatgatacgcgttgatgactatttacacataccaatgcttgcatttactggagtgtattatgtgccgatcactcttaccgacaacccgataagtgatcctgtgcacacacacaattattgtgcttacacttgcattgcgaagcagacggactacacagtggtgcagttgcagaatattttcggtgacagaccttcgctggataaaacggaggtaattgaattaatcaagagcttgcgactcaactgcttattaattactaacaaggacgaagcagatataatccattacggacaacaatcagcaccatacataataataatgcatggtagttgcgccacaggaattaaccacaaccattggtgtgtaggtcacataccagtatttaatgaaatgccaactggttattactatccacacagtttgggtcccgcaccgcgagatctaagtaggtataacatgtggaaggcaccagcagcagaagcagcggagatgtcaaggttagtacaagtaatcaggaaacaaaggcgtggaacatctgcagactcgctgcaattgccaacagtcgtggacagggatggagtatactggctgaccaatgctaaggagcacaatcctcggtatggtttaataaacacagctttaccgcaatctatcgaccaagtgtttattgatgcactcaatggtgtatcagataagcaaattgatgcctcgtatgcaaattttaccaatgagtggagtaatgttgaacaggacatacacaattcaataagattgcattgtttggaaattaattactccatacgacacatggagcaaccaacaactgatttacctatgtctacggtcgatattaatcatgacgagccaaccattgaattggtcaatatgggcaggctcaaaccattggatgtagtaactctattacacgacggaaagaggcacaatgcagtcgtgtacggagaagcatcaaacccaatggtatcaaatcactttggtaaggggagtgtactccagatatcaaaaactagtttgagttccacataccgagcactattactagcaattaaggctttaggcaatttaaacaacataccaagcatgaagatcgttgatgcagttgacggtgtcgcaggcagcggcaaatctacaatgattaggaatttaaacaagaaagataataaagttcttgtgtgcaaaacaaggtcagcaatcaacagtcatgcaaccgcaggatttcacgcaagcataacctgtgaagcggcagggatgataatagtgcccacattgtgtgtggtattggatgaggcatcaatgattactacagttgaattagcagctctgattgatcacccaaacatggaagtatacatgtttggtgattccatgcaaattggtgcaaaagatatgtcaccaataaagggcatgcgtcaagaaattagcttgctgaaccaattcaaatgcacaaagctacaccacacacatcgtttcggtaacccactcgtcgctaacgttctcaagagttttaataaaaacattacatgcgatgacgataaaacaactacatacgaacaaattagtgctaacgattaccacactgtcgccgagatagcacgaagtaaaagagtcgacgcaatatacacatttatgcacattgactatacaaacatggtaagtgaaataggtagtgaaataagtgtcaacaaggtacacagtgcacaaggtaaggagtttgacactgttatggtattacattggggtaatttcgcagcagaggggacgattgtcaaaagcgctaacttcatattcaccgcgcttacccgtgcaaggaaacacgtaatatgggttctaccgacaagcatacaaatccgcctgaatgagataactaacatcacatatgagggtagtggtggtccagatacaactctaagcgctttcgatatagaaagttgtgctctaactagggcgctgacaaaagttgaagtggaattgctgtcacgtatcatcacatctaacaggaactatgatccagcggtatgcatgcactacattacgtcagactcgatacgtattcaagcacaaacaaaatacctgggcagtaccatgaatatcgattttactgtcgatcgcaaaggttttcaccccaacaacacttgcactaatgcattcaaaaacatgataaagaggagaattgcacaagaattcgacaccaacttcaaacacatcagcaccaatggtgatgaaattcagattgacattaagcaatcaacagttaagaagcctaagttaacatttgcagaagtcgttgacataggatcttgtgattctacaaatattaatagtgtaattgcacgcagcagagccagcagtatactcagtgataaggacgagtattacgacgcaattcaaaactttacccctgaatcatatgcaatatccagtgttataaaatcattatacctgaataagtcgacgtggtctaatataatagcattagctgatgttgcactagcaacgcaggcgacaggcagccgtcttcaaaccacaatacgcaatgaagtcgtatatatatcagtgtttggtggttgttcactgtactgtggttttaaatttttattccctaccacatgtgtagttatcagctcagctcacaatacggagggtagagatggactgataaacactataaactgcgcaaataggcatatatgtggtatagagtacgatgtgaatgcaatactacaattcatcactagcacacaggtgttctcatctgtacctgacacattatgctttaccagatggcaagagagattaacgaacatggcacaaggattatttgaatcgtgtgatttcagcacagccggcacacgccacaaggtaagtaatactgaattagcagagcagtgtgctgattattgtgcaaattggacaataccaacacatcagccagtggatgcatatttcgttaagcaccatgaccattacgtcagccaaccaagcaacagacagctattttcggtaagtgatatgatatcacataatatgggaatacaaggtgacgatgccgtatttgatgtaaatgcagccaacaaaaagaaaattgagaagatattgataagacacatgaacgctgaagagaagtttgatagaccaacgtatgtgcctcacatgatggtaaagagtgctatgcactctgaatttgtgcaacaagtaggagcaaaccacttagtgccaacagcgattggatgtgaagcaacttcaacattgcacctggcaatggtggtggcagctaatgtgctaaggcaaatgttagatgttgacaaagtgcaccacgtaggtgtgagtggtcagctattctgcttaaatcaccatgttggcgatactataagtcaatactcagataatgacatactgctaattaaaaacatgatgtcaagcaaattaaacgcattaatggagagaaagaatgcaccaatcagtcaagaagatcagttatctatagagagtaacattaagtactactcaaatccatccagcatcatgtgctttgacaaagagagtgttcgcatagtacatccagcacttataaatgataatatgttaggaaatacatacacatgtgttccaataacatgcgatgcaactctgcacatggataatgatggtgtgatacacgagatagggaagaatgggttaactttcaaactgggaatgggacacatgcaagtggttgcaattgttggcaactattatttgtgtaaagtcgtatgcaaaccaataaaagtgcaactcgccggaatagacttacaactcaataatttcaggatttttaagtcatcgctagataacaacaacactatcaaaatacccgacccgatatttaggcggctggtagcacgagcatttgcagaacgtgatacttccataaatgatatgatagcatacagtcggtcactattaaacactatgacatacaccagcaaaggctattcatataagtacaccgacaatccattggacctgttacaattctcaatagttgcattaaattttgcacagaggaatagaaaactaacatcatttgtgcaatcattgctaggagcagaactatcacaagacagcaacaacaaggtatcacaactgttgtcaggcgcgcttaagaccattggattgcaattactgcaaggtccgatgaacaatttggtagaagcagtgcacgacactgttagcgcaataacaaacaatctgccaatagctaaggacatatattcattgttgagagatgtcaattatgtggagctgcatcccaaaaaacaagtgataataaaacaaaaccagacaaggggtgggtacctagatgcagagtatgacaacgacacgacaaacatgcgcagcgtggaagaaagaacccacgatgggcacgacgaagacactacagtaacagagcccaaagacaacactacagtaccagaagacgctagtactaaccaggcacgtttaaagcaaaacacacatgcacagggtacggcagtggttaatactaagtcaggtaaaaaaccacagacaagagataggaaatggtacgatatctttggaataaccacaaccaatgctgctaaaagccgtgtaccaaagcgacaggtgtgcttgctgtacgcaggtagtagaggggataatcagcccctcaatgccatcgctgaaatgtgcatgagcatgggcatgtcagtgattgctattgctccgaaagatatacacgaaacaataccaggcgttgattatgaatactacattgatagctatgacgcactaacaacagcaggcgtcaatcagaaaatgccccagctatcaacaatatcagatcatatggtggccgtatataacgtatggctaaagcatcataaggtacatgattacgtattcagtatgtttttcgctgatgaggctgatatggtgcacgcttgtattaacaattaccggataataccacaattgagtgaaacatgggatccaagagaaaaattatcaggagcggggaaatggtcaatggtgcgaaagttacttggtataccaaagccaccatcactgccattgtggtcagtgccttcagcatggttcctagatgatacgaatttgggctacctattcaccaaagcccaactaagtgtagacaaagcaacagacatggcattgcaattttgtgacaaacataacggtaatgtaacactaatcactcttggatcaatggtgccagataactatcaatcagtaattaacaacatgctaaataccacaagtaatgcagtaatatttgttactgcaaaattacaaactatgcaaaataaatttgaatttgaaggcaggtattatagatattgtgactttactatgcaccaacggattttgattattccaaaatgcaactatttattattaacaggcaaaatcactgaagcgaaacatcactttggcgcaggtacgtacgcaacatttagtctaattggggtgaaacaagtggcatacccacaagcatttgatcagaaatttaacgcaaaacactataccaatgacagaggataccacgtgtatgatccagcggcagagtataatcgggcggcaaggttgctggcgaagctattaaaccaatctctcccagcaactacaatagaagttttagagtttgacacactgccaatgccgtgtacagctataaacatcacaaaggaaatacaagcacagcgggtaatcgtgcatggtctaaaaccgttagttaacaattatcgtgtgaattgtgtcttcaacgtattatttgattgcttagcagacaatgcaaaattgtgtacaatggtagagagctatttaacagtgtggactttccatacggtacaagacgttgtcgccctgttgcttattatacctactaatgctgtgatagtcgggccagagtttagtgtcaaaataagcagaaaagatgtgacagacaacgttttaatccaaatcaactcatcactaacacacgcaaattcgtttgaaatggaaagcgttgaacccattaacgaaatggtgggagcaagttaccaccacactatgttaacaggtgaagtggaagcagataatacgttcctgctcacaaagttgtcagagtatgaaacggtgacaatgcaacacgctatagacaatatggtcaagacaaccatgcgtaaatcgacgtccatccactcagtcgaatcgacatgctatgcaggaggctgcaaggtaagagaaagattagcggtgggttacaaatatttatgtataggcagtagaggagcattttacgctttatccacaagtgctgtagatggatcggtgcacttggttcacctacaacccgaagtctatgactgtgtgattgccatacgcttggtgaaggagtatcatgaggctgttgctacttcaaagggtaaagtcaaaaacactagcgtggttgccataaatcacgccacaaggaagaaactatactcacgtggcatatgtgtaggaaatgtgggtgttgtaggggcggataaactttacatatatgacacctgggcgcgggagcaccaccatgaaatggaaaggcaggtgattgcagaggccaaagaaatactcatagtacctgagaggaatgatatgccaatgattagatcacacaacataaaatctatattattaagtgataattacccagtatgtgtcaacaagggtgggacattcttcagattggagtctactgatgaagttacgtctagagtgtgctgtgacctgatgcatgctaaacagcttacaaaggatttgtttatactcccatacgatgataaaatagcacatttagtaggtaatgcatttatttacggaggcacaaaagttacatactccaatatcaaagaggttgaaatacccaagaaccttcacgcgatgttagcgttaagtcagatagagacacccagcatatatcgcttgtgcgaaaacttagcactgcaaaatggttacatgagtctgagtgagtgcccagttgaaattacacgtaggaaaatcacactggaggaattatcactaacacttagacgtaaaatgtccatattcggtgatgtgtttgttattggtgttaactcatgggcatttcaaatagtgcgcaaagggagtggatttgtgtatgctgatgaacagacagtattggacgttactgactccaaatttaatgtatcaaaatacaacacaatatcagccgcagcgcgtgcaacaggtatagcaaatgatatgtcttcactactaccaatagatggtcccaaaaccaacgcagcccaggaagtgaaatgcctcgcataccatgcaaaggaaaaccaactaataatcgtggcagacgtagaggatttatcaacacccattgaagtaatgcgcttcgatgaaattccccaagcaaatgtgatagattattggaataatagtgaattacttgatagtaacataattctgccaacaaaccggaattttaaggtaacaagccgcatccaaccaatacgggttaaaaaaaatttttacctcactatggaggattatcctaaatttgccagaccgtcgcgaagcaaggcatatgcagaagaactgaacagtataaccaaccgacacggagcatacaaagtgcaccgaaccgtcaatttaaacaccagtcaagaagtagatatgttttgtagtaattattttttgccagatgccgacacaatacttaaacaatatagagcagaaccagttgagttcaacgccgccagatgccaagcatggattgataaacacaacatgcctgcatctgtgaaaagagatataagagaaatgctggagatggggtgggaacaaagaccaatcaactctatggaagtgcatgggaagacagaacaaacaacaaaattaaaaaatgcaaggtggttcaatgaggtggtcacacgtagcattgttgctgcaccttatgcagtatcagcgctttttgcagaggtgttcatggaaatgaagcaaagatttaagtctgtgttgcgatcggatgtgttttattcagatggtagcacgccagcagaattggcagctctggtgcgccaatgcggcgaatttaaatactgtacagaagacgacttgacacagcaagatggtcaaactgatagacaaatcataaacattgagatggaaatatacaaaatgcttggtcttagtgggaacgtgcttgcattctacagacaatgccacgacaattggaaatggaaaggtcacggtatatcaggggtgtgggatgcaatgcgattaagtggtcaggtgacgacagctcttgggaatgctataactaatttgatagttcacaacaggttcatgttacgcaacagaaactcgataaagaaagtactatttttaggagatgatatcatattcttgtccaataccaaattaaaagtggcaaatcacggtactgaaaccaaagagttgtacaatatggtaagcaaggtaagtgaccgtgcctacgtaggtggtttcatatctatgattgtatataatattagtggtaaatcgggcatatgtccagattacaagcgcatgcgtcataggtactcagtatgcaattacacgtatcctatggatgagacacaatcaaaagttgcaagtcgcactttgtcatatttattcatgataggtaaaaatcagtggacccagcaaatagtatctaaactcggataccaattgacgctgccacaatggtaccatcaagacactgcaatagcagcaaattgtgaataccatggtgaaactgaatgggagacacgagcgcacatttcagcactcagggatatgttagagaaacaggtggccaacagaaaacagataatgacctggagtgcggtgtaacgggttgtctagtcatacaatttaatttcattgcgggagcaaatcgtgagcatgtcggtgcgttgtcttt

SEQ ID NO: 837 - DNA, 14878 bp, Triticeae associated alphaendornavirus
  source 1..14878: mol_type = other DNA
gacaatattaaaagcacgcaacaatggcatgcttactaaaccgcaacatcgcggctaaattcacgggtggcttacaccctcattcaatcggttgcactgcctctccttctggcagtgcaactttaaacttaggaaggaaaaatgattcagtgaggaagatgtttcggaacggaggcaaatccattaaactgggtcaaaattacgcggcgatacctgccgtaatgtcttgtcacaaggacgagcacaaccaatttgtagaatttggtcccgaggcctgcattcctgactttgctcatttagacgaacggtcttttcgaaatttcctgacactgtatgcatttgggcattgttacgttgacatgaccactactaaccaagaatcaatattgcgagcggctgcgctgcagaccgaggaacccatttttgggactaaactttactggtcaacaatgacccccgagttactaccaggctttaagaccgatccctctcctgatcgcgaggccctcaactttatgttgcgtgtgttggccaaatttggaggatcaatcaaacagctcatgaggactggtttgatacagaactacaacttgacacctcatatttacaagaaaaactgcaagtatggatttaaatcgggggaaatgcccgaaccacatggggtgaggttgtgtcacaactgtcatacttgcaatttcatttggcttcagcacccagatgacggagttaaaaaacaacattgcggtgcatgtttctttagcttggatttgcaacctgtggactccgaatggtacatcccactcgtggtggtgtcagatttgacgcaaatgggtgttgggacaaaccaattacacatggcaatgttagtgggagacctggacaaatctggggatttatgcaagacaactgttgataaactaattgcacaagatgtgaaaaacatgagaaaaatcatgtcgaggaagatgttcaggagtattaaagtgaacaacgggatgtcgaagcgacaattagactatctgcggacacataatttgtcattccagctaattccaacgcgtggcactcccaacccacacgccatgttggcagctgaacgtaaactgatctggtactccatggtagaaaaagtgggtgttaaccaagccatagttgagattggtgccagaaagtgtcgtgacaacacagtagtcaccaactggcatggaattgggcctacaatggattggcgcgatgttgagcgctacagcgctctgggtgtgcccacaggttcttgtggacacatgttgcacacttgtgactgtgaactggcgccaaattcattgtttatcgcagtggacagcttgtatgacgtgcatcctgcacatgttatcgaggccatgaccagaaacggaggacaacacttgttatttacattgacaactgcaccagtgaacttcgatgaaaacgagggcaagttgttctttgaccagggtgaatggttcagggacggaagcaagttgttaaccagcctggcgtgcgatgaccgaccttacgaaaacgactggggcaacactaaagtatggtccacagctcacgttatcgtacacggagagtatgtgctgaatctaaacacttacaacgtggttggtaaccacattatgcgggttggacacttgacgaaaaacaaaatgattaaacccagagcaacgtccactgatttgagcttaactggtaaattgacagtacaaataccattaatacaacgtgatagttggttaagtcaatcctgggtaccagtaatagtgtatgaacaacgtgaaattgacatgcaactaatgcgagcactgcaatccaggaatctcaccggtggtgtatcttttgagaaaatgcttgaatttgggttggcttatgcccacaccaaatacacaacacctactaaaaccgtgcagtacaatcacttgagtgctgaagatgtgcgtgtacatgcgttgttggcaactgtgcacacgagaagaaaactggcttggttgttggaggccgacactataaacgaccccaaatcaaattatggtgtcacatttagtggcgctgcatggatgagcactgtggaatacttactatcggtgttgacatcatacgaagggtcgggagttatgcattcattgacctcggagtttggtagaaaaatggagcaaacaattatgtcatggatggaagacccattttgggatatactggatggtgcatcagcatgcacttttgaattgtctactattatagttaatacaactgagacacagccaatcgaaatgagttccaaccccatattatgtaaccaccacggtatggcgtgctctcacggattggcaggtgaaaatgtgtgtaggtgctgtggaatagcaggcagagtgcatgatgatttgtgtgaatgctgttgggcaaaccactgcaaccacaagtgcaaccacccttgtccagatccaaacttgcatttgtcagggcgagggaaactggtaacatgcgaatgctgtcaagtgcaacacaatacgacggtgtgtctgccctgcaaggtgttgatcaccaagaacaacagcagacatgagccaccagtgtttgaagtgccaaaggtgaccaaatcgaaaggggagcacaagaaacccaacttgacaaggaagggcaaggactttgtacgtgacaagcaacagacaaccaaaccaacaaatgaagcgacggctgaacccgttctggatggtcataatgccgacgccacactgccagatgaccacatggttggtaccataatgcaccagtggttgcaatctcgtcaagaaaccagtcagcagcatcaaacagttcaaggggatggccaaccacaaggtgataacgttaacgacacagatggttttgacactggggtaacaccagacatacctgatgaatcaactgaggatgacagactgtcactggaactagctaaattaaccaattacgattatgccatgtccgtagcatatggattgaaacaagcagttctcgagtgtacaacctcgccttctgactacaattgtaaaaatagaccaggtgtcagtcagatcagattcatgccgtttggtaggggttctaccttgacatctaactttcaaatcatgactgtaacccctgttgttggcgacggaaaatgtggttggtatgcattgcaacaggctataggcgatgaagcaagctaccaggacttggtgttgagtgccgggaacaaacgtgattggttttccgctgacgacctgattaagtattgtggtgaattagggaaaaactgtcttttgttgtttaaaacaaaaacaatgtattaccacactaacgcgtcggatgactcttatgtttgtataaggcacgggtccatgattcaggagggttaccaacattgggaaccagttaacgtattgcaacaagacttgcaagaatacttaccttgctggcatggtgcatggaccaatcgagactcaaagaaaatgtcgagggcaatgggcatgagctatgaaattactgagttgagccccactgaacggttgaaattggcagtggaactgaataagaaaaacaggccagcaactgacagggcaaactataagcaattaatgccgttcatttatcacaaggatggaaatctgcatttgagtaataatgttgccaactgccacgacgttagcaagggcttaattgatgtggtagtgccgtcatgggcatcacaactaatggaaaacctctgtagtgatttatgtgagcaagtaagagatgaattgttaacgaccgattatgatctaccagctttaacagatgctgatggcattagcgagacaaaggcgtaccttgaaacattggtggtcgaacttagagagcttgcaaaagaattaacaccacgtgagtttgagagcagagagcgaaggagcaaatggaaagaatataacatcaagtgtagtatgaatgcaaatggcattaggactaccaccttgcagcacaccaaactgaaaactggtgatctggtccatgtgggaaccaactccagggtgacgagacggtttgtgactgttagaggtaactgtgttgggtttttaaaccctgactttttgtctggcactacaaagactttgaaaatgtacattccaaaagagagctacaagagtaagctgttaaatttgttgtgtgcattgcggcaacacgttccaattggtgaatttaaagatttaatagtcaataaatcatcagtgttatacggacccggtggatctgggaaaacaactcacttaatatcacagttgcaacacggagatgttattgtggttaagacaaggattgcaaaagagacaatcatatcgaagcttgaaacaacagatgtgaccgtgtgtactcatgagcatttctcatccaaacaagtttcagcacaaaggttatttgtggatgaatgcaccatgttcaattggtttgatttatttgtgtctttgaccaatttgcctgatgcaatttatttctatggagacttaaatcaagtgggggctattgacacacatgcaaagtcaggaacacgtgacataagaccagtgagtgaatggagtaagaacatcaaaaccatgacaaccacatatagatacggcaaatcgttagctcaagctttgacggcagcaggcatgccgatgactagcatggcttctagagatactgaaatgaagtggatcccggtaaacatatatcaaccagacgtaattagggattttatcaaccaagagaaacctaacgttattttgacattttacaacagtgctgctgacaagttgagacagattactaatgtggacgtggaaactgtgcattcgtaccagtcccgagaggcagacaacgtgatggttattcaatggaacactgagtcccgtaactctaaaatttggttagactacagatattgtgtgtcagcggcaaccagatgtagacacaagttaacatgggttggggtgggtttaccacagggttgcacgctggaatcagtgctgcgtggagcaagagccccaccaagacaagccagacccacatcactcaacttttcagctgccacagctgctatgggcgtgggaatgcgttggatgaatgatgttaaagtggacgatgtagttattcttgacatgcctcaggatgaaccacaagtgggggggaataaatttgacataattaaaacaaccccctggtcacttgatgatttgcgcatcgtgtctaattcacatactgctgacatcatctacaattgggcaggaatgagcattgccgaaatatttgatgggtttgttgctagtgcaccgcgatttacgacagtgaaacgtcatggtacgaacatccagattagaggattggcatctatcacgtttgaatttgataaagacaatttgtctgccagagtagtatatggttcatcaatgtttctgagtaccgtgagagcagaagtcagacaggctgctgttgacgaaaccatgaagttgttgctagatctatacaacagcaacaaattgatcaactggtaccaaggccttgactttaggttgaaagaattattgtacaacaactggggtgagcaactaggaatggcaagattggacatagcagaagctaacctggcaaacgagctgagtgacaagcacaaaagcgacgatgaggaaatgccagagttaataagtgattccgaagaggcgtttgacagtgatggggatacggaggaatttcacgaggcagtgtcagacatcggtgagctgcctgacttcattgatttcgggtcaaaatcgcaggaaaacattccggcaagggttggtgctgactttataaacttgctgtaccctatctctgattacattgtgtgccaagttgtgcaaagcgtattaacctcgcagccagtgtcgcaaacaaaatcgtttgaacccgaaggagccacactgttgcacatatactcaggaggccagagagtgttcacgctgcagagtttatttgaagggatgaatgtgcgtgtaaactatgatgccacagcaggaaaaataagtgaagaattcggcaaagtggtgtccgtgtggaacaaccaaatgctacgtgaatacaggggttcagatatgtggtggaatatcaataaatttaagaaggactttgtaaaatcaaactttggtgacattgtgataggtgagacgatgactcacaagacgaaacatgatctgctgaacacacttcatgaggcagtaattgcccacttggaaagcattcacgtacaattgaatgaattggaattatatgcaagtgagctgttggaaacaaatgatgccgacatgttcaccaacactgtgaatatgtttgaaaattcagatgacaattaccatttgtgcccagatgcggaatcttggtgggcaaccaatacatgtccaagcggttatgatttggtggaattggacatagaaccagattacgcgctgaatttgaggctgttgaatgagcaggtgagcaccagggtaaactgtggtgtgccgttctttttgagaacaaataacatggaagtgcggttggacacatttggaggttgcgcactttgtgcagggctgtcatgttacctgggtgatgtttgcataatgaaaatctgtccgcgtaaaactatcagaattaacaacaaggccttgatcaggaggggtttcaattattatgaagtgggtgtggtgctgaacgtgctaagtgctcgtacagacatagtgcaagaaatgttcgaatttccgctggaaacaatagaaaaggctgcaatattacatcaaatactaatgaccccaggctacgaactcggaatgctatttgaacgagtatcacaaatactaccattgctcaaaacactacctggacgcaaggagaattggaagctgtgtgttcagcacaacactggaaacaaagcattaatgaaagacgtatccgtaatgttgaagaaggaatggaagatttccaaagaaaatcgtgttttggggcacagtgattggactgctaacccaattcaggtggtaaaacccggggaggcatgcttcgtgcaaattgtggatggcactgtttgggcgaccacgcgtcgttgttttgttgacggtaggtcgatcaagtgttgttcctttgatgaaatggtagatcgtatgctcagacggagggtaatgtctgtgccctggaaaatagcgagaatatgcatgatgaaaaatcctaacaaattgggcattggtgcgcaaccagacgaacatggaagcagcatgaacatgtccatggaataccatagacaacacaacacagaagtgtacaatcagttcaggcagagaattgaaagcgagctgttgcaatgcatgatcaaaccatcgcatatattgttcatgcatgccgatcaatataagcggtacaacaatttgacgtccacagaatgcgccaacttgcctactgagatacaaaactacgacattatggaacgtggattcgatcagcttgtggaaaacgtgggaatcaagttcttttacaatgaattaccacaagacacaatgtgtgtagctataactgactatccttacttggcaatggccagttcctgctggggtgtgttttgtcattatggtcaaaaaggtagagaaacaaggtatttcaaaaatttgcttgattgcaacccaattttacttaagatcaagcagatatatggtccatcaaaacctaatgatcaaagcgatgaaaccaaagcttactacaatgccataaataatgcggccacacatcagatagagtcaggtgaggggccttggtttaccaccagactgacgccattaaacgaaaacatcacgtatttgtacatgggattaacggcgctgtggatgaaccccgcacagatttgtgatttactaaaaacacataaagtgaagaaagcagtgttgaagtgtcctgttatgttcaacgactcaaacaaattgttcaaaatagtgaatgaaactaaacaattttatgatgtggcttatgacgggagcaatgagacaacctccctcaataaagaaacttacgagtgcgtggctaatggaaaaatttggggaaatgacgagggtcatcttatatttcacacaactggagtaaatctaggacattctcacacgacggtactgtttgttagcagtcaggtaaaacttccaagatactgtgtgcctgtgcagcacatgcacaaggaacaacacgtggtgtttaaaatacccagaattaacgacctgcgacgaatgttggcggaatgtcgagccatggaagttagaacagtgaagatcgaatccaagttgtacaggtcgttgagtttgcgaatgttacgacccaacactaccttcaacgacttgttggcgtacgctagggcgtacgccaattccacaatgtacacatccattaattaccacacaaggcaccaacagtgtgacacttctttgatggaggcatcgttatgtgtgtattatgaatcaacacggttgaacgatagtataagtgaaatctgcaaattgttgtgtgattcaactaaaccggctacatcattggagaacgtctgggcaagcaccaaggcgattttaattaacatgctgaatgcctttgctagcatggtccatcctgaagtcaaggttgacgatgtgatcaaaggcctggacgcaatgttaaaaactaacgagaataccttcattcaaaatttgactaaatttagggccatcaagattgtcaaagaggaaaggcattccaaattgttgtgcagacaagacgggaagatgtttggaggaagcagactacaaaaagatttgaagttgttggaacaattcgtgacaaccactggtggtctgaccaccagtggattgaaacaatggtggaaccaacaaattgatcaatggtccaaaacagaactagtctcccaattggatgtagagacgacactgagcacgatattacgagagttgagtgtttgcaatggtcaaaaactgagcaccacattgttccagaccgtaggaaagttgggtctgtcattgaattgtggcactgtaagacaggcggcaacgctgattttgtccaacttggcggacccaattcaagtcatcccaaatgaaagcacttatacacagttgatcgagttcaatgggcccatttttcaaccatgtaataagttcaccaaacacgacggagataccttgtcaatttttcatggaataattgctgacaagattgaacaagtgagctggaggtatccagagaatgtagacatgttgagaggtgacactatcttgttcagtactatcggtaccttgggtgatgttgagccattcagaaatcttgcaaagtggttatcttccttaggtacaacatgcaagtttatggtatgcacaccctatgatgagttactacgcaatgacgggtttgaggtgttcacactaaacttggacagtgaaagattaataaaacactgcatatgcatggagtcgagtgaaatgggcattgtggacaaagcaaaagcactgtacgagatattcgacttgacatctggtatatttgactcaagcattaaacaactagacaatttctttaaaggagtaagcttagtgatggaaacgcccttcacccacattggagtgcaaatgagtcaacgggcaagaatccctttcttgttgtcctcagcgtacccttgggagtgtggaaatggtaaccagcctgctggaactcaccaatctttacgcacatttttgactaggtctatgtcttacctcccgttctttcaacacctaatgaattggagggccaaacacttgggggtgtttaacaacagaggagtgttagtggccgcggggggcactcccacgatttacttgcaccaaagagagttaacgggttggtgtgtgagcaagagttcacaggtaattggatacccaccggcagtgatggaagacaataataagaacgaaagagaaatgatgttgtgggcgtcggagctcccaaccgctgcaatttgtatgggatcgatgttgggaccagaggccatcaccaggataaacaggtgtaaaagattgttaccaaatgatattaaacaagttttaataatagggaaccatgaagatggtggccattatgagttcgaagggaaaacatatagaacaataaatcagatcaattataacttgttgtttccattcacagtgttggtaatgtgccatggaggttgcggcacagttacgacagcgctgcgacatgggaatgctgttttagtagacccattctttggagatcagaacacgtgggctgaaatggtgacaacactgaagttgggctggtccacccgtgatttggtgaagcctgatgggacattccggagaattacgcgcaaacaattggttactgctgtgcgaaatgccataaccaattcaaccaagcagtctgacagtcattcattcatgaatttcgtggccagttatggcactatcatgggcaagtctcgtgagtacctacgtcacttacaagaggaccaagactgggatggaaccatgcaggacgtgtacacgaatgaatgcaacctcgcatttaaaactcaaaccgacccaagttgggctgacgtagccgatgtggagcaattaattgacgcaattggtcagattgactcagacgagtcgagtgcccaattcgtatctctacaagtgcaacaaatgtcacatgtcccaacacagaactcacaggagcgaaatagatgtcggcaggtgcgggatggagaatgtaaaaccactggggagcagaaaacttttggaacaacgcaacccctacggtttaggtcatacaacctgtcaaagcgcgtgaggttaagcgggaagatgttaggtcaaaatccaaaagcaccagctaagacaattcggactcaggtggaagatgttgaacaacaccaatcaattcgaacaacgagcaaggtggcccaggctgtgcaaacgagcgaatttgagcaacccttgattaccaatagttccaacgcaatgaccaattcagatcgtgagaataacgttatggttaccaaaacctgtgccaatctgtcagaagaaaacgaagcaaaaagagcggtcaaaaagaaaagaacatgttcaaaagatcaagaaaccaaagacgaattgctttggcactgcaatgtgttgtttgaacaaaacccattgatggaaacaaacacgagtgatcaattggacacagaaaacaggcgcatgtgtgatgatcagagcacctcggaacggacgcaagactcaccgtgtgctaagacggtgaatgaaaatgtgttaacagaaggcacgaatgctcaaaattatgatgagaatgtgagcaagaaacctggtcaaccatccaaaagtttttgtgtacatgcagtggggccgcaatcgtcgcatcatattcaacacttttggcaaaagagaactattgccgcaaaattaacgctaccatcaacattagcaaggggtcgtattgtggaggcaaacattgagttgcatcgggtgacactgttcaacccagccaaccaaggcacatgtgtatatgactgcatatctatgttaatgacgaagcacggctgggcggaaaggaatataaagcggtcactaataaaattatcgcactggtgttcgagcaacccattgcccgttgaagcagagattctggctatgttgaggctaattggaatacccattggactagtggtgcagggtcatggtaggatagtcaatttttgtggcactccaccaaaatgggcaatgagcgtgacttaccagcatggtcttggacacgcggtaattaaagaagttaaaacgatacacaatgttagggaagcaggtcccagaaaagtgggattcacagctctatatcgcgaattgaatcaactggctgataccaccaggtattctattgatgacttcaggcacaattggttatgcaaaccgagtgagctacaaactcaaatgatgaagcacttttgtgtaagtcgagtgaacattttggcgcaacttaaactaaacaattatgagcatgtaataaatagacacggtaagtgcatatttcatgtgggaatgacgtatgatgacaaattggtgcacacaaatttcaaagatctgccatttaaattgggtcaggtagcattgttgggtaccgaggaaggatttatggcatgcatgtgtgtgcccgtcggtgatggtatggtgtttttgccgttgtgtaacactcagaattgcaaacctgatggcattgtaatgtatactgaggtgaaattaatgcctatagcgaggcgtcgcccaaaactaattttgtgcaatttgccagctgttgggacagtgacatgcttgaatgaagccactaggtcatatgcactcaagcacgaaaatacttcattgtgcaccaccataatggatcaaaatgcgacacacctgatgatttatgagtgtgatggtagaaagcaccatatgtatgatgaagtggagttggtcaagcgattcgacgtggatcatgtcattggtctgggtgtgaagatcactggtccaatgtacagaatgctgactgagcaaaattgtggcttcaggtatgcaatattaaagggcaaatcgacagcagtgttggagtttacagatgagcatgtgaaagctggagtcaacacattgttgagactgatgaatgtaaagccgaagacagtgtcaacttcattggagatggaattgggtaacgacaagccatttttaaagaatagactaaaacaaatagctggtagcttgaatgccgccaggggtcacactaacgtgactgtaccaaagtgggctgatatctggggtcccataactgcagatagggtggctgaattgaaggtagacttgggtgccctggagcacctggtggatggtaaccttgttgagtatgagtggaaaatcagtgacgggagcagcaaggtaatcccaatagaagcaaatccactaaatgtgacctgtgtaccacttggtaatagtgaattggtgtgcactaagtatgtgtgtgtcatgagtttcagaaaatctaacaattccatatccggtggtgctgatgaacctgtgaactggaagcttgaccatgattacaaaccctcatcaatgtcgaggtggtggggaatggatgaacctaaaccagcgaccaattttgacgtggataagtggtccaccaggttaaacacagaagcattgacaacagtgttcagtgagaattataaggccacttccagtggaccagttatttcatcggctgtgattccaactaattcactatacactccgatatgtgagtgggcaaatgttagctccaactgggaagtgagcgaagagcaattcgacatgcacgttgtatccttgtggactgacggtgatttgtctgattggaatgacaaattcggacccaccaacgatgccaaagtgttttcacggttaccaccaactcaactaagactaacacaaaaaacaacattgaaggagtatccagcatactcaagacctgtgttaacaaagtgtgcgaaccaagaattcaacgccgtcacaggtagattgtgcaaggtagtgacatataggaaatttgaatataacattaaacatgagattacagagttcatgaacacttattttgacccggagaagcataacctactgtgtgactaccagcgagacaaattgacgttcaatgattccaaagtattggactggttacgagaacgacccgatagcaacaagatagctgatgagctggagatgatattgtcgtcagggttggaggtgaacccaataaacaacattaaggtacacctgaaattggaatcattgctgaaagaggtgccggcagagtctataaaacaggtcaaagccagaccattgatgtggcaaaccaaaggttactgtgctttgttttcccacatcttcaaagaggtgaaaatcaggttgaagaacatgctcaaagcaaatattgtatacagtgacggattacgagcggatgagctagcagccagggtaagacaagttagtgatgccaattggctactagaaaacgatttggcccaacaagacaagcaaactgatcaccaaataattgcatttgaaatggcgttgtataaagagttaggagtggacgctggtgtggttaacctgtggcatagatgccattttcactggaaatacaaggcagcaaccgttatggggatccgtgacgcaatgcggctcactggacaagctaccacagcaattggaaatgccatcactaacatgttggtacacagaaaattggcacaacaagctggaaacaatcttaagttattccttatcttgggtgacgatgggttaatgtttacagaagagatggtggacgtgcataaattgaacgcagaaatgaaaacaaagcataacatgatgtgcaagcctcgtgtgagtcagcaggtgggtacgttttgctgcatgttggttgccaaaaaccatttgggacaatttagtctgggcccagattacgtgaggatgcggagaagattcgaggttactaatggagtgagtgaatctaccgatgctaacttagcagcacgcaccatgagttatgccatgatgttgggtgcaactccggaagtgatgaacatggtcaccatcaatgggtggcccatagaacccttgagatggtatgacgttgacaccactatacaagcttgtagggacaaatacagcatggaggacaatgaagtgtacaacaattatcatgaattaatacaaatgatgaacactatgcgcacgtatgatcatgacttcttgcattgggaggaaaaatggtaaagattgaatgaggaaggcaaagccccccc

SEQ ID NO: 838 - DNA, 15941 bp, Tvarminne alphaendornavirus
  source 1..15941: mol_type = other DNA
gtgtttggggggatggtaaacacgtaatatttatatctggtggtttgtttcagggcttatagccggttaagattttgtaatcatgatgatatggttgggggttaaaaatcatgcctgcaagatttgatatgaatccatctacctcgtcaatagatatgtcatatttattggcgcatgcaaccctacaatctgtgctgccataccaagaaggaagctcaatgttccaaccgcgcacttgcatcttggcttttagggtttcgtcatcccctagcatcatcaaatagctaaaggatctaagtaacaacgcgctggcctgtttgttctcgaacattttggtcagcgtggccaccacgtcaggaatggaccagtatccaaatgcttgttgaggccccgctaacctcatgtcagagtccactctcatggtagtggtgttggtgcctttgatcaggtcttcaaagtaagagatgttgattttcacatggttgtggttgtccatgtattgtctcttggtgcaatatgccaaattggtgcggctttctatgttgttcccttcaaacgtgggttcccttaatattaaggtgccaatgtaccagtgctccaacccctcggggacgtgctcaggtctattcaccaaacggattgtggagcccgtgatactgctcaagtgatcttgcatctttttcacgttctcagggtcaatgtcgcttcctcccgagcaggttataccaaggttcttagcatattgggtggaatcataacagcccgtttcctcactcaatttggcgcagttctcgccctccggtatagctaggtatccgtacttggttttttccggtttccccttcatccaatggagactggcccagacctcaagttttgtggtttcaattgttttgggtatggatctgccgatcaccacagtagaaggggtggctctcttttctgtctgaactccagtgtaagtttgaaagttcacatttggtactggttggtcggttatcaaatattgggtcaactcattgtcatttatcacaatgtatggtatgctttcagttgtcacgtgattgccaccgttagtcacttcgtagcgtctgcacagtctcacgtaatctggtcctgcttcccaaaatcctgtaagagttctgtataacaacaggcaacaaaatgtgccatatcctcggtagtaattcggcttgcattgcatgttgtacctgtcttccaaccggcgtctgagcccgtcaaggttgggtttccggtccattagtatggcaccgtcgtcccccaggaccaacatgagcttgatatgcttcatgttgtccagcacaaattgggaatgcactatcaagttaacgattacattgcctatggccgttgttgcttggcctgtcagacgcatagcgtccaactggcccctggtttctgtgcctttgaacctccacatgtggtgaacttctctccaaatcttcagcactgtggggtctacccccagtaagtcataaagtgcaaattcaacgtctataatttcgtgatctgtctgcctgtcttgttttgtcaagtcgttttcaaagcacccttctgcgttaaccaatcgtaatcgagcggctatttcactgggtgtcaatccgtcagtgtactccacagcactgtgaaacaattgctttaatctatctttcacttgcaagaatattggagaaaacattccacacagtaccttcgcttgccacacaatgattctgccttgtgattcgcgctggaagtggatcgggttgtcttttaagagggactcttgtttcacatgcacgttcaccgagttcaaaggactcacgtgcagtccttcctgcataactctcaccaagtctttgctcaaagtgttccagtctttgcgttttgctacccactcactgagagttgaagggtcccaggtgatcttcttcgtcttccacttctccaggagtccggcgcagtcttctctgaagtatgccttgatgaagttattcacttccctagacacgttaattttttccttgcgtagtgtcacaatgctgcccagcctgccagttacggcattgaactctgtgttatactgcttggccagcactgctctagaccaagtcgggtacttgactaatgtggtttttgtcatcatcattgtggatccctctgcttggcgactgcctagtttcatgtcttgtaatggagcgtattttgtgttgtagtcggtcaggtctgaatcttcccataagttaacgactgtaattggcacgtggccgtctcccgttagcatggggtccgggttctgtagtcgtagtctccccttgtcaggttcgatgtagatcattggtccagtttgtctgttcaaagtttctatgattgttggatgttctgccagctccgtgatttccatggcatccaaagccgttatgttattgtaagctggctgaaagtattctttgacgtcagatgatttcttttctgcatatttcttaagccaaggttcagacggtaagttgtatttccacctcatttggcccactgaagcttgagtgcggcccgcctgattgttactctctttttcctcaaaccaagtgtcacgcattgctgtgcccttgcccgtcaactggcaatgacacagcttgtgtgctttttcgcacctgcagtagttgtgtagcttgtcgtgggctccgcctgccatgcaaaggttgcacctggggcaggtgttgtgctctatgttggtatcattgtgtttaagaccgcagcctatgcaatggttgctggcattgaagacgtgttgtctgcaaactggtgacagtgctttgcccgtttgtatgctcaagaaaattgtggctgctagtgttctgttatcaactctggacactgacttgccggtagcctcgtctactatgctgtggatttctttgtttgactgatgggggtctgttatgagtagttcattcacgttggccgtgtagtagacgtggctagtatgctctttgatattccacgagctgagtgtgcgggaaatcacatcacatgagtcgcttagcatttccaccacgactgggtgcccgctctgaagtctgcccactcgaatgcgatcatgattaatgtttgttgcgactctcaactccaatatgtgtcttgcatgtagattggttctcaccagagggacgctgtggcttatgatcaaccttccgttcaacatcgtagacctgccgtcgaaatcgttgcactccttacaagacgcaacgatgcgttctgcaaacctttggtgcggttctggtagacttgacagttggctggctggagtaggactatctaatggttccatgcttcgtataagctggtcaccatcttctatgagttctgcttcattttctgcaacgttaacttcttttctagcgttagcatttgtacctgcttctgcctcgtccgtcgactgttctgtgccagcagtcgcttctgcctccaccgtggtgcctccttgccccacctggtttcttgtagcgtcagttgggtagctttctgttacgttaagctcactgaaactcttactcagctgatcgatttttgcgtctattgagtcagcactggcttgctggcacgatttttgcgatccgctggtactgggttcgtcaggtgatgccagctctgattgagctgtttcttgtcgagcatcttttgcctcttgttccttgttgtccaggccgctggtggcagcactttgctctttactgtcggtggttcctgctactggtgcatttctatgaaggtcatgtgttgctaacgattcctcttctgttgctgtcactctatctgcgaaactgtgagaactcggcttgattctgttgtcgcctgctatgttagagcggttgatgctttctaacacttctttgggaatgttgtttccatcttctgacaggtctatgtcgtggtctatcatgttggcagctgtgtaccaagtgtttcggacattaatggtccgaccaccttctgtctctaaaaccatcacagccctacgcaggtagaacctccatggcagagagtagtttgtgaaaatcattctgtttgctactggcactgatgggaaatacagaactttaatggataataattgcaggaaaatttcgtcagctccgtagacgtgacctacgtgttgcaaacaccttataaatggccgcagccactgtttgtttgccccggtggtcactcggaacattcttgctacaacgccgcccacatgcaagttccatgcacataatgtctggctagcattgtcttgcgtcatggtagccaatcttctcagtctcttataatcatttatcatgtcccaatccctgccattaccaatagtaatgttgagtcggcgtgctccaatgaacattggcaacatgcgcaccatggcagcgtcgataggtttgtcgaaagtcatgccgatggtcaagacgttggtttttccgatatatgtttcggggtggtcggtgatcaccaccactcggttaaacatgctggtgaaatgatgtattacatcattgaactcctcattgtaagaaacaccagcgcaagctgttaggtaatcaccatccaataaaaagtcagtgaaatcttgctcatacagaactgatctcggtggatctagacctgtgtagtcgtcagacaatatggctctggcgattgctggcgtcaccgcgtgcgggtatgttgagtcccctgctctgcccaccactttgtctgatctgtagatgcctgcagaattgaagtaccaggacttaacgttagccatttttgtcttggtcggtttggactttgtaatgaattcgttggtggttctcccaaataaggtttcattgacttccctgcttaaaggctggtgagtttcttccgggtcgtctcgacagcggttgcacccgggacacccttcaacaagcctcatagccctgttgcacttccagcattccgatttgtatactgagcgagtgttgtggcatttactgcagcctgaccattcctccatgtttgtgcttggtttgattctcccatcggagcggaatgacatttgcatgaacagccgccattggtcagattgtatgcatacacttccagcaggaattggcaagttagcataccagtgagacttgtcgtggctcacccaggtatgccagtgatcttgccagccgttggtccactgcagacccaggtttgacggcactggcaagcaagttctgggtggatcaactgtgtgctgtttggtgcaaatcattatttcacacctgggaccatggtgtggagctgcacttatcacgctgtcctctgtttcgcctaaccaaattgctccactgtatcttgttctgctgcagcagcggaattctatgaacgcggctgtttttgcgtcccagctctctattagaggcccacatagggcctcgtctgaaaatccgctcttgcccatcgccaacgctatgtaggcacaaaagtgccaaaattgtgtggtcaactccatgttgtaatcacgagtgtaagggtaacctttgaccacatctaggtactctatggatccatctttgtgtctgttttccatttcagcatcgttactgtgaattggcaagaacctgttttgatcccatctactcagtatctcactgcacaccgtttgacctgcaaccagcctagcgtcttccaaccagttgggtggttctatggaggtgtcatcttctgattccttgtcagagaacaggttcacgctgctctcactgcttgtgtcactaccagaagtgtctagtggtagtagcactgcctgctctaatctctcttgcgggtctcgtggagctgttatcaaccatggtccaactttacttagcaattttcctggttccaattgcaagaggtcgaatgtggatgttgaaatgcccacttgcggttcatcaagggatcttacgtgaaattcgccattagggaattcatgttctatcatttcagcgagtgttatcactgggtgcactctggtgatggcagaggccagctgcaacgctgtggcaaactggcaagcttctttgtaaaacttgtaatggtatgtgttcccgacttgctttgtccactgtttcatggtagccagggcattgttctttcctctctgtgtcaagggaaagttcatttgtagcatctcagcgttccatcgaccatccgggataatttcacacttgtcagataatagtaaactgatttccttggtgtgtgctgttgccatggtcaagataggctcaccggcttttactgacagattgaccacacttcgcgcttgtaccagcatcttcctacgttcatcgttccacagtcctactataggatctggctggaacttgaattggctgatagagtgcagccttatagccacactttcgtcgtaaagatggtgtgctctgttttgatactcgtaaatgtgcagtgcagctgacggtccagagacgacgggaagcattgtgttcaggttgttggacaagtatttcgctgtcacgttattcaagcaagtttcttgattgccttctgcgggtatgattgttttggccggtctaccgtatctgacagcggattgtcccaatttcataattccacgtgtgctgcccacattcattgtactggtgccgttcaacacccagacttgactatagttatttgttggggtgacgattccgatgtaccacccgtcagttgcgcacacggcaacgtaatcccatggcaccagttcttcttcacacattacgccttgcgttgttatgttacactcgctggtgatcagaggttggattttcctggctactctgtggattaagttgtctgtgatcactggtggtttgaacagatccagcacactaggtttctcagcgtttatggtctgattgatttctaccgtcaccttttctacggagcaatcatgatcgacaataaaggttccggctgggtggtagcacgggttgccgtactcggtctcagattgcatgggccagtccattgctgtttccactctgtttcccgtgcattcgttccactgaagattgctgatagttttgtctgctggtgatactacggataaatgtctggtgacatacccgctgatcagcaatggcacacaggtgtcggcagtgtcattgttcacaattaagtttgctactttggtggcatcgttcatcaacagaatattttcaccgagggttgttagaatcgttatgacatcagcctcactgacaagacgtcttatgttgagcattgccaagctgtcaatcagtgttgcatcagcttcttctaagtcagctaggtatgctaagcagttttggaagcagtggccttctacttcagggttgtagatggtgattggtgtcaggttgaactttgaggtgtagttgcccctttgcattcttgttttcagtgcatagcgcttgttaggaaggatgttcaagtgtaagttcatggctttggccatttcttcgtgagtgagaacgcgcttgaactttgatgcgtcactcttgctgtcgtcaatggtgtcatccttgggtgtttcttctgcggtcgagtgctgctgagtattcttgcggtccgatgggacttctgcttctatttgctcgccttcatcgctactctttacttgctcgtttgactggtcgtcatcttcctctgggtaaaagaaggggttctttgactcaccatctacttcacgtcgtgttaatgatgtcgagccactgactcgactggtgttgagacccgtggtagttccaccattttcctgtgtgatcacagagtggacgggttgtgccgtggttgcgttagcctgttgctgatcgctttgtgttgcagcctgtccttcagcttgatgcacttgcatgtgttgtatattgcggatgatctcgtctttcgtcattttgcgcttccaagctggtgcgcttaatctatttgctggtggtgctcgcactatagaggccgtggctacactgttccatttcaacagcattcttcgagacttgaccatcttgaagtctaaacatccgaacgtcttgagccagttcttgaacaggttgtctcctggcaactcgaattttgtctctaagaactcttgcaggtcggtgagtgtgatgtccaagaacagtgcagatcccagttgttgccacaagctcaacatcaaatccttgaggccgcccatggctgcgttgtcaaggtccccaaatgatcgagagtagtagtctatcattggctgcatctttccattgtccatgaggttgttaaggtagacgaatagtgccgtgtgcatggcgacctcgatcctctctctgtactttggtgctattccggttctactataccaagcgttctgcttcagaaatttcacgtatgccagtatgtcttgccatgtcgtgccttccctagcggctctcaatgaaagagctctcataagtgacacgctgactttaactctcttcatctttatgatcagtccagatctgatggcacccacagggtcagcttcaactaatggtagttctatcatcaccaggtctctgttggacacggctggtgggctggtgtagaactccgcgctgtgatgttccagcttaattaactccagtacaccgtgctgtagtacattgttgatggtcgcccatctgtatgactcctcacgtactctaaatggtttgccagatatcatgcagtcgtaggtctctgcgtcaggtgctatttcataagggtggccctcatatctaatggatagtttaccgttagttttgctgatgaacacggactcatcatcctctgaagacaagttgggcaccagcacttgcacggtggcctgtgtgttggtgtacgtgttaaatgatttgattatatccaccaacgctttgttggttagtgtgcatgctctgacgcctaacagcactctttcaggttcgcagttcactggttttccggatctgctgtaccatggtccgtccagttctaattgtttggctgcgtctgatctcaagctgtccaggtattcgaagtgttctgggtctgtttctgcgtcgggctttggtctactaaacatccgcttgacagtctctaccattttgtctgcgaatggcaagctttccatgtattgcagcatgcccacatcatctccgggtagtggtacgctgcagacgttccattgatgcactaacatggaggcgcaggggttgttggacatcagcagcactttggcgtgatcctgtgcactcaggcagctcaccatcacttgctcaactaagccacagtagctgtgttccagcatcataaagttatgttccacaatttgtttggtgcctaaggttgacagttgtggtccgaatttctttcgctgagttgctgatatttttatcatactagcggggttttccattgaacctacggccagggcagaagttcgggaggctactatgctgtgcagaccagtcttgttttccttgtgccattccagtgagaagtttaactttcctatggcttcttctatgctgccaattggcccgtctatagagcccattgacaaactcaacctctcggccagccagaaaggccatctggccagctcttccttccacaccattctcaataacactccttgtgtgacaacacgcccacattcctctggtagtttgcatgttggactgtctcccaacaaagaacataagatggcccctctgttggtgacaatcacggcgtagtagtccgttccatagctgcatgctagtggtgcggacgacaagctcatgtggccccagtactttccgaaattctttctcactgtccaaccaatggcttccagactgttgcgtttcacttcgtagttggtattgttcttcttccaatgatggtgacaagggataaactgcatgccgaccagagacttaaccttatcggtcaagaaccctggcaattgagatatacgctctaacaatatacctagtgatgcagcaccgttaaactttttgcttattgggaagctaggcacgttctccaggttcgaggccactccggccaatgagttccactcagacactcccatgtagcacagtgcttctgccaccaaagctggtttggagccgttaaaatccatctttcttgtggcgaatttgttgtacaatccatgcaatagcaaaacattggttttaccgtcggtttgatctagttctcttactaatattcccatacagtatgagcagcctgaaactgctttaattaccactatgccggatggtagtgcaacgcgccaacctactttgtacccttgatacaatgacagcgtgtgattgattacacgcatttggtcatcattcctgatcgatctgggcaagtcaactgttttcttgtccccccagttgccgtcgcttccggggttgttgcgtttactacagttttcgcatgcaccctctttaacttcaaaacctagttgttccaagtttttggcgaagtctgcgggcaacatgttccatttgtcattgatcgtcactttgcggtcttgcccaaccgttaagtcgcccaaaaatccaagatctaacttattgtcagtgaccttgcaatctttccctgtctttgctttaataactctctgtaatgtagttagcaattctttagggtctgtggttgttggcacggttatctcagtgtctccacactcgcaattttcaagctctctttcggttcctaacattttcgcccaaagagatctgttgtctggcttacccatctcttccgttagagtgcacacgcctgatccatctctatctcctgtaggtgcgttgcggcgtagtagtgagtcagcaagagcccacaaactgtatgactgcccctgctctctcaccatgatgccagagccactttctgttccttcaatcatgacgttgagtggggttccgggcgagtaacagcccacggagatccagatcaatttcttgtttgcgcgggttgcggctgaccaagtgtattcgaattccaagtgtttgcctcgtgctgcattagacatagaccactgcagtactgctactacgcttctttcagcaccttggaatccatgtgccctcacaagttccaaaccgtctcgactctcttcttcaagctctttttggagggcatacgtgcacttgcgggtgaaagttatcacggtcgaggggttttcttcagctattaagcttcttagagcatcgtaatccatttctggccagtattccattctataattggtggttttgccggtaccgggtgaaaggttggttcgcgtctttccgagtgcgttcgcgagtggagtgcctatcctgtaacaggttgtggacctgttcacgttgttgcacagcctcatgatagattgttgaactctaacgccccaagtgtcagaggtgtctatcacccccacctgatccagatttccatataggatcaatcgtttgacgctaggggtgactacacaggccatttgttgccaagttagcatgttggcttcatcaacgaataattcctcgctgctcactttgtcccgcatggcgcgctcccaggaggttactcgtttagctttacatttttgtttcaacacagtctgtgcggtgcgagtcatggccatagctgtgctattcctggtggctctgttgccaatggcggtggacttgccacctcctgccacaaaatcgtagcattcagctgtttctagtagttttttcaaatgccctgcattggaagtcaggatgccgtgcaccaagtaagttagacttgctattgaagtcttggacaccgacattccaacttgtagtttcgacttttcagcatggatcctcagtcccaccatgtcgtcactgacgcttataacgggtgcagctatgattgtgccttcgaaattgatggacacgacgtctagcagcttgagcttccactcaccgtttgtctttgttacatacgcattgggtcctgttctaaccaacagtctgttttcggaccaactgaaattgctgtttgacttgccgtggggtcggcttaagtcggctgagaactgtagcatggttttaattgtgttcttcaaccagtcgaccatcacggcgttgtgatcttctggcattcctggtgggatgtcgaatggcgtgtcaaagtggttgttaagcattgacactgggttttccggctcccacaattccatacaatttaatgcccagtcaggcactacggtgcttatgggatttttgtcctcagggttgccgctcacaaaggtggtgatgccctctttgcgcactaccattggcatcaattctgcggacatgcatgcgtctatgggtccgtacaactcattttctgttaccagccttaccttgaaatccacgttctgccagtctacctgttgcacgttggctccgtatttgtgccacttggcagctctctcttgccatgaggtgctgtcgttaaagttagggtgcacgtttgctggtccgatctgttccacgttcccgacgtaccagtggccctcaattccctcgcaagttaggctgtggatgacgacgccaaatgaatcacctggcacgctcttggtgatcattgaggttcctggcagcacaatgataacgttcaggttgcattgagccgcagccctactcaagtccagagcatcccaatcacccgttttgcctgacgtctccagcatcatgtcataggatagcttcatgctgccagtggctgcgcgcaaagctgccaatccacattcaccatatacatgactcgtgtcagagaagttggtgatgcgtagcctgtcagaattgatagtccatttgcctatggggatgaacttcaactgagagttgtgacgcatgtgaattgtggtgtgatgggatgtggacggcttgcagtacttcttccatgcttcaggaccctcccagaccaagaatgcatactctttgctggtgctgcgggtcaagcgactgattgccatcattatgtccttttcttcatcgttagatatgtcagattccgaatcgtctgcgccggtcaatttagcttcctgcacagtgataactttgagtttgtccatcaccttgacagtcggtttctttggagctaccctttgtttgacagcatagctgtaagttttaactatcttcggcatgcgcttggtgtgggagggccttggcttgggcttgacttctcctccgctgagttctttggctaactccaccactctttcggctgtgggctctgttaaaggtgtgtcgacgttgaagcaatggacgcagtcacgatcgtctgctccacagtgctttattctgcagcagttgcacatcaccatcttgtggatgtggtcaacgtcgcattcactgtctgacagtcgtttgtgatcgcattgttgcggttcttcttgcagttctgtgcagcacacgcaccatccagtctcgttggcgtaaggcatcaaacagtgtccgcaaaagaactctgtgatttcgtgccgacaactttcgctgtgatggtcacaggtcgtggttgggctccacacactgggggtggaagtggcagatcccgtcaccacggagactgtttcccacacctgcctgttagctatggattgcaacaggtcccaatccactgttttgcctgctgattttacttgaagcaagttgcgttgagacagcagtttttgaattgatttccctgcctcacctaacaagctcatggatccggctagcacggcatgttggaaccctaatttcagtcctgcaaacatctggctccagggttttcctggttgcatgaatccggtggtgcccagcattctgccatacaatcgctcactcaacagcgtaactgcataagcgtgcaatttgatttgttctatggtcaagtgactgttgtggatcactttgtccctcaaattgtaccgttggtatgcaattgatatgccgtattccactagtgcctgccagctagtcttgttgtccatattgcgaataaacattggttcgaatatagttgggtcgacctgcagttccacaatctctatggccatggcccctgtgaagttgatcaagcccatgggcttgacaagtggcaaattcacactcacctttctgttgctgtaggatgggcgttcttgagttgctcttaatgctctttggctccttatcaatgtagcctgcctcatggtccacatgcccaacacttgcacggttctgatgtggtaagtgccaacgtctaacaccacaaagtcagcccgaacgtattcctcaacgttcttagtgttgtaactgacaacttccccggtgttgtttaagcacattttggttgtaccattgcagttccagtaatagcattggtcttcacccattgtgtcttcttctttgcgaatatctaccaacgtcaaattggtcaggtaataaaactgtttacgcttggtgctgcgcatgagttggcacaagtcgaacaagctgatgaattggcagccatcgtcaactattgcaatgcctccctcttgtagttgcataatgccagtgtcgttaccagtgtttaggccttgatttaagacacgtcctatttgttcgtgctcttcgaatttctggaacttgccgtcaacataaaacagcgctttctttccttgtagcaaggtgctcagagcttctagcagcacacgtttacaagtggcgtaatgcggggccgaggggattaagcttgcatcttgtttcaattgagcgcccgggtaggcagtgactatctctagtttctcggcattggtcagattaccgtaaacgttttgcagaaacagtctgtaattaccgaagaataatctgactttcttcgtatcatgttgtatcatttgttgtctagcagtcggtgtcaactctgctccgtctaggtaccccatcactcccatttcttcgattagtgtgcccattcttttaatcgtgtagttttcgttgtctgaacaatgttccaaagttatttcctctggctcatagtcgtattctaggtcgctgtcgcaacctccgcagtgcatcatgtcatacacccttggcccctcactccacgtcgtgtaagaaacggtttttgtaccaggccagtggatattttgcatggaacaaaacttcctgatgtcgtccccaggtatgtctttttgacctagtgccattgcgttagctagtatggagttttgttttggcgtagttgtcatggggaacaaccgtggcatcacgatgttgtgattgccgcactgcctacaggtggtatgcctacaagctgctttgatctcactctcatattttgccactaagtccttggcttctttgctagctgtctctttcagctggtaggtcagcaatgccgacggttctagtttcaagttaccgtgtttatccaaagtggaagttgtgctggggtcgatgctggtcggcttccactctctaatgctgtccaggctagagccgaatgccgcacaaatcaacttgtgcatgtttttctccccatcaaggtaggttgcatccggcttgtctggtcgtagggatggttttatgagcagctgattggctggcaacttggcccagttgctgagatctggttttgctgttgttaacatcttgttccacactttcttggtcatggtaaaacctagtagtgggtttttgagtatggattgcaagtcgcgataatctttaagggttggatttttgagatctatccttacatcattgcatacttggccccattctcttttgtctgtggcttgcaaaggtttgacggcggtcacgaattgtgtgccctcttgttttgccagccttcttctcaaagaacggtttagcaatggagcatcagtcatgcgcctgcatggctgtggcttcatttttgtagctacctcgtctttgagttttcttccgcgttttctgtgtggcattctggtgttgaatggcttcctggcgcgggccaggaag

SEQ ID NO: 839 - DNA, 17635 bp, Vicia faba alphaendornavirus
  source 1..17635: mol_type = other DNA
agccaaataagttggcctagacaaactagaaagcaaagcaaatgaaaaaattaacagcaacaactaacaaaaaggaatcgccgccggctccagtcggcgacccttttaaaaaaacaaaagactctgtatcattcacgggcgtgaagacagagttttatggagcgaaaacgccctgcagcactggcatttatcacacaacttgttgtgtgccgtgcgaagacattgatatacacgaggtagtcaaggccgcgtcccgagatgatgcacgccactaccaagaacacccaaactctccaagcaaccccgagctggtcaattcttttaacaaaggtttgacgctcgagagctatacagcgagacagaagggcgagcgtaatctgcaccgatttaacagaaatattaacgctctagttaaaaacttacgcacgcagaagaaacaaactgagagaagcagcatatactgcagccccccaagaaaacatctgggaaggcggccacacatccgaggaggctcactacatcccatcccaattttggggcagagcgaccaggcacttggcaacaccacaggtgtttggagccctaaccgtgcgcccagcgaagtgacccccagccaacggcccggcattacaaacaccacgcaggccaagagcagtgacggggggcaaccacccaacaaaagtctcccattccatttcaacacccacacacacacaaacaaaccaatgggcatgcaccacaggaaaagacaacatgctagcgtgagggcgcacaatgctaccaagtctgccagagtttccccaccaacaccaccagagcaatgcaaagcaaaacaaactcaggttggcaactcccccaacgaggctgaagtattcaaggcgatgatgaacaattaccggcggtcattggttcctaaagaaaaacccaccatcataaagcctactattccatacaaagtggcgtcaagttccattgacccaatagacatgcccaggaacagaccattgcagtccgtcggggcactagactgctatgtaacgggtggcatccaaaccaaagatgtgactggcagtggcacctccaaccttgaccggtttaatgccatgttacgcacactgaataaatcaggcatgcacacgagcaggtccacatctatgacctcagagtttgggggcagaacaatcgggttaaaaaaacctttagattctatcatccacaacgtaaatttgcgattttgtcacacccaagtacgaacatctgaggtgttggccagtgccagcaagaaatatgagtcaaacaagaataaacaaggcaacaccgctgtcacaacaccagcaggaaaggtgtgcgaacacagcaggtttgacgtgaaaggggaggtggaattcacctgcggatggtgtaagccctgcaagcagttgataaaagacgctcttgaagttacacacaaacaagggacatggagaagaaggccattagccattgccgcaacgaaaaagaatttaaaggagtgtggcagcacgaacatgtttagcaaaaacaacctgaacaattttttaaagtatagcaagcccctccacaagctaatgaaaaagaaaacactcacagcgatgtgctttgccagcgatccaagaaataagggggcaatcttttccacaacggatgccggcaacaacagggaatccagcatgattggtagagatttagggatgacactacgactcaacactctaagcaacaatgctatacagtacatattacacgcttacacgaataaaacgctgacccactacgtttccgaagctgactaccagtccttcttgaaatctacacggaagaaaacgtctgacactcccgccatagagattgccccatgcaagaggtacacacatttataccctgaaggatcagaaaaaaatatgggaggcacactgctatacaaactagtgctccaagtgatagcgaaacgtgcgcaaactccacaggcaaatatactacgacgcgacacatcgttaaaaggtatacgcgttggaaacagggtggtcgtgccgttgcctagcgtggaacacagaattcaagacggttatgacagaggcgacttcggtttgtgcatgaccggccatatggctaccagagaaactcttctaccaagtgaagcaccttacatgcacgaaatgtttggacataagtgtcataggtgcaaaggaatcaccgtcctcacgaaaggccacacaggagataagtacgatgctagcaaggcaacatccagaggcagaatcttgaacgccataaagtatggggttggcacagacaaagacctagcggatgtttacataaacacacagctgataaactcatacagtgaatgcgggctaaccactgaagcacaccagtggaacacacagtgcgggttctgtggacaccaggtcttagatgacccgccagcaatggtagaggaaatttgcgagctggtgacggcaaacactgacaaccccacgcccatgggattactacatcacctggaaaaaatgggttacctcgacggcagcacattagacgcaaccggcgaggcacgagtagtcaattacgattaccaaactctgaagcatcagctttccagggcgaggcaagacgtggttgttatccccagcagaataaccagggacagaagagaggctcttcaacaatgcgcagtagagctggaaattgggacagacgtagtaccccaactcaacgacagcacactatacgcgaccacaaaagtactgttagcaatccccttcgtgactaacgattaccaatcaaccttcgcgtacggctcaacagacttaggaataaccggtgtgaccccgataaacatgtgccacttaacaccggacctttacatggccacgaggccgtcaataacacaagacgccccagtcatgaaggagtcgaacacccttttaatcgacatgaacatactaagaatggacccaatgtggctcataacagagtgcttgcggagaaagattactactgcttactatgtcacccccatgctagagctggatcaaaacccagaccaaacaatattggatggcgaggttcaatttaggaaagttgaaaaccagatctacgtcatcacagcctggagcgaccgacccatcagagtcacaacggaaaactacatgaactggacgaaagtggacgctttcgtcataggcgaaaatacgtatccgatagacacggttagagaagccaatggcatatccttgcgcaggatagatctggcagccagttccacctttgagatgtccgaagtcgtagagaccgtcggtgacagcatagagattagcgtgcccacggtgtactactacgggaaaccagggaaaagaaagctgtccatgtctggggagaagaaagtgaagttacacagagagctgtacagaagaatgatgattcgtaacgtcagtggaacgaacagtttcaaagaattagtagactacggcataggaatatcgaacatgaagtataacatcaacgacatggttgtgtctttcagtgacataagtgatgacacaatcagacataccgccgctttcgtatactcaaaaatgataacgagagcgaacagcatgcagctgaccgagagagtgctagaatcggtgaacacagcgcgcggctttctggcttcactgttaataagccaggcggaaacaatgttaaaaatcacaggcttggatgaaactatgctgaccacagtaaacaggtggatgtctaaagggtcagagatggtgcggctgaagggtatgctgatgaacattaactcgttagatatagacaatttgatgtgttattcacgcgagccagtaatccgccacctcagagcgcaagaaacacttgaactagagcccacagggacatgcccacataagacaccagactttgtgatcaaggaatgttctatgtgcgaatgctgtggggtgaacccagcaataggtgcaatcggtttttgctccagttgcctgccaactgacaaacaccaatgcgatcacccttgcaagcatgctcacgaatcagaggccggaaccagatgctcctgctgcctcctaccaatcgcaggggaagcgtgcccatgctgtggagtgaacaggcaaatagagtcggagatactgtttgagaactctgaagagtctgctgatgaagcagaagaacaaaaccgagtcaggaagaactcgaagccaagaagaccagatagagaaaagggcaacaggtcaaacaacagaaacaatgacagtcgtaggacagacgctaaccaccacagcaatgtcaattaccatcacggtcacaataagccgcaacgacaaggcgccacccaacaaccacccaaaaggagcgcagcattacaccctgagaatgatgacaatgacacccccgactcaaccccgacggtgatactaacagcggatcccaccaccaatccccccggcgaacgccaagcgcccggcggtgacaacatcccacatgagaatgacattcctgggcccagctcaaccacgacccagtccagccccccagatgataccaactacagtgggccggaacacaacaggaacatacagaaccatcgaatcagacttattgcgcaaacaaatgagttcttcggtgacttgtacgcttacggcaatgacatcgcagtaaagaaaaattctcataagctgatgcccccaaacgagcaaaggctaagaagttgtttccaatttatgaacatgggtgactctatatacgccacggagaacctagaggtaatcaaaacttacaacacgtcaggagagggggggtactgcggatacaatgcgctaaaaatattgtaccccaacttggacttgacgctagaggaaatgcaggaaatagttgggtcagagacccaattctcagactgggaaatcatgcgcgtggctcaggctaagcaactaaacttgatagtggtcactgaaaggtgcgcactagtaaacaagtccgtatgcagcaacgagtttggcgtcatctgccactgcagacatagaggcgtgatgctggagcattgggaggcagccttagcgatacaaaaggggttcgcggactaccaccccacttttactaacgctttaaccagggaagacctactcgattttgcaaaatcgtcaggattaaacaaaaacaaggtaagatcgttcgttttaggtgacccaaggttattaaaactgcaaacagagatgcatgagtcactaagcaaagtcgtagaagatgtcaaccctgcagggtttgttaagataactaagggatccacacattatgtgacaaatgaccgcaacaacctgggctacagcccgcagtacggtactttcacagctcagatcaccgaggacaaccaagaattggttgaacttctgctactagcatacagtgcacctgccagggtgattcacacagattggttttacgacaggcctgagagtgtgccagcagacgccacacaaggcattcatgattatggcaagcagctggtacgggacatcgcagaagtcaaccaagcatgcgcgggagatctcataaaaagcgaactaatccaaaacagggtagactgcaagtatgagtacatcaacaatcacctgtttaaggtccaaaaaacagggaagttaaaaccaggggatctgataagcggcaaactggtagggatacaatccaccagctatgtggacagccatgtaattggttatgtcatcagaactaaccagttgtggtgtacatgcgtgacagaaaagtgtgccaaggcaacaaaaataaaagtggatctgtacaggaaaaacacaggaagcggacttagagccctgttcggcatattcaggtgggacttcaggcgggacatcaagactctacttgaaaaggccactgcagttgacgcaatcgcagggtggggcaagagcacagaaatagtgaaacttgtcaaccaggactgcaccgtcgttgcgcaaaccagcgctgcagtaagcaacatactggagaaactcgaacaagggggcaagaaaaacatgtgtaaagtgatgtctatagaaaagtgcatgacacagcaagtgaacacaccaacattagtgttggacgaagcgtcgatgatcacatgggaaacgctgagcttaatcacaggcccacaagtggagaatgtgtatctctacggaaacaccttacagatatgcgtgctagatatgtatcggacaggtgggagccgggcgacaaaaagcattttggagcaagctggcataataagacgtcattacaccacacacagaattggtaacccactagcaagggaattgtccctagtgacgaaagaactcacgacaaatgctaagcacgagaccaatttttgcacgaaaagctgggacgcagttcgatgggcagaactaacaagcattgctggctccctagaagagccagtaatattgtgtttttacaacaacgctgtgagagcagtgatgaattacctcaaggtggggtgcagagtagacaccattcataaattccaaggactggaggcggacaacgtgatagtactgcagtggtgcccaaccggccaaacccccggcaggatcactctcgacaaacaccagtgcttgtcagctgcaaccagagcaaaaaaaaacttggtgtggatatccgtgaacgagtacagcaacaacgtgccgttacacaaaagaatgggcgctacaatcggtggctctaaacacacccaaccagacactgagaacaatttagcggacaaaacactgcaggtggtgagtcatttattgagcaaagtcatgatttacagcaaggacaaaacaatagaaagattagagtgcagccgattacaatctcaggaggaaggcaaccttgtcatgttgaaaaatacactaacccacctggatgtcgactacgtctcaggaaacgaccaacactcgttgagaaggcaaggctctggtaaactaaacgaaaaattcaaaagcatgttgagcctattttcaaaagagccagcaccagaccacgtctcaagcagtacactaggaaagttagctgagatagtcgaccaggcaaacgcaaacaaggacagaataaatagtcagataatgaacatatacacagttcagaagaacctagccatcagcaacggcggctccatagcagcagcagtcacaccggttttaacagccatgcttgcgcaaaaacctggcatcacaaaagccgagtgctcatttgacgaacccacggaaactctcacagcgaacatactcatgttgggggttaacgtgttaaagatacaactcgacttcaggaacgataaagtgattctgggatcaggaggcttgcgcagttttgtagctgactcttcggaaatcaagcaactgtacaaccaaaaattcaactgctgtgggcattacgtactgaagtacaggaactttgatacggaaatatctgtgaagaagaagatgaacttcgagcgagtgctgtggattgtaaactattttggtgtgtgcctggaaagtgggagcctacacatttcagttacaatagagaatgagctatataagatgcaatcctacgggggatgcagcctgtgtggtggaatggtgatcttccaccacaacaaaccaataatagtcggcgacccctcctacaacacgggcaacagccgcacagtgcggttcaacagtaaacaatctgataagtgcgggcccatactagcatacttgaggttatggaatgttgatagcggaactggggttaagctaccgtatgacccaccggtgggccgaggggactttgatatgtttgagggcgacaacgtaatggcggcgctggtaattgaaagggttctgaaggggccttggatgatggcagcaaagctgaagaacatgttgactaacaccaatcaagacctgtgcaacttttatgacaacaattcccctgagctttttgattcactcaaggcgagactcgagtctaacgggttcaccaatttcaatacgaacttggtgaacgaatttgttggcggaacgagactggagtttaacgggttcaccaatttcaataccgaattggtgaacgtgaacagcatggacttaaggtgtaggcccatattgtgcacactcgataaaagatatttggcagcactaatggaccaagacaacctgatttgggtgactcaaatcagtggcaagcccatacacacaccagctggggttacaagggtaagcaacaaggcatttaagacgatggcggtcaggcaaatgctaaacagactagagtttaagctaactaacactcagttgagccgggacaagcctatgggggcgccgaacccgagggggccgcttttaaaatttatggcccagcacgaagctgacaatgacaaagtcgcagtagcagcacgcaagtacaagggacaaactcaagctgcaatgatgaaactaaagagcagaaggatgtatctaacagcttggatggttaatgggaacagtgaatacgctagcaacataatgcagcagcataacgtgatcaccacttccaccaattatccggaaaacaacatgttaggcttggtggacctgtacgtcgcgcaagctatacacaacacggggtatacgtcagccctctacatcaccaacaacgcctgcacagcagttttgtgcgggcactgggattggttttcatgcccaccagatgacggatggagcaccagcaggtttttgtccagcacacacgacaccatcaccaacctggccgacataaagtccatcctagactcggaaatagccaaactagacaaacaagaggaattgtcagaagaagagacagccgtgttaaaggaaaaaaaagagcggtccgaaaggatccacaaccagatcttgaggacggaggactcctggtacagcgagagttaccaaaacgtgaaaagaggtacagtgatcgtcagcgtaaactcgtgtggcataagcaccgaaagcattgaaaagataatggaaaccactggggcaatggaattcttgatgtgcgtgccgaccctgacacccagcgataacacgacggcccacagggtcggagtgactggcagcaataacgtaaaaattacatacccaggtgcgagaaacaccttaacccccaacccagaaattgtttactgcatgaaaagtgggaaaagagccacagtgcaatcgcagaccaaaaaggattttgacatgataagtttgcacacaacaaccgtggctatgatagcttccgtgcaaattctaaaagtcacaattacacgctttaatgagcacgcaatgcccaaagcactgcccatccccttcagcccattctcacatcaaagcgacattgaaaaagtttgggtgcagtacccgaggttcacatgtaactttggtgacggatcagaaaacagtctaatcattacaaaacgcagaaaattagtcagcaaagctctgctggcgaaaatgaatgaaagggctttaagacacgattccaacctgaaagatttgcaggcatatggacgctcgtacttaatgacacaagtgtacacggaaagatatgtgaacgtgatcaacaaaaatgggttggatgaactagaagcagtttgcattgcagctctaacaatgaaacacagaatcaacgaacaactagagcatacgatgggactaatggagacattccgatacgtggacacagactcgatcacagacatcgtggtgaaaagttgtaagaaaaacctactggagaaagtgatgtcaatagcgaacaccatgcaagagaagttggggatcccagcctcgtttacaggcttgctagacgaaatagccaatacgcaaagggttgtgtttatagatgagcgtacgaatcagtcaagagtatggtcttgggacagcaacatcaaacatatgtctgatgaagaggggagcatcaaaaagtggtgggcctccacagcagacaacctagactggatgaacatcggcatgattcaggagtataggaaggttttgtgtcgaaaggaggacataccaaaaaaaaccaaagcgtgccccggctttaagcaagtagtggactgcgccaaagccgtggctcaacaaaaagaagcacggaaaacagacccaggcgcgagagtgctcgtactagaggagccaatccctttgataggcaacgtggacatcacccgggccgccacgcaaggtacgatggtaacaaagaatgagaatgttattaggtcagaaatcacttttagagcaaggcagagcatcagacgtgcccaaaccagcagactcagaagctatttagacaactggaatgagatggtgaaagcttacagcgccctagaggctggtgacctgaaagtcatggtgcgcgaactaatgtcaagaatagctataattaagtcaacatccaccccgacatggcacttaaaagaggacttagaggcaatgttagacgtgccaaacctgacaagagcagagcacctagaaataacaaagctgataggggacgcagtagttagcagatgggagcagagtaaagctgagaaaaaacaaaatgagtacgacttcattaagtcggatctaggcttgagcaccctgaacgaccatgatctcaacatagtcttgagtctactagcagtggaccgccctagcaaagttaaaaaagatcttttgactaacacattgggctcccaaatgtcggtaaatgaagcagtgatgctaagacgaaaaatccggcaacaatggtgcgaatctgcaagcaactgcgggcagcttgttgaccatgaccatcacgccaacagtgtgagtaccacagaacaaaaccaaggcaagttaaacattttatctttattacatgaagaagcaggtatctgtgacatcaatttgtccgatgctagcccgctaaaaatcagggcctcaagctacctacctgaagccatcaccacgtgcgtgcagacaccaggaatgtatgaactaacctcacctaaagtagagatcatatacgaagctatggacaacgatgagtgtgtgtggaggtgcatagagaagtatgttacgcagaacattgagccccactttaggataactaatgggctcagagccattatgcagcaaagtaagatgctgacggagagccaagcaataatagtctgtcaattactaggtctaaactgctgtctcatccaaaatggagaaacaggtacagtgtataactttgcaccgaacaaaccatttgtccaacttatgagactgtcacaagacgcttcatacgatcattgcgttttgataaacctactgggagcggacggggtaaagaggctatcaccggagaacatagctaaagaaaatatggagcaactggaacacgtgtgtccagttgacaacaagcccatagttgcggtgggagagaacccgtacgcatgtgtgagtcacgtgcacattgacaacgaagacctggctaggctcaccagttgctcacagccatatgaaaagataccagtgctagatgggaggtttgaaatgctccccgtgaacaacgtcatggccagaatgacaaggaagaccagcagcgcaacactactaaaaaaagtgaccccaatcaccaccggggctggcagtttggccctaacacgcaactactacaaagccactcccatggtgaccacgaaaccaggagacgtgctggtggtcttgagagaccactgtgagaaaaaggtaatgtgcacccataccacaattgtagacaccccaggaggagtggaacagattttagaaattaccgacgacataggagatggcgcagtgtgcttagaccttggcctgcactgcctcactccggcagaccgcacccccaggcgtgacagaccagtgaacacatcaaacgaagtgtggtccctaaatattgaaacccagcgttacctcgaagctacgaaggggttgaggtctcacgtgggacaaggcgaaggcaagctgcacatataccactttgacaacagagagcaccacatgtacgatgagcatgactacattgatgcaatgctcgacgaaaacatagtaatagagctggatccaacagttcaggtaccgaccggtgtcaacatagtgaacttaatctgtattagacgcatgttcaggttagccatgttgtacggcatcccaacctgggtcgcatattgtgacgacaatcccagcgcagcgcaattagcttggtttttgaaatactataaaatggggcataaagtgtttaacaacaacgtgaccacagaggatctcaccaacacgagagcaatggaaatcatcaatgcactgttcagcacgtatcagcacacgacaaccaaccacaccacccgcgtacatctacgcaataaagcggagacgattttgtcaaaagagaaagtcagcgaggaactatttaacacaaccatcgatattagcgtattcacagcggtgctaatggggttagaaaacgaggtgttaaagtccaaccaaggcacatgtgtgttcgaccttattccagaaacaccagaacctccacaactgcaagacgacatgttggaatccatgggcatattggttgacatcaagcagtgcgccgtctatcacgtacccaccgggacgaaagtcgcgctaagagttgttgagtcgctatctcatgaaatagcatgttcaaccaaagtcaaaggagttgaccccaaagatgatgaaatgcgagcgggtgcatcaaacctcacccaaagcgtgcccgcaagcgacaaagcagatcccggatcctcgcaactgagtagctgcgaggagaacatgagccagaccggcacccagcccgtcgcatgtgtccacatcgagccatgtgatcatgctgccaatgcgagcaacgatgacgtgctaaaggagatcacacagccagagcaaaacaaccacgacataatatccaagatcttggcaacagcacagaaggctaaaagtaaccccgaagacaaatcttggaagtccggagccacaagtgccgacttacaagccatccaaagcctgtgtgatagccccgatggtatgggctcacaagtcgcagatcaactagccaagaaattggaagtaatgaatttttcagacgaggtgacgttatcggggatacacaggcaaagaaactatgtgaactcgcaaggcaaatatttgcaaagagtagacataagcgaaagatgggcaatcacgtacaagggcataggtgagcacggcagcgacgtaccaaccaacaatcccggctggtggtggctagcattcccacccatgcgcaagctaggcgtgtacaaggagaaacacgaaatcaaagtgaccatgaattatgcaggcaactgcgcttacagactgaacaggattaagtttagagaaccaaaatcagtgttcacacacaacgtaaagccagaagtgatgttagacatactcacgtatacaagcgccaacaacaaacaataccccacaaacctgcagcggttggctgacaagtacttgcacggcagggtatcatggcacgtggtctacggcgagggctataacagagacttcttacaaacttgcgtggagttaaccaagcgcatggaaagggtaatcgtggtcacagacgccccggatgtgtacaaccaactagacgcagacattcaagtaagggaaaaaataataaccatcaaagtcaccagtcaacccgagccgtacagagcgatatggtggcgattcatgatactattcgcaaacatcgacccagagtgcgagttgtacatactaaacgggcgagagatggcaccaaacgacatggagctagtcgaccgcgtgatggaggagagtttcgaggacttcgacatcgtcagtgcattacattgccaggctttcaatgtctgttgtggttatgctaagtacaaccatgcaaaattcacggactacaacacgttcaatgacatttatgaagcttatggcaacagttacggaggtgacgaaatatacatgtcacgatacaaagtcaaaatgatgtggttatattacatcctccctggtggggcgtggtatggcatagaaggaaaatggttgaactacgcattggacaccacgatatgtcttgagttgaaagaaggggaaagaaccagaatagatcacgtgaaagggctattctgcagcgcaaatttcttccatgtcgcgccagacaccaaaggtatctacgattattcaacagtggactggtctgtcgatgggataccttggcagtacgccatgcaaataataaatgggcattcagtcacagagaacccagtgcgccactcaacgggggagtcaactggcaacccacgcaacatcagcaacgacggggagaagccgtggcaactgaacccaaacaactggcttctagacccagggctaaagaagagtgaaaaaatgaaaatacagaaattcctagatagcgacagcagcgttaagtgcataaaggaaagccagagcttgcccatccagctggggcccctaaaaccaatagtggtatttgccaatcaagcgtgcgaagcaatcggcgttagtatgaacaacactgggaccttgtacgtggaagttaacatagcccaacaaaaactcgccgcgcgcaacgagccattgcaacaccaaactttaattctgaaaagccacctcactctaatgagcacaactggccgacacgcaagctggaagccagagtacacacacctaatgaaagcggatctgcaaaactgccaagtgtatgttgagggtagcgcaacatcactattacaatggaaaagagaggaaacccagcacgcccaagtgtacacaacagaggaaagagacgtgtttgtgaggataccccaagcgctggatcatagtgttggcactctgaagactctagaagtaaaagtcactggtaatgaattgggcttaagctcgtccagcggagttttagccagagtgcttaagcttaacgacagactggcctggaatcattggttagagacccaacacttgcaaaaattgttggagtttgatcgtagaataatctcctcacatgaagaaagctcagggatgacctttaaaccacggataggtcagacactgtatctagcggacgtgctaacggcagctgggattgaatgtgtcaatcacataacgacaacgagcagagaatggaaggaagcgttgaaaaatccactgacaaaagttggtatcatgccattgaccaatagcgtgctagtgagcgggaagcttgggtgcgtgcaacccacaattccgagatgttatgctatgctgtgtcaaggggtaaagctaaaaatttttaagccggaaactcgcggtggcgggactcctagcaatgtgtcagcgaacgtggggccaagcaaccccacaacagcgggtccaggggacacgccaccgctaatcaccagctggaataaatgggtggaaagcggagcgtcaaaccaatcaccattcggggtgtcagccaaagcttaccaggacaagttaagagagaaaaaaatagaaactccacaggataggctaagggtgttagaaaccatgctatttgacgacgcgtacgctttaatgtcacatggactgacagacctgaggaagttgaacgacgggggtaactggcattgcgccacggacgcaactatgaagtcggatttcgaaataatcgaaccggtaggtggagacctgctgccaagcctcaacaccagcgcgctgcgacacaatgaaaccaatgccagagtgatagacctatgggatgacactgatttacgggactggttgacgctatatgcaccaaaaaatcctatgaaactaacgtccagagtttccccagggcaaggaaagattaacttgaaaacgttattgacgaaccgcccctgccagacgcggccagtccccacacaggtgatgggtatgggcgaaaacgctgtgacgggcaggttaggcagcgtgttaccattaaggcgagagccaatgaacgtcactcacgaactacataaattcagaactgcctattaccgtgacggttgggagcgggtccttaaggatttcaaagcgaacacaatcactataagcgatgctgatgtgaagacctggttaagccgccgcagcgactggaaagcgctggcaaccagcacaataaagatgctcgaaaccgggttgccaagcaaccccatgaacgccgttaatgtgcacgtaaaaacggaatccttactgaaagccaacccaatcatgtattggaggcaaacacaaggcagaattatcgtgtggcaaccaaaagaactgtgcgccctaatgtcaccagcctttatagccatcaagcgaaggctgaaagaggtgctccgagatgagatcgtctacaccgacggtctgacaccagacatgctgtcggctcgcgctagaaccatccagtacgactacgtgtttgaagatgaccttgtaatacaagacaggcagacggatcaagaactaattgatttagaattccaagtgatgttggatttagggctcgacattaatttagcaaacttatggagactagttcacaacaagtggagattcaaaggtcaacacagctggggccaactagacgctatgaggctcacaggtcaagctacgacagctcttggaaacgcaataaccaacctgtgtgtgcacagcagctttgttattgaacacaggcaggcgataaaactgatgtttgtgctaggcgatgacaacattacattcatgtcagcggagccaaacctcacaaagtacaaaagattgatgagcgaaagatacaacatgcgaagcaagccccaggttagcaggaacgtcggcacattttgcagcttactgtgctaccgaaacagcttcggtcattgtgaggtagggccagactttgtacggttaaggcacagattcgaagtcacaggtgggggcaaccactatgagctcccagtggtagccgtgaaaatgccacataatgtgcgcatcgggaaaaccttcttcaatgggcgctacctacatgtgatggaaaacgaggaagccgagatggaaccagtagaatggctgcgcaaccatgcgaacagaagctacatcttagtcttgaaaaccaacagcgcagagtggtcaaggttggacggagtgcaggtgcacgatctatctaagattgacacttccggcaacctagccgaggcactagagggcattggagcttcaatgggcatgccaaaccccatgatggcagccggaatgtcctacctacacatgctaggcaaaagtgaggaagcagacaaaattaacaccgagaaagagtttggcttagaattaagaaaatggtacgacgtggcaagctgcaagaatgccacgtgcatcaaatataacatgtcacccatggaactggaagacaatataggagagctactaaaaatgatcagaaaaccaatggcatatcacaaaaggttcttaaccacagcagcctacagcgcgcaaaaaatcagatgacatggttcaatggataaaaagatagttagttgttgcccccaatcatgaattggaggcaaacacaaggcagaattatcgtgtggcaaccaaaagaactgtgagcccataccatcggg

SEQ ID NO: 840 - DNA, 14623 bp, Winged bean alphaendornavirus 1
  source 1..14623: mol_type = other DNA
gacatttttaaaaatgcctaaggtctgcagcttgtacaaagcagtacacagcaaactgcaaccaatgggcggttcacgcccacacacacttcgccaagggagaagccttactcccttgtcgaagcaagagaaacacaagactagctattcactgaggaagatctttagaaatagccaagttaaaataaaattaggcgaaaacaaacaaatcgtaccatgcaccatggcctgtagaaaagatgaacacagagaatttatccaatttgggcctgagtgcttggtacctgatttaaatcacatagatactgccacaatgcgaaatttcatcttattatatcaagaaggagtctgtcacatcgcggccaataagttgacgaacaagatggtagccagaaattcccatcttcaaaatgaagaaccgttctggggaccaaatatgagagattattattccaacaaattgccagatgacatttgtccatttaaagaagatgcaaataaagatctagtggcattagatttaatattgagaataataggacggcatggaggatcccttgctgagatgaatgcaaaatctgccaggttgaatcctgacatgacgccgcacatagaaaagttcaggaacaaatataaagtacgtgccatggaaatggccaaaccaaaagcggtctggttgtgtgcagcctgcaacacattgaattttgtatggttggaagacgaacagacaggtgtacatgggcaacactgcggcatatgctttcatgcacttgactgcacagaaatgctgccggatagtgtaaataacaatagtttgaaaatygatgacaccacccaaatcagagtgggagccattgaaactcaacaactgcaggtcactaacaatacagacggtgcaccagactactcagctgcaacgcttaatacactcatagaacaagacatgaagaacatgaggtcagcaatgtcacgccggatatataaagtggtatatgtcagtaacggtatgacagatgcacagctgaggtatttgcaaacaaacaatttgtctttcacaatcgttgtgagcaggaccacacccaatccacatgccatgttagcttctgagcgaagaatggcctggtacaattttgtagaacgtgcgggctctgatcaaactgtagttgacataggaacgcggcgcaatcgggatacagtgatgtgcccgaagtggaaaggaatagggccatgtttggactggagggatcaagaaagatacggtgtcaagccattgccgactaacgtgtgtgggcacacgatcaaaacatgtacttgcgacatcccagatgaaccattgatggtggctattgacagcttgtatgacatctcagcacaggatgttgtgcaatttatgatgaagaggaaagccaaacacttgctgtattgcttgagcacggcagccataaatttcacggaaatgtatggaagtctgtatttcaaccaaggtgagtggtataaggatggtagtgtattggtgacatcacttgcaggtgatgacagaccttacatgaacagctggtatttgaccaaaatgtggtcaacggcagacgtaatttgggtaggcgatgatgtactcactatcaaaacatacatgactattgggaatcacatattgcgaatagcaaccatcaatgaaacttgcgcagctgatattaaattcaatcaggtggttaaattaaaacacaatttcatagaattgactatcccattgctatcccaagatagctggctggcaccaaccagtatgccaattttagtagatcaacgggtcaacattgatgtaaacctgtaccatgcattgtattccagaaatctaactaataaattatcctttgaaaagatggtggagtttgggttggcatttgctcacatgaaatacaccactgcagcaggtacatatcataatagacatttaaccgccagtgatgtaagagtgcacgctatgttggcagtgatagccacaagaaggaaacatgggtggatcatgcaagcgttggaattaaatgaaccttcaaatcaaattgggatgaacattccagcagggctcatgcacagtaccttagaatactgcatatcagtgtttatgcagtggtgtaaatcgagactagcagagttccaaccaggtaatgagggatggaaaagcaaattaacggcagcaataaccgattggttagacaacgatttctggatcgagttggaggagatgaccaaggcgaaagacgacactaacctaaccgagtatagaaaccccattgatctaccatgcgcggatgaaaacacaacttacctatgcaaacaccacaaattgacttgcgatcacattgcccctctcatcaatgcttgccaatgctgtggaattgcagagtgtattgacgacgcaacattttgtccgtgttgcaaagcaacagaatgcaaacataggtgcaaccacccttgtttagggtcaaagtaccatggaaaaacggacgatgcagcagaaaattgcgaatgctgcggagtaaaaggagacgctatcagatgccaaaattgcataatgttcgtagaaaagcacaactctgcgcatcagccaccacttattgaaacccagagcgttgaaacccagagcaacctagggcgtaaggcgagagccagatccacccctgtcacagttccgccagctgtaactcagccagttgccaacagcattcctgagccagagatagtagcacatgaccaacccaatgcagcaattggcatgacgaacgtcaacaccgaaccagtgattaattttatagagcaatggcgacgaatgtacatcaacccacacgctacggagcaaggtgatgtcaatgatcagaacgatggagacacaaatgctaacgtaaataatgcaacccacgagcgtgacttggatgaccagcaacacatcgccactgacgaaggaatacctcgcataccattgcacaccacacctttgaccctagagtcacaagtaacaaatgacttatctcgaattgcttcaacggaatatgcggccattgtgcgttatggatggaacgaatgttttagagtgggtattttaagactacccgacttcaacccattgaacttggtaggggtgagtgagtttaggttttgtcctatgggaacaagtgtaatatcaaccgacttaattgagactatttcggtagctaaaacaaaaggtgatggtctctgtggatactatgctttaaagagaatactaggggatgaagtcaacatacatgatttacgacgactagccaaaaagaaggattggttcactaatgaggatttgacgaattatttgacgagtttaggtagaaatagtgtggtaataaccccaggtaacagcgtagtgcataaaattgatgccatgagtgacaatttcattgtaattcgaagcaccactgttgacaacgcaatggaactacattgggaaccagcaaatgttctccaaaaaggattgtgtgacactttcccgattttcgagggttgtggagatgccaagcaaatccaaaaattaagcatgaaatgggatataccatttgagtggatgacgtcaccattgctcaataggctgtacatggcaattgagctgattaaaagaaatatgatagagtgcaaatcaagcaaagtaaaattttgtgacttgaaattaatacagaaagacaacgcaaggtggttaaccaataatacagagcacatacatgagatccatagcggtttcttttgtttccaaattaaagaccaatttatggaaatggtagaaaaattgactagtatggtgacgctggaggcaagacacactttgtcaactgaagtgtatgacgtacacaaattccaagattccgtggcaaacgaggcaattaaggatttggtgacagaaacttgtgcagaactgcaaaaaattgtacatgaagcaaacaatttgtctcactttcaaaaggaatcttgggagaccaacctggttaaaactaaggtgctgtcagatggtagattgaaggtgctaatgacagatcacaaacttaaaactggggacttggtgtctgtcaccacaagagctgggtaccatgcaagttatgtgtcagtgatcgacggcacagtgacattggagactccgccctccgtaactagcatacgtccagtgataacgttgaatatacccaagacgtcgttcaaaagcaaactgattctattaatggcactacagcgtaaaacagtgactaaggagttaatgcaacgagtgttgtcacgcagtgcggcagtactgggtcccggcggaagtgggaaaacaactaaattaatagaacagctagataacgacacggtggcagtggcccgaacacgaattgccgttgatacgatcagaagacgtgcaccgcaatatagatccagaataatgacgtacgagaaattactaacacaaccaagagagtgtaaaacactgttagtggacgaagcaacaatgttcaactggttggacttggctttaatattaccaccaaccatagagcgactaatattgtttggcgaccaaaatcaagtaggtctaatagatagtgctatattaggtggaacaagataccttgagccagtaacaactctaatacgaccacccaatattactactcttgacgtgacctatagatttggacaaacactagctaacttgttaacaaatgccggttacaaaatcacttcattaaaagaaaccgacaccatagttgaatttgtccggtatgatagtttcgatgaagaactgattgagactctcgttaagacccacagaccggacgtcgttttgacgttttacaagcaggcgaaagtacggctaaaacgatttattggtattacagtcgaaacagtacactcataccagtcttgcgaagcagacacagtgctgataatacagtggaacactggcagtcgacattccacaatttggatgaacaaagcgtattgtgtgtccgcagcaacccgggccaggaaaaagctggtttggtgcaccatagggttgagcaacagagcaacactcaaagacattttgaaaggaaacactgtcaccaccataacgggaggagcaagggatgaggacttagaggacaaactgaccactctccaaccttcaagtttaggattgagattggcagatcttgatgttagtcccattgtgacatctgggttaaactttgaaaacaatgagacaccagtgcggtggacaattaatcgacgacccacaactaaagaaattaattacttattaacaactacggcagataacccagtaaattggtatgggtacaatttggagcaaataatggacgctgggaaaaaagaaaccatcccaggatttacgtggaatatagttggcgagtcagtggtcgcaaaaacaataaccgggtggatagcgttcaaattgtcaaataatggagtgagaatcaacatagaatatagcaatagagtaatgtccatgttagcaaaaacgaaaatggaagacgcttacgtgtctgaaatgtcgaatttcatttcagaaaattttattagtgatggaaatctagaatgttggaggagaaaattaacaccggagttgcaaacttttgtgttacagtgcttcaaagaattcataatcgaacaagacgacgaagtattcgtggacgcccctgaaactttggatgatctggacacgatcacatcgacttccatagacttggaattgcagaagttaactaaatcaccacaaaatgtggaatgtgagatgtgtttgaattacccagttatgacgggtctattggcggattatgttcaggccttatacgtcaatcaaacattaacatacacctggcaagagcatggcagtgaccagattttagagtgcatgacaatggaaggtgtggtttttagggtgatagtaatggattgtggtttgaaattgaaagtgtcattcgacggcacgttcgggaaaataacaaaacatattaacaatttggtaaccaaatggaacgagcaggttgaagccggcttcagattgaatgacttatggcaacatttgacactccagcaaaaacagattttgaaacatcggtacggtgacgtactagaagaagttaacagcctaggtgacacaagtatgagtgtagctaaggcactggaggtgataatggaacaagaagcagctaaattgacagttgatctaggtgcatccgattctaccacgtcagattccatggtccaggaatcaaagaagagtgaacaccacaccatgtatagcgcattgaacacacacttctgcacagaagctgatagttggtggaacgtggaattgaaagagttcaactccattcatgtggaatcatatcaaatacataaacggaaaaatacaatgatacggttgattgcggaacaatgtcagatgctagaaacatgcagaattgggctaaccctcaatctgtggggcatgacagttacggtacacacctttggtggttgttcactgtgttgtgggttagaatttctagctgaagaagaagtgatacttaaaatttccccacagagatcctgtgttagacgcaggcatgttttgattaataccacagtagatagagagctgacagcagcagtgtgctcatttctgggaattgactatgaaccggtggaaactgatgtttcccatttacaaccgatagaaccagaaaccatactgtcaccattactatgccatccaaactatgaattgggaatgatctttgagagaataatggcaacacctctaaatatgtggaactattacaaaacactaggaaaaacagccaagttgtgcacatactacaaacattataactcacagtatgtggcacaggtggcaaaccgactcggccctaagtatgaactagcgaaaaataacagttgtggtgatcatgcgaaaattgatggtgctatattaatggtttacgagaaaagaacgaagaaacaatttttgtgtcaattggttaacgataaaataaacatgatacctaatgactcagatgatgtagattgtgacgcagtcatggagatggtaaataatagactgaaattaagattggcctccatcccttggaagttagcaaaaatagtaatctccgcgttacacttacagacagtaacgttcggcacccaagagggacatgacatagagtcgctgaacttaccgttaagttatcacaaagcaaacaaaacaatggtttacaattattacgttaacaagaccgaggcaatgattttggcgaacgttaagaagccccatcacatagtatttgtgcacgctaagcaaatggagaaatatgtgtctttattgcgccatgaatgccaaaacctgccagttgaaattcagaactattcgactatagaacatggtttcgatcagatggtggaacaattacatttcaagtacagctacaacgggttaggttacggcgagaccgctattgccctctccgattacccttacctatcgatgttgacatctgcttgggcggcgcatatcagaccattatcagaagaacacaatgtgcgatatgtgaggaatttgttggacacgacaccaatgctaaacaaaattttatcagtgtatggtcctgagaagaaaaatccgaaccacgatgatgacaacaccaaatatcacaatataatttacgacgcagccaaattgcaacgtgacttggaaaacggcccatggttcacgagaagattgagtgatgcctcaccattacaagccgacatgttgtggttaggcttggtagcactgaagttaactcccgaacaattgtacgacgtagttaaatccggtaaatatgagtcaatcattctactgtgtcccatcaagatctcagctgacaatgactatttcaaactgatatctgaagacaacacaaactattacattgcctatgatggaaccaacgacgtgactgtggtaaacaaaatgttaatgtcagcaattatgggtggtgtgaacattaagatagatgatgtgagcatggtattccattgcactaataacgttttaggtcacagcacaatcaaattaacaatttgcaacaagaacctaacattgccaagatacattaaacctataaatcaacaaaataacatagtgggtgtaagtttccgcatacccgtaattaatgacattaggagagcgttacgtaacgcttctgttgtccaaactagaaaggtaaccatagaccataaattgtacagagcactgtcactccgaatgttgcgtccaggaacaaaattagacgacttattagcttacgcaagaacatatgcacatttggttacatattcgaaccggggtgtgagccaattttcattaaaacagtcagactacttgatggaagcttgtgcatgtgtatattttgaaagcataagagcaaatcaatcaataactaaattaactgacatactcacaaaatcgtataataataaatggtcactcaaaaatctgcgcaatacagtggaggcaattggattaaacatcctgtcagatgtggctgccctgtttgggtccgcaataactgtagacgaaatattaaaaacagtggaaagtatgttggaaacttctgacttgacactggtaaggaatttggataggttttgtttcgttaaattgacaaaagacattgtggaaccaaaagtagtatttaaaactagtgaactaaaactgtcaactggtaatgctatatcacaactaaacactagattgatagcagatactttaatatcagccggtgcaggattaatgcattggtatagaggtctcaagaccaccccagatacgaataggaaccatccaacccgcagggaatcatgtgtgtcgtctatgtgcagaattgtagaaacccaggaagggaaaccaaagctagacgcggtgttgagggcaatcaaacacatgcgtaaatattacagtcaccaagctatactacaggcagctgaaacagtactgaagcacgcaagtgatcccatacagttaaccaatcgacccaacacctatgaacaattgtccaacatagttggcgtggacgtcactgggaaagcagaaatcaaaccaactcccagagtgaccatgatggggcaagatgacattgcacattgtgtgtccactgccaagtggatgtacagcagagagattgaatccatgcacggcaaaacagtgttgttcagcacaattggatcgatgggtgacgtcgaaccatttctcggagtggcgcaatggtggaaaaactttggagtaaaatcaatatttgcagtgccgaacgatttggtgactcatgtgaccaaattgggatttgaatgtgtgggtctagatgtgggcgttgacgaaataataatagaatgtattaacatggaaaactacaaatacaatttacccaaactcgtggaacatttgcacaatttgatggataccactagcagagtttttgatgtgaacataaaattatggaatcaaattatgccaaatgttgatctagtaatggaaacaccatacacacatgttgcatctcaacttgcacaaaaatttaacaaaccactattgctgtcagctgcatatccatgggagtatcatagatttagaacgattaaaatgaaaccgttcacactgtttgacgtgatggggggtgcaatatcatatgctccatttcaaaacaagctggaaaaatggagatcaaccgttttggacctcactaaccagagaggcaaatttgtggcattgggtggtaacccaatggtgcaattgcatgaacaccctaccacagtctgggatctgagttacagtagtacagtgataggttaccctgtgcaaacattcatggagcaaacgttggggcgacagcacgaaattgatgcactgacaattaacaagattgcggcagtatgttttggatctatggtggacaccaatttcacacgatggatgttacctatggttactaaattgtcaaatctatttgaccacgtaataatagtgggagacaagtggcgtctagagccagggaccatagccagtaatgtgagccagattgggtatgttaactaccatcaattgtttcctctggtggacctggtagtcacacatggaggtagcggcacaacgcacaatgcgttgcgtcatggatgtgtagtggcaatacagccgttctttggtgatcagttcgcttggttagaagcggtggagaaactaggaatagggatgcacgtcaatagaattcaacacctggacaaaatgacattccaatcaatgcaaacaaatttagtaacatacatcaaggaaataggcgaatatgatgtagaggcaaatttaatatcatccttcaactactacatacaaataggtgcaaaacacatagaaggtttagcgactaacgtgccatggccggtaactgagatatttgacaataaccatgacaagttaaccaacatcaaagcacaacatgctttatcttgggttgatctagaagaattgggtgaccaactcaaagtggttgtaacagaattaggaaagagtgacgttgatgattgccaacaacgagatggagtggtcgagactactaaaggggagcatgagggttcgacccataatactcaaactgacttacagcgaaatgagtttaatcgtttcaacacggtcaggggtacaacaggcacttccaaccagtgtaaacaaagttcacccattgagggaaaaagtgcaatccactcaaaactgaaccaacatcaaagtggaaaaatatttaactggaaattgaggaatagttcagagactgccaaaacagcacgacaatggattatgcaacacaaacggaataaacagaggaaacaaaccaaaattaacaagaacacaattcatagtgaaatgccgaccacaacgcaactaaaccaccgtaatgcaaccggtcatgctccaacatctgtggatagtagccctagcaacgttgatgtggccaccaacatgtcagaaatagtttcaccatccaaaatagtagtcgaaccagtggcattagcaaagggtttggctaacccgggtgttgtcaaaaaattgacattcccagaagtaatcaattgcaaagcaaatgtgatgggaaacaatcatttagcacacgtttggaaattgcgacacatacggtctgaagtatctgggatcaatgaaactaattgtggcacaacctgtaggatagaacctagcgattggacacaattgtatgacccgaaaactcaagacacatgtgtacatgaatgcattatgtggataagcaaacgatatggtcataacatttcgcagcaacaactgttgagattgtttgcagtggcaggggtgaaaggcagacccactatgcagcaaaccaaattactactgttggtgttgggattgccggttttgttcctaacaccgcaagaaaatttggcattgaactgttgtacggacgaagtggatataggggttaagttatttgtaagcaatggaacgggtcactgtaaaatagtaaaaataaagaaaacaatcttgatcgaagaattgagattagatgttttaccgaaaaaatctgacaaactacaaaggaatatagaggaatatttgtcagcttacaatattgatatcgaaacattgaaaaatcatatgttgtgcgacccaactaatattaaaaattggcacacggcccattcagactattcactggaggagcttaaacacaaactaaaatttgtgaatctgaaacacacaatcaaaagatcgactcaagcagtgcacaccggagattgggtgcaagttgacgacatatacttctggtacggtggtagtttagacataccttcgggagtattattgttgtacaggcaaaatagttgttattacccagcattttatttcgcttcagatgatggggcagtaatgatcccaatgcaaataaacgccaataacagcatgatccatgacataattcagacagaaattaaagtggtgaaagaaattaaagtgccaaaaacagttcgccatgtcaccaatgatatgggtacagttacatgcttaaatcagttcaccagatcagtgttggcgacaatagatcctacattcacgatggctacagtaaacgaccctgatgcaaactacctgtatatttatgagtatgatggcagaactcaccataaatatgacgaattacaaataattttgaggtttgatccaaacaatataattggagtggggtttgatttcaaaccagaatgggttcaaaagctcaaaaatattacagcacctgtaagatatgctgtgtatgggtcaaagttatgcctggcgctagaattgaactcacagcatcaggccgatgtaattttcaatttatgtagcaaaacctggtcagccatgtttcgatacggagatgtcataatagcgcattatgaatccgtgcaaggagttggtgaattatggtggacaaaaatcggaaaagaattgaactgcacgcgaggaacaagcaatttgcacgtcaattggttgagtactgagtggtttgagttagatgatgagaaattatcgaccttgggggtctccagagaagacctggagtcactgttggtgcaaacagtaaatcaactgagattcagggtcaacgacaatttttcgtttgaagaggtgcaatacgaaatttatccaacattaccagtgtattccatgagtggtaggagacttctttttccattcaaaggcattctgttggaatatcaaccacatatcacgggaggaagcacgccgttagaagaaagggtgttgagcaagctggactcagagttgaaacctaacaaactttcacgatggtgggatttaaacacagaaaaaccacagacctcatttgacatgtcagtttgggagcagagattgaacaccgaggccttaatggcagcattgtcaacaccggatatgacagtggctgacctgtcaaattcaaacgaaattgtgttggatcaattgtacatacacaaccaaccatccgagtggccaactgttagtttgacagacacccaagccgacgaagatttggattggcaagacttgatgttctggcatgacaccgacttatcggattggaacgaaaaatatgcgccaacaaacgacacgcaaattaaaggtcgcaagttgcctaccgagctgaaggtgagttcgaaaacaacattagtagaatacccaaagtatgctagaccagtactgaccaaagccgccaaccaagaatttaatgctataacggggagattgtgcaaagttgaaacttacaggaagtataattacgacattaaagaacaaatcaacttatttgtaactacatacgtggatcctaataagttgcatctattgagtgaatttaagcaaaacgagttgactatgaacgacgggaaagtgctagactggttacgtgacagaccagatgccaacaaaatagcagaagaactggaaatgattttggcagaagggttagaagtgcacccgatcaatgacattaaggtgcacctgaaattagaatctttattgaaagaggaaccagcaactcatctaaaacaggtcaaggctagagctctgatgtggcaatgtaaggggtattgtagtattttttcacacatatttaaagaaattaagacccgacttaaaagtgtacttaagcccaacatagtgtacaccgatggtttaagggctgacgaactatcgtcaatagtgagaaatgtgaaggatttcagccacttcttggaaaatgacctagtgcagcaagatcgacaaacggatcatgaagtcattaaattcgaaatgcagatttacaaactgctgggtgctaatgcggacgtgataaatttgtggcacaattgtcattttcattggaaatacaaagcagcctccgctatgggtatcagggatgccatgagactaacaggtcaagcaaccacggctataggaaattgtctcacaaatctacttgttcacatgaagttggtcaagagacttgggagtcagctaaaactatttttagttctaggtgacgatgggttgatgttaatagacggaatggtgaataccgactcgttgaatcgggagttgaaggttcaccacaatatgatgtgcaagccaaaactaagtagcgtggttggaacattttgttgtatgattgttgggaaaaatcacttaggtggagcaacactgggcccagactttgttcgattgagacgtagatttgaagtcacaaatggagtcagtgaagcaaatgacgacaacttaagagcgagaagtatgagttatttgatgttcttaggcgatatacctgaagtgcgagaaacagttgcaaacaaaaaattcagcatagagccacttaaatggtatgattacgactctgcagtctacgcaacggcatccaaatacgccattagtgagaccgaagtagaaaacaataagttacaattattagcaatgataaacaatccaatcacataccaaacagacgtgttgcattggtatgaaggtaaataagtgtttctcaagtgtgtgtgtggggtaaggaccccccccccc

SEQ ID NO: 841 - DNA, 13954 bp, Yerba mate alphaendornavirus
  source 1..13954: mol_type = other DNA
ttacaattcctaacaaaattaaacaagcaattgtaagagggggcactcgaaagggtgcctcctcatttaaactaaaaccaaagatcaatgattatgcggtggctagatctcttggaagcaagaatagccactgcaaaaatagactcaacatgagaagaggaaaaatattgaacccatccacggagatcaagaacaatctgtatggttggtgtcaattgccaagaaattataaggtaacaattaataataacaaatttatagagaacttagaaggtatttttaagactggccatcaagatgtggatggagacgtactttatatggtaccagcagtaagagggatgctaattccaaaacataaacattatggaatagctagttgtgcaaacacaaaagacgtgatgttcaataagttcgacatggcagatttgagccctttaaacgtgagtaaattatattacaatgtcgtgtgccttggtaatgaattgagaaaattaaacaatatgtcactacaatttataatagatgggattaggcacaaagacttaattgaagagatagatttcgataaagagtttgtttctgatgaatacctggatcaaagaccagtgattagtgtgacctacagcggtcaaggaaattgtacagatgaaatcataagagcaattgataaagaaattaataagttcggaggtttgtcacagtattacaaactgcatcaaatacgcggagtcaatgacccctcaattcttaagagtcacttaccaaatctaaagaggtgtaaagaggtagatgaaaatggtaaggtaagttataaaatggagtttgaacacggactgtttaacccaatcaagaaatgtaatatttgtgacaaatggaatcattattcttctcttgaccggggcctgcggcaagttcactacagtttggcaaaatacaggaagaagcataaagttttaaaagataaatttgaaactgttaagaatacggatgatataaaatatcatgtaccatggaggtgtggctattgcttcagtgatttgaatttgaaagtagagataacgatggaagctagagagtacatatttaaatttataatggaaaacttgttcgtgctgcatggtgatatcgaacaattgttgaaacttggttatggagatacttacgaggatttatcgatggacgaaaagaaaagcatcaaaactgacgatcaacgaacaataagagagtatttcttccacctacaaaagaagataataccagtgggacatgattttgataaattgatgcaggcgaatatatcaaagaatataggtggttgtttctttagggccacaagcaagtataacggcattaaaccagaattgatagcagagatatcaacattcacagaattagttaagacgatgatgaatccaaatcatgtggcatgcattggggatgtattgccgagtaagaatgatgacaaatatcatcaatggtacaaaaacgatcactggttttgtagtgaattggccacaggttgcactagttcaggggtatgtgatcataacaacaagttcacagtgtttggttctatcggagcattgaacatgtcattaaatttgataatgagcatagttaaaaagcagagacagcttcagattataataccaatgaggtcatcttcaaatacattaatggacaaaaccggggtgtttgatagcgcagatggtacactgaacttgttcttagacggtgacccagttggattcaagatgaaagcagacacgtacatgacattacatgattatgatttgattgtgtatgattccgagctttatttgatcacagaaactagacgattaagtttaaccaaattaatcaacgtgacaggaccttacagcagaaaatcacaattacccatgttagccatagatcacacggcaaaacaaagtattagattgttcttgccagatgtgaactgttttatgggtaactggaccgggatgaatttccgggaacaaacttttgaactgaacgcacctttattcaaatacttgtgcttgagaaatttatcaggacaagtgggacacaacacattaagacaatatgccgttggattcgcaatcaggcgatttgtaatacataacaaagtgattgccaacccaacaatagcatacgaacaagtagatattcacattatactaagtagagtgtgtatgatgaagttgagagggatgttcagtgcaagttatgcatatagcaaatttaccaaattattaggaccatttaggggattgatgggtgatgttgaaactgcaattacagcaacattaattggtttgtttgctgaattattaagtacaaaattcggaattacattagaccacgtattaaatctatttgaatcatcaagcttaaaatcattcataaccggtatatgtgacacacgattgtgggacaacttgttattaatggcagagaatgttaagtttaaagacttgaaaataataaatgttgacgataacatttatgacaccaacttgccgaatatcactatttgcaatcatcacggtgaaaaatgtgatcacgttgaggcattaatatttaataggtgtaaatgttgtaacattaaaacagcaatgagggaattttgcaaatgttgtatgccatcaccagccgataatgataaatttttccgttatgataaatgggttgattcggatgaggttaagacaggaaaggaaacaactggcttgaaattagaaataagcaataatgctgtcaatgaatacaacgcatataaaaattacatgagcaaaagtgagaatgaacccttattaaagaaaatgatatcgactataaaagagtcagaagtcaaacagaaatatcaagataaaaatgaaaaagaagaaaatgagttagataagttaaaaccaaagaaagttgaggtagacaaagaaggggacagggaaacttgggttgatctgtttacaaacaaggcgaggaaagcaatagctaaaaccaagaagctactaacaccagtggttgataaagcagtggatgatatgagagacataacagaagttgatatattaacgaaattaggatatgaatttgtgacgcatgtagaagaaccagtaaagtatgaagatatcgttaactcagaaccaagtgttaattattatttaccacactgtttggagggggtgacgtttttatctagggacacatttgaaattatagaggtaattaatttgccaaattcaggaagtttgacttgcggttatgatgcctacaattatgtaagtgatgtgccaattgaaatgaaatcatttgaaaaattgtgtggaggccagccaccctttagtcaaattaatctaatggattacgctcaagtgacccgagagaatttaatattagtgtgtctgaacactataatattatgtaagtatgatttggatgatgattattttaaatgcataaagtttgatgaaccagaaaacgttaatgaaattgggcacttttcaccaactataatcagacggaaattaagaggtagtcagtattttgcttataaatacccagcaaacagcaacgacaggactgacattttaagaacaagattcagaggcgctataacttgtcacaatgtaggcgacataaccgcaaaagagaatttaatatgtgagttgacattttattactcaatgaaccaactaccggcaaataacatagtggccgatgtggagattacgagtattaatgacaaaatgtatctgacaaataacaaagaaacaggaattcattcaatagaaagtgatagaattcatgtgatgataccagaccacatcaaaccattagcagacaagatatcatatgcattaaaaggggaattgaagatgactgatttgccggaatttagacacactgcaaaagaattgcccaacaatacagaagaggccattgtcgagcaaatgaatgaaattttaagatcgattgtgagaataagggccatgataacagacagggacacagcaaatatacgacaagttataaaagggtatgtagagccttggttcaaatacagcaagtttgacacacacaagtctttcataactaaattaaagaaattcgatttggtaatattaaaaatggataacaaaaaagaactagtggctgtagtgggatttgataggggtaaactaatactggacaagcaattactgttcaagaaagaagtgacgataacagagcttaaggactcctatggtagtaagatcagggaattgattggttattgccaaccgtgtttgaagatggaggtaataaaagagataatatacaatgccaaattcacaactggacctgctggttacggcaagtctacaaaaattggggaattagcaaagccaggagatgtgtgtgtggcaatgacatcatcatcggtgaaatcactggaaagtaaagtgcaaccaggagtagttgtactttctttggaaaaggcgctttacactcatagaaagtgcaacgaaacattatatgtggatgaggccaccatggtagattggttggcaatagccatgatggtgcaagccaagaccagtttagttatgtttggtgcagaaaaccagattgggaaaatagatatgagtagaacaccaggggtaagacatgttattaatataatggatctggtcagtgataaaaatataaccagagagagagtcacatacagaatcggtgagaacatgagaacattattggaagatgttgaaccaggtttgataagcaaagccacacataacacaacatatactatatcaacatttgatgatgctgaatttgacaacatagacatagctatagctagatgtaaaccagatgtagtgataacaccatacaattacaataagatacgaatagaagaaagaataacaaaaaatcctgttttagtggtcacgacgcacgctttccaaggagtggaagttaatagagctatgttggttttacgtgctaatgctctaggtaggtgggagttaaatggcatgccagaatacttaaactcagggttaacgagggcaaaaaatcatactgatattgtgatatatgggtacccaaatccaaatgtaaaatcgttgcgtgacataatgacaatggtagcaggattaagattgtggaatgctaatcaaatagaagctgaaacagatgatactccagatgcaattgattttaatgatgaattgacagagaaaaccaaaatcaagaatatacacaagttaactgtacaggaggttaatttattaaatgacatgaacctagctatggaaggggcatcaatacattatgagaagattgaaaatgggactatagcgacagctacgaagtttctcatcacaataggtaaagtaataaatgtgaatggcgaggttactatagaggctaacaatacgataaaaaggaaaattgaagaaaatatggatagaacattaacactgcctgatgcagtaagttataacaaaattaaaaacatggaagataataacgtaatgttgagttcaagatcagcagccaagatcaaagaattggcatggatagtagacaaaacggtagatggaatgctaagagttaggttagatggaagcataatatgcataactaaaacaaaaggttgtccattattcgcagggttgacttttaaatcaggtgctgaaacattaataatccatgatggttggaagggaataatgagaagaaatataagcataatgagaaataggatttatgactcgttaagtccagttgtaaagtggttagatttaaaaattcccaatgtaataataagagaggaagcaaacatagattggttaaagcatttaacaggtgatctggctaatgcttattggcaattgaaagaaagattaactaacgtacatatatggatgcttaacatgtttgcaatggatgacgtaccaaagtgctatatgaacaatatgagaaatgttgcgttgtacaacaaactagcaaggccactcaacattgaattgacagatgaacaccaatctgtgataccgcaccaaactttgatccttgaacaatccaagttgatgggatacaagaaaagttatacactagttgatatgaaaggagctattatggaagtgtcaataaaatcaaatgtcaaaacatggtctgcttttgtgatagaagcattgcaagatattcggaaaaatggagaagaaataagaggaataagtgtaacagatttgaatatagatggcttaagaattccattatctaagcattttgcgataggaactgaaataaaatctctggtttacacggaaataaacaagataaacaggttgatagacagcggggtacacgatcttataagaatagacaagcaagcaaatgagttatacaatcacattataaaagcaagattcccaaaattgacgattgcaactagtaattacgaacaaatatcatcacacgtggaatcaattttagaaaacatcatgttaaatacaataggtagattgtcaaagcacagcaaagaggtggcagtgtatggtgggccaataccgttgactgtatgccaacaaggtaaatattatatcaaaataagggtgccaaagctggaggaaccgacgagatacatgtatgatatacaattgccatcagtgctaagcaagttgtcacatttcaacctaatgaaagatgaggagaacaaaatagacccgctgtggaatgaggagagttgtcacaggttaatgctaggttgtgatatatattgcatagaagaggaattactcatcgaattaatggataagagtgagtatttgtatgggtggacaccaattttgaataataatggagaatactttcagactaactctgaacataatctgatagggtacaaacatggagtgcatagcaagcaaatcaggaataagttaatagaagatgtggagttaggcaaaccgattatggttaatttggacaagaatgaatatgtggaagccaatataattatggaattcatggaccacagattagtgaagttaaggagacgtgttataccagattgtaggtatgtggacagatacatagggacaagacaagatataagtggggaggtgacagtgagagtgccatggattgattttgacttgatgagaatcataggagagaagaagatagtttgcataaaagaattaaaagtgaacaggatgacgctaagaaacatattgatgcgattgatgacaggtgatgatagtgaatcgagtgtactagcttacactagaacactagaatcaacacaattgatcactgataaaggaattcaagacatgaacactggcaacttacttgtagcccttaatacaagttggtatgcattatacttgcacaatgactatataaccaagtttaaaatgctaataaacttagtcacatcatgcgagggtaatgcattagcaacaggtttggtagaatcactattgccaggtctgctacagatgttaggaaaggtatcagaaaaaatgtcagaaattgcgtatgaagtaattaaaaatttaaatagtaatgtgaacttggtaaattcaatgatggacgtaatcaaggaaaatgagaagatgaactggtcaatggattacactgagcgaagaaagaatcgttattatttccaacaagacagtgaagaagtgcttaaaggttggataaatagtataaacgaaggtgaaacccatgaaccagaagatgatgaagacaaatgcccaagttatgatgacaaagatagtattgaagggttatcagaaaattctagtcaatcttacaaatttgacttaaaagaattcgaggaggacatcaaaatggaggatgaagacgaatccgtgtacctatctgatataaatgagaggctaagcgaagagaataacccggaagatgaaatggtgcaggagcaaaaggaaagaatagatgatgagtgggtgaaatcatctggagaagaagagatattcgaagagtcattggagatacaagaagaaacggaggtgatagaagagttgataggaattgaagagagtgagccaaagccattaaggagaaggttgaggaagaagttcgaggagcctgaagagagaggtatcatagatgactcaattgaggaagaggtaagcgcacaagaagagagtgcctcaaagctaattgaggaagaggtgggattacaagaagagagtgccccgaaaccattaaggaggagattaagaaagaaatttgtggaatcagatgaggagacaagtgaaaaagattcaattaaagagggtttgttgtccgatgaagaagataaggaaccgagagtaaaggaagaagaagaagctgtggaatccatactgatgcgtaatattaataaagaaaatttagcaccgagagttgatgaagagttatggagaaaagttattgatcaggatagaccagtcaaagctccactgttgcttgaacaaaacatgaaatgtataccaaagattttttggtcatattggcatgaccacgaaatacctgatatggtaatgttgatgataaacacatggcaaatgacgaatccaaattatagaataatcattgtcactgaaaagacaataaagaacatggtgtcaagaacaaagtatgaggaactagagaggcaaacgacgcaatttaaatccgattggataagattgtatatattgaaagtgttcggagggatttggatagatacgtctacaattttaactgattcaattgatgaatttgtgactcatactatagagggagaatcaggagttttccagatatctttgtgcaaacgaaataacatgaataaaaccttcgaaagttggtttataatttgcactaaacataatgatttgattaaagaatggtatgaagtgactgatgccatgatgggtagaagtgagtcaaatggagatggtgccttggaatggttgtccgtaaaatatccggatatctatccaaaaattatagggtctatagtgcctaacttgcaaaaatatttaagagtatacctgacagagaaaatagccatagcattaacaaatggaattgagcccagttgtataacagaagatgaaggtgaagttagcttatttcataagttgccgataggagattgggtgagattgtggaaaatattcggtgatgaggaaatgtcaaaacataaagtgacaataccagtagtaaagctcataggaaaaatgagagaactattgatgttagattataagtacagagaaccagtgaaaaatagctatttagaattttgtaagagagctccagcattgagatataacatattcaactgttcaaaattgaccatcacagacaaagtcgttaaacataaagaggaatcaatcgtaataagttgccacaaaaatacaaaagtgttgttattgtgtagtggaaccagaggtgatataatgcagtttctgccaatttatgatttgtgttggggtttaggtgtacaagcaacaatcatcaccaatagtgatcatagtgcattaattggggataggcagtggcataaactgacaagcagttcaacaactttaatggctttggcaagttccgtaatagaaggaaaagacgtaacaaaaacaacagaagcagtgacaatcataaatttagtaaagaaagaaactgagaatataatcaacaattataaagatatgaaaccattggtaataatgaacaatgtttatcctaataagaaaaacataatgaaattattaaacacaaaaacaataatgatgagcacatttccagaagaatgggtcgtaacaaaaccaagcagtgtaacggaagatagcataaacgcaaaattaattagactgatatactcatgtatggaaggggcgacatatgagccgatggtgatcggaaaaatgttaacaagttatgaatggatgacacgagaagagcattatcagagagttggtccgttaacattatatgaaagtggcaaacgagaaatgaatttgataataactggtgacaatgtgtgtgtaattacgtttggtagtagcgatattttgttagaaagtaaatcaatttgccaattaatcagcagagtaataaccaagggttacaaagtgatatacaatgacatcaataataggaatgtgccacaatcagaattgaatcaattggcttacaattatcggggaaaaatcattttagttaaggagttgaactgggtagaattaatggataaaataaagttaaccatatgtcatggaggttatggtactataactgaagtgttacatagtaagtcaaaattaataatacatcctatgataattgatcagcacttctgggcagacaaattacaaagttacggattggccgtaacactaaataaaattgatgatgaaattgcaatagaaaattgcctgatgttagctgggaaaacagatctagctttgaaaaacctggatagaatgttggacgtgaatttaattgaacttataaagttaataaaaacaaatacgcaatgtgagttggacagaataaacccaggtgactcattgagtatgatatgggatgatgacatgaatgaaagagttgataatgaaatcatcaaagacataaaagggattaaaagattaaaaatggtcaaaacagaattgataataaatccgggtgtaataaactattgtgtgaaggaatcgatattagaggcattaaacgaaaatggaaaaataaagtttttgacaagtaataacctgggagttacaaacttgcgagacaaaggtgtgcataaaggtaacttaatcaacggagtgttatgtctgggttgtaacttgtgtttagtcgatgacctgggggacgcgttgataattaatatttatgatgcaccagtcataacattaaaggtggacagccagcgaagtgtttggcattgtagcttggtgaacatcagacattatgaggacatagaagatttaacatttgatgccttatgtcaaccattaatagatgatattgtcaaagacatacacaatgaatggttgagtaaatacacagtaatggaactagtgagcccggaagtgttaatgagtcacatgccaaagaaaagaaggctaaatatccattatagaatagtaaatgataacctaaaccagttaggggctagatctgatccgaatgtactatacttgacattatataaatacaggtacatgttcataacagattgtttgacatcagacagagatcttagtctaggagcggttacagcaagtgaaggctggagattggtaaattggtgcatcaggggcggaaggatggttatattctcatacgataatttaccagaaaatgtggtatttgttaattatcatgtaaaatatgaagcaccagttaggccatcaacaaccataattggaaaagccaagatgtatagtctgaataaagcaacagtgaggcataatgaagtaaacatgctagcaccgagaagcagcgcaatagtccaagggacaatgaaagggcacacattaatagttagtgattatgacaatagatcacatcacatgtcggatgagcgatcattgatgagcgaggcaaagaaattggtaatacatagtgacaaaccaataagtttaagcttgttaaacaaatcatatgacaacagtataaacagaatgattctcaggagtggttttgtcatgtacgtgaccgaaataggtgatgaacggcgcaccagaataatatgtaggaagttcaaaattgagactgtagagacaaaaaatgtggtaatgcaaaacaagctagaaggtgtagcagttgattacatgttaaaattctttgacacatattcgaacaagtgtaaagcatatgacaatattgatgatgacttgttacaattaagagattgggatgaactatttgaaagattaaacaatagtttggtgttgacgagtaatgataaggagaagttgaatgaaatagccaggaagagaggaaagaaaataaccattgcttgtttgacaagtgtaggtttatatgggacaaagaatagcaatatagaagaaataagttgcaacgaagtaatactacatagttatggaatactggtgacgttccaatccatgggtggatcacaacaagaacaagaacagcaatggtggaaaatattaagtaagaaaggtgaatccgtaccaggagactggtgggcgttaagaaagcagaagcaatctgaaggaaagtgtccagatttgagtgatgttattgcttacaatacaatgacaattcatgaaccggatcagaattatgtagagaatgaggtaactgcgtgggatgagacgagcttacaaatatatatagcaccttacagcaccccttacaccggaagtgcaattgaaccattgtacgatctgccagatttgccatcgatgcaactatgggatgacacagacttgactaattgggtaactatgtatgcaccagttaatgcatgtgagattaagagcagagaattacctgggaagataatagaagtagagaagattgtaatgtcaaagtggcctataaagagcagggctgtgctaactaaagtatgttacgaggaaggaaggagtattgtgggaaggatgaaatcagtagtgtttataaggactatgataccaaacacatacaaaacagtaatagagctatgcgaaacctacttcaaaacagactggagatatcacatcactgaatacaggaacaacagactcattattgatgccttagatgtgcaagagtggataaatgagaacaaagatactgataacataattagggaaatgttggaaacattgagtggggaaataataactaaaccgataaacgacgtaaatgtgcatctgaaagtggagagcctattaaaatcaaatccaatcaccgtaagtcaggagcaacaagcaagaataattgtgtggcaaaggaaatctatatgtgcaatatattcgaaattatttgtaaaagtcaaaaatcggttaaaggatgtattaaacgaaaaaattttgtacacagatggattaaggccggatgaaatatcagcaagaattagattgtgtaataatgtaaaaggtttctttgagaatgacctgaccaaacaagataggcaaacagacaagccaattatagatgtagaaatggcaatgtatgacatactgggggttcacacagacgtaataagatcatggagagagatgcatgagacatggaggttcaagtcaaaaaattattggggccaaggggaatcaatgagattaactggccaagccacgactgctataggtaattgcttaacaaacatgcaagtgcatcaaagtttcgttaagaaaaatttttacaatcttaaattggcattattcttaggagatgatatgtgcatgttatttgatgcaacaccgaatataaaaagcttaaggaaggatattgcaacgaaattcaatatgcaaagcaaagataattggtgtaataacggggcgacattttgcagcatggtattatgtaaactgccaaatgacagggctgaattagctgcagatgtagtcaggcttaagcataggtatgaagttactaacggggctcatgaaagtacagcagaaaatttattaatgcgaaaggcatcatacttaatgatgctgggtgatataccaggtgtaaaggaagtggtcagtaatttaaacttaccggttaaaccaatagtatggtacgggtatgacactatgctacaagctgtggcagacaaatacgacatgacgaccgtacaagtggagggttattaccacaacttattagacatgatgagaaaagattataagaggagtataaaatacagattgtttgggaatcaatgaatcggaacataaaggagattcaagaaaatttagtttaaatgaggagatttcaatgaaacggc

SEQ ID NO: 842 - DNA, 10410 bp, Yunnan alphaendornavirus 4
  source 1..10410: mol_type = other DNA
tatggcgatacagctttctgtgacaatataagctatttcgatacgttgtcatctatcccagacacgttagatgctatattcttggactatgatgaaacgttattcccgtatgatagttcgcagttttataaaggggccgaaactaaagataagtggaatgtatttgaaatagcggacaggtcagaaaatgtatttaatcttttattatacgtaattgaacgaaataagaaagacatagaactgtggatgactagcaaaaattcgaataaacatggattagccagcacgataggtataagtccccacacaaagatcatagaaaacatgatgcatctaccttggataatcagaccagatttgagaggagaaagaaaaagcaaatggcatttacaaattaacgaattaaatcatctgaaaggtaaaaatatactgatcgtagacaatgatgaagggaattacagtcaaaaagatgatcctaacgtatgttttctgcactacacgaaagaagtagatgaactttgcagtaatttaaatgttacagaatataagtattataaaaagataatgcttaatacactagacatgagatggaaattgtcatgtcacgactataccagatccacagcaaacaatctcaaaatgtatggtggagaattaaaggaagcgctaaacactataggagtgataaaaaggagcaaatttgaaatcaaccattttgacatacacgaaacagaaatactcgtagatgacatttcagtactgaagagtaacaataagaatgtgatagaactcatagcagttaacataatgtgcttgtttgaagggatagagattaagaatcacacaaaaatattattgaatgacagatgtagttataatcattgcttactgatatactctcaattgctctgggatatagcaataacattatttaatcatggagaaatagactggataatctgtcatgaagtgactagatatatgaaaccaagtgcaataagacaagatgtaaaatgtttatcgatacctgaatcaaatggtaaaacgattgtatggaaaacttatccagagacaatcaattgtttcatccatgacatgaggaacagtggagaaaaagattgggagaaagggataaaagaggtcgataacacaaaaatcaatgtggttaatgaatgtatgacggcagatttgggtgttgtagaaaacgtgatcgtaataaacgcaacgcaatccacagattacaacatcaactggccagactggggggcaatcagaagcttatccaagagtcaaatgcacgactgtaatttagccatattagatgattacaatagcatgacggaatggttttctttggcttacggaactaaaaaaccaaatatgaaaaaaggaaaatgtaggcattgtagtgcaacgtttgtctataatgcagattgtgcgcatcacggcactttaagaaattgcgtgtgtggtcaaccgttagtagaagtagaaagaacaggcatttatagtaacaaaatcaaagaaactttgatgttcgaaacaacaacagaagaaccgcaatatatcgccggattcgtaacaaaggccgatcgattcatttacgaaaccaaagaaagttctatatggataggtgaaaaattgaaacggaagaagcccgattggctgtcgggaataagaagtgatttgagtttcgcaaataaaagtagtgttagtgtaagaacaatacatagcagtattaagcacaattggagtcatgagacgtataatagctatttagatgctctatctaaacctcttaaaaagaatccagaattagaaaatataagaaatagtattattgaaaaaataacaaaacacaaactcgaaaatttaaaagaactgtacgtaacagctacaagttcaaaaacgatgaacactgtgcgtaggaagaaagatctaactgtctggtttatcctaacaaatgtgagaatagaaaatgtcaaagaagatgaacataatataataatccaatgcaatttaaataacgatgaaatgaggaacatcagaatttatgcagcagccattatgagagaagcaggctttaaaacaaccatgacgaacgaagaattctatagaagtaagtgttacatgggcagttacagcaatgtgtctacttcagtagggtggtggaccaatgaagtggaagcaggtatggtaactatatcagaagatttgaacaacacactcttgttaatacgtatacaacaggtctgggaagagctatctaacacgtatggattagacgaacatctactgatgaggcatgtgattgtaaaaagaaaaatttgcggaaaagaggattgtgtagctattaccaactatcacattacgaactatattaaagtagcagaagacgcatatataaggaaaactaacataataggaaataaaaaagtgtacgacatatgggacttccattacaagaatataatagtacctgattatggcggcaaaactgttttaagctggatcaaaaatttgaatgtgttaagcatggaatcagaattattcgaaatgggaacttgggctgtatatcggagcatcagcaaagaaaattgtacaaaaatattaccggtctgtcatttcggagaatataacagtgagtcagtggccaacatcgcacttttacacaaaacaaagagactgtttagtgccaaagattcagacgtggcaaacaagaaaatagaacagtttaaaagtgccgaatgccattcaaagccagatgtatggttaagaaggattctagaaataatcaaacaatatgattttatattcgaatacccattgtgtcctaattgttatgaaataaacaggatccattacgaacttctatcagatgtgactgttgaaaactgtgtgacctgcggcttcaagttgatgcaaagcgaaacgataactaacatgaaaaacgacacaatcagaacagctttgtttgacaccatagtcaagtctagaggtgaacgcatcggtagagaaatacaattagatccagctgaatgcccgcatttcgcaagaataggtagtgtgggaccaaggacagagccgactaaagatgggatatttttatggaagcaatttttcacaatcgaaggtagagcaatatcaaatttgtacaatgttatgaatgccagcagtttaaaccggatagaacattatgagaaaagcttaacattttatagaaaagtaaccgacaaagacacaggaaggttatacagtaaggttgaagatttacccaaaacatatagtgcaggtgaaaaagaaaaaggaacgattatagaagtaataacaacttatcctagcaatatcaaaagggtagcaaagaataacggaagtgtaggaactacaactgaattcgacatttatatcttagacgaatccaaggtgacaaaaaggctattgaaatccttaatcgaaacaacaactatggatcttagtacagctgtactaaacatatttaaaaagcaacctgcaaataagtttgtaaacaatcaaaaagctataggtagaggagactttatcgtagaaataacagatggaatgtacgtatcaataaaattggataacatgataagaggtccgaacgggataggtaagtcaactgttctaaaactaatttacaacaaatatttaaaagaattagacagtgctagaactggagagaaagaagagtacaacaaagtttttgttttacatgaattgagactatctgaagtaatcttgatagaccagtttgtaagtagaccaaacggcagactagccaacgttttcaaaaatttgaagtacagaggaatactcaacaaagataaactaaagattaatttagaaaaactagatatgaaatatgaagaagtcaaaaatcagagagccgacgaaatctctggtggtcagtgggccaggattttgatttcaatggtagtgagcttaaattttatagaaaattatttaatattggcagatgaggtggaaagtcaagtagaagaacgattaagacataagatgttaaagatgatacacgacagcaaagcgagatatctgatagtgagtcacggatcatcaatgggcatgagtgaaatcgattttctggaaaacacttatgatgagaaacatttcagaatggtgtaccaggatgggttacttgaatctataggaaaaatgacgagatcagctaaaaattgcccgtatcatgatctggtggataggattaatgattttttagataaaccaagacctaaaaattcaaaatttaagtttgaacaaaaacaaattcaaatgatgatgtggtgtataaaacaggtttctttcgaaacggaagaaaaagaattaaaaaattcgagccactacgacaaagatttatttagtgctgacgtaaccgacataggctacacaaacagagaccgaaacgaatatgaaaaactggaaaatatcgtaaaaatatttaagaaagaaggtatgacagaaactttgaaaaaagcgttaaatgaagatttaaaaaattgggacatgagtatgggtatagtaagagtagacatgctattacagcacccaatttggaccgcacttcataaagtgattaagccttcacaaatagatacacataaccacgaagtgttcttagaaagaatcggtgaagccgttggaccagggcattttgagacattgtatggaatagatggtagaaggaaagacgtcgggtgcaacctgtgcaattataggttcctagaggccataggggtatctgaagtaatattctccgtacaaaaaggttgggaaaaatgtttggagaacagatataacaaagacctaagcagacaatttgattggacagaaggaattgatgacatgttggaatacttaaataagcacaatcacattcaactttatggcaagtcaggtagcggcaaaacaacactaataaacggattggttaattcgacatcaaaggaactgaattacataggtcaaaccatgtcgacagtcaaccagacgataaatcaagttttaatggtttgcatagtcagtcaattactcgtcggaaaggatccgtcagaaataataggttttaaaaataatatagagattaacagaaatttgagagaaatgtcaggtggagagtgcatgatgttagtttgttatattactgggttaacgtcaagcgcaggatcactaatattactggatgaagctttgagaagtttaagcaaagacaaccgtttaaatgtgatcgattattataaaaagaaaaacattcaagtggtattgattaatcatttggagaaaatgctgccatcactggagccaaagatagaaataatcaggctgcaagaattagtaaacatagaaagaattgtgaatagtgaaatcacgatagccaacatattcagatccaaaaaaatacccgaaatagaaagcaacactgacgatctactgataggaagagtcaaaatcattaaaaacttaaaagacatatatagagtctgtgatttatatcaatctcaccgtgatcatgattcgttgcctggaccaacgtatcggtatacgaataggacaaagtacgtagacggacaattgggattgttcaggattagtggaacaagaacgtataaacaacattggaatgaaataaaacaagaatggatagtagataaaggctgcgaattaacagaactaagactggtcaaaatgctgaacaacttgggagatttgtttgtaaagacaaattcaaatatcgcaaaaaatatcggtctatataacgataagcagactttaaatatattagaaaaccagagacacaggttaaactatacaatcaagtggtacacgccacctatggaaccagaaacagtaagcgatgtgaaaaatctaaatcataatataataataaaacacgctcaagggtctaaaagcaaaattatggtattcaacaacaaaacgggggactttaaggaagaagaagccaattggctatgtttaaaagttaaagaaacagatgaattttacattaagaatgaaggttcgaatttcagctgcttgatagagataacgaaagggtttttaaaacttgatgataaactcaatttgaccgagtttccgaaatatgaaagaagaatcgatttaagactagacagttacgagcataccgtgagggatatagatgaaaatgctgtcgaattgatcaaggaaatcaggtttaataataaaaccaccaccattatgaaggaaagaaccgattttaatataatagtaaaaattagtaagagcacagaccgagagatacaatttaacgaattggtcgagtttacagacgggaactttaatcaaagttatgaacaatgctatatttacaccaccagtggtgtagacaaattcatgataatagaagataaaaagataatattattagaaaggaaaaagaaaggagtaaagaaaccttttcatgtaccaattagacacaacatacatgggcataactgcaaaaatgggcattattacgaacacacacatgctaaaggtaatatcaaacatcgcccttacgatcaccaatgcccatactgtgaaataaacatgaacgaagaaaaagtagcgtctagtttgttgacagatcccggagactacaacaatttgaaacaaacagagaagataaaaatttcaaaacatattaaacctaatctggaaaagatattagaaaaacaagaatattataacaggtacatggacttagacgatttagagacggactgcatggtgtgctgtgcagctggtgaatatgtgaatgattattttaagataatcacctataaagacaaaaaagcaatagctagattagaccacgagaacatagaaatctcaaaaaaatctgacgaagaaatcatagcacttttagaatgtataagaaaaataccgacaggaaatgaggaaaactttgtagtgaggtatttagacaaatgtatagatcacaacatattgacactagcaacagatgaaaagccaatgttaaagatagaattaaatttacaaaaattaaaaatatatgaatttaaaaaggaaaatatagtagcagagtcgacggagagagttaatgccaattatatggcagataatgtcctgtataaaatcgaaccaaccaatatatataatgcgctgaacagggcagtgaaattgaattgtaagttctgtacattaagagaggaaaaaactagctgtttcgtttgtgaaagagacgtgaatagtcaaatagcagaagtgatgaaggtaaaaaccataactgatttgaaacagttgatccaatcagacgaatatacagtaaaaggtaacttaaacaatctagcggactttttccaattgaagataacaggtgtagctagcacgcaagatacgattaaagatgctgtattaactattaagattaaaaaccatccgtttaatatgaaacaagacatagtaattttcgaaaatttttcaggtgggggagttaattacacacatgataggtatacatggcatctcccttatgaaaataagcccaatgccatatccaaatggtgggggaaaagttttgaaagtagtaaaaagaggacaggaaattacgaattgaacaaaaaactaaaactagagaatgagacactaaaaacaggctatactgtagacgccatgaggctgatggaatttgaagaaatatcagaatatccagggccgaacaacatgacaccagaattattaagcaatgatgaaggcaataagatacccgagtatattatactacctgaatggaatctaatgccggtcagtgcttcaacagaccctgatgaaccaccagccgtagtagtcgattattggatgaaaactgatctaaccgactggaatataaggtatgcacctgaacaaaacttacggataaaatcgaaacaagtagtcggtaatataatggagtctataaagacaactttgaaagaaacaccagggtggtcgagagcggtgttaagtaaagcgtacaacatggaattcaatgccgtaactggcagattaggttcagttaaattaattagaaaagaaaacataatagttaaagatgaattagagcagatttgtagagcatattttagaagaccagatttcgaagacaaaatcaacaaatataaaaatgaaccgttgacatttaatgctgaggatataacagtatgggtcggaaatagagatgattggaaaaaaatcgataaagatttaagtaacttaacccaagaaggattcgtcaaaagacgtttagatgatttaaatgttcatgtcaaaacagaggccctattaaaaactgaaccggtattatttcaggaacaaaatcaggccaggatcatagtttggcaatctaaagatatttgtgcaatgttttcggccatattcaccagagcgaaagacagacttaaagagttgtctaactctaaatttatttacgctgatggtttaacaccagacgaaataagtgctagattaagagggttaaaatcaaaatttttctttgaaaatgatttaacaaaacaagacaggcaaacagaccaacagttattagatgtagagtttgctgtatacgggttgttaggcgtgtctcaaaaagtgttagacatatggagaactgtgcacagaaattggagattcaaaggaaaagaaaccagaggaactctagatgccatgagaatgacagggcaagcaaccactgctttaggtaatcttatcacagacatgaccgtgcacgccagatttataaatcaatattacaactacatagatttgaccatgatgttaggagatgacatgataataatgatgaacatcatgccagaaatgaaaccattgagaagaagaacagaagaattgtataatatgcaatctaaaccggacgtgagagaaaagtctggattcttcctgtgcatgttaatttacaagaccagtactggtgtaatagaatgtggaccagcaatacctagattaaagcgtagattcgaagtaatgaaaggtgaaaagatgagtccactcagtgtgacagccaggattaaagcaataatatgcaagaacatgaccataagaaaatacttagaaacaaatcaacctacagacaaaatgatatttgtggaaggaaccggtatatataacttagatgaatggattaaaaaccacgcaatcgacaattctgtcttaatgtacgacaacccaaacgaaataaaccacgatataatagaattggtggctgaatgtgtgggggaaaatcaaataacaggaattataatgccgtcactaggtgggaaaacaacatatataaaacacaataagaaactgagagaagatgtgaaccttttagatagtgacgaaatttacaatccatgggacatgataataaaaggattcagaccaaacactaaagcttgggaaatagaaaaacaaaaacgaataaaagagaaactggacagaatgataagtgataaaccaactttcgtcttctgtcataatcaagaagaagcaaaatcttacggtgcagatagaatgtattggctaatgccagaatacgatttggtaaaaacaagtgccgactatatcatacgtaaagaagtgcatgacaatcacagattacaaatttacaccgaagcaaaagaaaacataagttattataaggactacgatgaactatggaccatgctcgatcagataacagctaaaaggtggaaaacaggagaccaattgaaaatagtatgcttaccgccaacttgtggaaaaacatatctagccagagaatacccagacaaatttgtagacccggaccaagagttaataaacgagaggaatctgaattggttagatgaaatagatgaaagtgtcaaaaaccaaataatacaagattggataaaggagaataaagagaaaacaaatggtaaaatcgtattattacatgatgagaatcaagtaaaagatagcaaattacaatacgtaaatctgggtaattatgttgccaccgatggaggagatagtggaaatgaggtgagagattactggcatggcgtacagatgaataataaagcctacaagaagaaaactagagttgaaatagaaaaaatcttgttaaacaaacacagactaatgggctgggatatattgaaaaaggtcggaacggttcaaattaattacagcgacggaccatcattatcggaagcactaagcagactgttttcagatctgccagagaaccccatactactaagatgtatgagctaccttatgatgctaggaaaaaccgaagaaacgatgaaaatcaacgtagaaaagaaatggtatctagatctaataaactggtaccagccagtggagtgtaggtcggcaaacgctgattat

SEQ ID NO: 843 - DNA, 10290 bp, Alternaria brassicicola betaendornavirus 1
  source 1..10290: mol_type = other DNA
gaattataaaacgaatcaaatactatcaattttaaaaaacaacacaaacaaaatggagggccaacgaattaacatcaacaacatagaatcgggtgtgagagcacccgattctgagtttccccgaactcacaacaacaacggggaaaacaaaaatgggggacaatttgtgccccatagatctaccgctatcgagatagagaggagatcagcagatgggccagctttgggctactgggccccttcatttacacgatccactgggccgagcccgtcggagatcattagcccggtggtgcccatgatcgacaactctttcgagagtaatcgacgcatgcgggacctagatgagttgctacagccgaattggaacaatgctgagggcctgttccttgtcgttgaaagcacctcaagcaggctgttgcttatggagagcggcggggcgattgaacgtctgagctcacaagctcgtactagaagcataacaatcggccgtgccgacgtcgaattatcgccaaggcgacagaggttgctagccgcacatgtcatcagccccatggcttttgactttagtagtcttatggctatgagccgcagccctgtcaacacagccgaaacaacgccagtcacatgctcgccggccgctgtgcgaagcaagagctttgtaaagcttcaagaggatgccaaagcatttgcagggatgcttaaggacataactgtcaatcgcaagcatctgaagacgctatcaagtcaggctggaattgacttgacgtcgtctcgcaatcgcatgacgtatatggcatggatggaacagacgaccggctcgtttgcacatataacgaacggcatgaaacacattggtggcgagaacatcgaccacttggttcgttcattcctttgcggcttcgtgcaaccactatcaacgtttagcacagcatgggttgtgcgtgcttgctacgacaaactagacccgagaatgggcttcaacgttaaacccctaaccaaggcggagatgctgctcgtcgctcaaagagaaactgggacaacaaagttcaggtgcaagatcagcctattccaacactggatcaatgggacaatgtacgtgggggctcatgttgaggaaggcgatgatgaggtcgatttaatcgacttccacttcgatttcatatttggaaagtcgaacgacattgagaaagtgttgaagaaccacataataggtgacgttgccacagcgatcaagacgcagcaggtgcgcggcaacttagatttacacaacagcaaagttatcaaccagctcgtcaaggcgaacgctatgcgtgattaccaaataccatccaacaccagtgatgccatagtagacgcactgtcgctggcgtggcccaaccgaacatttatcaaaagtagtaacaaagcggacaatgggcacgcttatcacgcggcgaacagggacttggtaagagagaacctagtcatgaggttcccgaagagcggcctagttgtggacataggtggtgcatatagcagccacattagaagtggcttctggaacgtgcatagctgcttcccggttttagatgagaatgatgccaagaggaaaatggaaaacgacacaggaatcaaaaattacatacatgacacagaaactatgatgcaatcaagcaaaagcgttgtcagcgcagacaggagggaggccgttgccagaataaaatcaggcaagcacgcttattggtgccactcgaaagcgcaaaattgtggcatggttgacaagtcgggaacctcttttggcgtgagcatcgacacacttttttatatgaagcctgaggacatggtggccgtcatgaaggcgcacaacataatttacggcctgcatgcaataatagttcctccgacattcatgtatgaaacaagtggaaagttggctttcaacgaaggccaatggcggataagcaaaggcacatttgaaatggtcaccaatggttgcagcggcgcttaccacagctccgcggcagtcatgaaaacgtggttgactacgcccctgtttgtgggcgagggttttggcttgtacgtgaggaacgaagggtacatggggtctcacatgctcctcaagatcatgagggtgccatacggaactatcatgcaacacatggtcaggcactgcctttggttgacgggcaacccagatgagcagatctataacatcccaattatagatccggaaaagccggtgacgttgctttggaaacaaccgttcaccatcgaacggctatgcgtcaactctacgatgctcagcatgctaaaaggcagactgagtatggacgaatgtaattgggaccaactatctatatacgcacgtgggttgcgccatcaagtttacaccagccaaacaggccgggtcatgcaatttaacatgagcgaagaggagtgccgctttcacatgatcttagccatgatggagcaccacaagctcatgaggcaaatcagcccattgattccacacgttgagaacatcgggagcaagggcaattggtggacacaggcatttaaggtcataaagaacatgctaatcaaaatgggccggacattcgatccaactgatgatgaatacctgtcaaaggtcatgaaagagcataacactttagacgagtataagatgagtcacgtgactgtatcagaagtgttgaaggatgtaagcatgtacacgtcgggcatgcagtccatgagcaagcaaaacaatgcggccatcagttaccacggccaaaatcgaatcaacgcgacgtgggtgagtaagctgttggactcaccagaaacgaatttcaacaatccgaacggcgccaaagtgcacgcgcactaccatagtaaattcaaaaccgaccaagcgacgcagtgcaaaccgcaactgggctgcccacacgaccacaggggaatgcacgagcatgacatagggagagaagaagcgaagcgaggcaattgtttatgttgcggcatccttagtccgcttttcgccaacttgtgcgaggtgtgtcgtacgatagagaaatgtcataacacaagcagcacgtgcaaacaccagcataactttgtcaacgaacattgttgcggtgctagtgattgccagtgcgtcagaaacacggtatgcatctgttgtgggaaacggtcactgtccagcccgtgtttgctgtgcgatgattaccaaccacacgaggaagctgactctataaactatagggaacaaatcaaacaggcaggcgccgagatattccaaaacgccaaagcaacgactatcaagaccatgtcgcaacatagccgacccattagcgattgggcagagcacgtcgaagaaatggaagagatggaacgagaaccggaaatcatgatcgaaaccacggttcagggcggtataatgacggaagatgccacgaaaacagatagggtgaggctgttgacattggcggagccgcttgaggccacagtcaccaacatacacggcgttcacgtcgtgaaatatgtggacacgcccgatgatggcacttgtggtttcacggcgctcgagcagctgccatacccaagcaagctaaacatggccgaccttcaaaggattagccacagagacgattggtggagcggcaacgacttgggtatgttctgcgtaagccaaggagtgaacttactcgtggttggaacaagtacgtccgcatattatcaaggcgacacgaagtcaaaccaatacggcgctatagttcacatgaccactatatccggcgaagtgcattggaacgcatgtgaagcgcgtatcatgagtgttaatgcagacggcgaccgagatttagatagacgcaacataataggaagcaccgccaaagaccgaacaggcaaagaaatcgacgaaatggacgtcgtgtctagagaagaattcgtgaccaatctgttggccgaaaaacaatggctatcaacgttcccagcctcaacagagctaaacaggctgatgagaactaaattagttaatgggatgctggaagcggaatcagagacgatcggattccattcaacgaatggtatgaactcgaccaagcggttcacggctgatgcgggagtcgagaaaggcctgcccatttacataacggacaacaggatcccgatgaatgggtctgataaaccgaccttcgtgaaatcagttagcagttgtgacgacgtcatgtcatttatgagccccggtgttaaattttatttctacggatttgagatgccgactccgacaaatgccgcttacatcgtgccagatgacgaaatccaaggcctacaagggataaacaacacggtagtgaacaacacaaaaaacgtcagcgagaaccaaacgtgcactcttgagctgttcgaactacaatcatgccccgcaacagtcgtgctgggaatggcccgtgcccataggaggatagatttcaacgagccaaacgccatcggcttagataggaaacggccaaattggaaaacatttgttgacattgccataagtgcacgcaaccttggcgttaaagaagtttacttgcctatgctggatgacgatttcgacgtcgacgaatttgacgcacttgtgctcagcatgctaaacggtcgaagtttgccacatcaaatcaaagaaaaacgaggcaaggcggtgccaaagatggttgtgcaaccattggcaaggaaagccttgaaccatttgatcaataacgctgggttcgctgacgtggatatggacatactaaatttcgtcaagcgcgagtcagtaggcatgagcaaagctagcggcaaattcatgaagatagtgaactgcggcagctgtgggctacgaatgctgaaaataacaggaacagaatgtagcagttgtgggccaacgtttaatatgaaagtaagtgatgcgttcagcgagggtgaattcatcatcatgcccagcaaagtgggggtggacaaaaccagcaattatttgaatggtaattggccatgcacagcagacccagttaggctgaatggggcatgcatggattattggcgcgaacaataccaaatgggaaccaacagcatgattgaggccaccatgacggtgcacgaaaacgattcgtaccacaagaagtcatgtgtagtgggatcatgtcacgtgaaaaacggccaactaaccatacgcgcaaacgacataaaagagtgcagcgcgtacgagccttttgtggtgcaaacagacaagacttggtcgtgggcattcagcatgcccgacggtaccattgcaacagctgctcgcctcgacaatgggccagtgcgggttatagggtctcaggacaacatagggtactgcttggtgatggcctgcaacttcgactccgggaggggttgcgtaactgaggaattaaaccagatggtcaagggggcaaaagcgttcgtcggcgtgcctggaggcgggaaaacaaggggtgccaaaatcgcctaccccaaggccacgatagtgacgaaacaagccggcatgttaaagacctttcgagccgagggacgtgatgctgtcaccccagcccaattgatagcacgcaaaacacccaccgactgcgtcattctagacgaagcgggcctgtgcaactatactgatctttggccaatggttgggaaggtcaaccaactgatcataacagcagatataaaccaaaacaacacatcattgatggccagtaatgtattgacgggtgatcacacttcgtggttaagtggagtccaaattgaacaagaattttttaagagctatcgatttggacccaaaactgcgcaatggctgaaacgattcaacccgaggatagaaggcgtgaactcaaacgataaaggaataacatgggtccacacaactgccaaacgagttgaagaccagctaaaagagctggtcggccgcaacgtggatgtcgtcttagtgcccactaacgcggacaagctaaaactgaggaagataaccaacatcaagatcgagaccatgaagaggtttcaaggccagcaagcagacagaattggggtgttcgtgacaaaattcaatccagcattgacgagcacgaaagcaatgtacacatgcctaagcaggcacaagactgaatgcatagttgtgaccgggccacaaactgccagcctcagcagctacatgttcggccaaaatctcgaccaggttgcagggtccgtcagtagactggcgtttgaaagatttttgaacttacccgggccaatagtgttcataatcaaacttggagcaaaaatcacatgggccatacaagggctgctacgagcattggcacgaagtgcgcaacacagctaccaggccttaaagcgcataatgagcgaattgtggccgcaaagcgctgacatcgatgacgatttgctatacgactatgagttggagcgtgttttaagccaggaatcgaggctaatgagccaagcagacgacgaagagcacgatggatcccaattcgggcctgggccgacgattcgagatgacgcaaccagcgtcgcgccgagtgacattgaactcaacgtgattgatccgactcctgagttggagcaagaagagttcaaggactcgaggacagaggaatacgcacaaatgtcagccagaggcttgttcttatcaccagatcagctgccgcgacacacaactcccaaggacttgagtgacgacgtgggaggtgccaaagtggcggaatggtatacgaaaacgtatttatggtcaaaggatcaaacccgacaagcaattggcaaggagtcaagattttggaacatggcggattcgtgtgcgaacggggcaacggaagtcatgacgtggatcgaagacctggtaatgacggtgtgggacgggttggtaagatttgtcggcatgatgttgcagcgaactggtcgagcactgaaaacaatccggcggtggttcgcaaacgtgttaagcagtgaaagtcgaaagagcgaagaagcagcatgggaggcagcgaaaaaggaggctgagcataataggtttgagagggtgccagaaaccattgctataagtacggcgtctgacatcggccagatgcaacacgaggcagggtcatacaagaagcggcggcccatgccaacgaaagacaagtggttgaaagaggaggccggttcagttgcctcaacgagaaatccaagcagcaaaggccaggcaagcccgacaagcgtgaagagcttggttcagaatattgagaaagggcgtgtcggccgcaccagaaagtcgagcaaagttttaaacgaagcattagccgcttccagcgaaacacgcatggaagcagagaaccagttgtttattaaaataggcgaaaagaaagctggccgcatgatcgagatgaactgggacttactccaaaacttcgactttgaagtcagctgggaagcattttgcaaggaatgggatgccgatccatcatgcacgactttctcaaagcactcaagcatgtttaaaggcaagataaacgccgccaagcatgaagaccacgattacgaaagcattataataatgacatttagcaaacacattgtcgccctaatcgtgaagctggaccagacgtttgtgtactgtcacgacgtacaaacagcccagaatagtgatagcgtcgacgaagtgctcacatcattaatggaagaccgagccggggccaagtctgtcatgtctatgatttatgctgccctgtggggccgtatgaagataagaataatttattggcaatggtatttgcgcacatggtttgatttttcatacaaagccatgataagcgaaaaaatcgagcttgacggggctttgaacttgcacgaatgggctgctaaaaacagctatttgacaatattgaaggctaagaaaagggtaacggttaccataagtggaaccgacgccctgatattgttgaacggtcaagggcttagcggaacaaagggagcgcgaccaatacacctgatacgtctgcgaagggggtcaacggtgaacgaagtccttgtcgaggaaataggtgacgttagaacttctgattatgttagagatacagtcaaaaaattgctttacccaagttacttcagaagacatgcccgagcacggtccaacgcgtcgttcggaggagcagtcgatatactgggaaaatactggtcaaggctattaggagccaggagtggcaatcccgtgcagttatctgaaacatggaacgaaataaaacacaacctgccgctcatggtaggtcaagagcatcaaaatagtgtaaaacaagggagaaaatacaaggcataccacaccatacgcgacactaataacctgatagacatcgacccggtgacagcaaggggcctggtagcatgctgcattccaagtggagctggcaaaaccactttatgcactaaggagcctgataaataccaagatattgatgacctcatgaccacagaagactttgctgacataaatgacatcaatttgaatgaaggaatgtttttggtcacaaaaaggtacagatcaaaagttcaagagtggatcatcaataggcccacgaagaggatcttgctatgccaccacccagagcaggttgaaggcttgattaacaacgttctcgtagtaataccaaagtgggatctcgggaaagcatggagcgacgtgaacaaccaaaggctgatcaagtgcacaggagagaaaatcggcccgtcaaaccatgatgaaatggagacgatgatagatttgtgggcggaaacacggctacgcctgtcattgagaatgggaacgtacgacagcaacgaaccaaacgccacggcgatcgattggtttctgaacaccgaccagaccgcgtacaacgagattaagctacccacaaacggttcgacgaaatcacgcctgcctgtgtacgacaacgtgaagcagcatgttacggtgattggccacgcaccacctgttaccagaccggtcatagtgaagtacatcaatcaactgtacaactcgatcacgacgcgcatccacggagaagtatcatacagaaaacaagtggttgatccagtggagaattttgaacgagtcgccaaaacattctttaagccagggtgggaagccatggtcgaggaatttgttgaaaacccagtgctgccaggatacaaattgaccgaagaatggctgagcatgaagggcgatccagaaccgacaatgaaagaaataaagttcaacatcttggacgactttaatcgcatgccgtacaacaaatgcaaactgcatttaaagtcggaaacgcttttaaaagagcaggttgacaggtttgaagaccaaatcggtagagtgatcgtgtggcaccccaaaccgttctgtgcagtgttatgtccggtgatcaacttgatgaaagagcgatttaagttgcttcttgacaaagaaaaaatagtgtacactgacggctgcgacatgaacgagattcagttccacgttcaggacctgcatccagacaaagtcatcgagatggatttgaaaaaacaagacaggcaaactgacatgcacgagcttgagaatgaattcgttttaatgacagccctgggttttccttcttatctaatgccgctgtggcgcgcttacaacgaaaattggcgttacaaagcctcggatatgacggagagctggcaggttgggaaaaggaaaaccggggacgaaatgacctcactaggcaacacgttcaaaaacatgagcggaatcgccgagccgtttgtgaggtataacacagaaagggttcttattttgagcgatgacatgatagcgtttgggagaaccgattgggaccaaaggtgggttgaggatcacttaagagacaaattcaatgtgcaatgtgaatgggctggcgggaaaagcggaaaattttgtcagctagtcgtcagccctgttcgaggttttggattcatcgtggctgcagatataaaacgattagccgacaagttcagagttgttaagagctcattaaccagggaagatgaagactgggacgctaggtgctacagttacttaagcctgatagggccttgtgatgctaccaacatcacagccagcaaaatgaacttgccgagaccggttcaatgggcaaggtcgtggggcctgaggttgcaagcgaacgccgaataccataaagtcactggtgaggagttggacagagacgtaaacgccttgtgccacaacatgatgtatagcggtttggaaaaacggaccttcaacgtgttgggcactcataagttcaaaaccaagtgaatgttgttgatgttggaggagggggcccccccccc

SEQ ID NO: 844 - DNA, 17181 bp, Betaendornavirus sp.
  source 1..17181: mol_type = other DNA
taatgggttgtgaaaccactctatgatgagagtggaacaaataaaatttaaaaatttaaagtctgaaatataaccagccatgcagcaccacaaccagctcaccaaactcactatgaacgccaactccaaccagaatgaaacagctaaaattaatactttaaattacccaccgcaaggtgggcaatttcatgaggagtcgcatgaaattgaaacaaacattaacaattcggctccaattgctgcagcaatcggaacaagcatgcccatcatggcatgccctgtttcagaagccctggctaaaccccaggatctcgccaaaacgtttggcgatgctgacagcacagaaattggaattttaaagaattccacaatggccaatgacactttaccagtggataggctgcagttcacctctagtgaaccagtgacatacgtcaaacacttccgtcaagccagtgatgaacataaggcaaaatttggtgaatttaaaataaataaagttaaagggtcaataacaaaaatcttaagcaaaccaaaaccagaagtaccaacaataccaaacgtggttgatgccaaaacggtgattggtggggagggtgactgttggaacaaacttagattctatgaccaatggcaaaaacaaattaaactagggaaaacaaaaatgaacctagaggcggcagcagcgttagcagctaccacactcaaagctgatggccctgctcacagcttgattttgtcaaacatgcagctacaagaacaaattaatgagattaaaaacaaactaccacacacattgtgtggaattatatccaaaacttttgatgctggctgcttttatgaaactcctgaatcaaagtcagccaagttctttagtgatggttactctgattatttctacatcaaaattaactacataaacaatgtatattgccatttggaagattgcacagtggacacaaatccagctaataaagccatgtacatcaatgacgggtatgagaccttaactgacataaatgaccggttatttgacataccagttgaaattgaaccatggaccactccaatgtcaaccccaccagcaccatacacgctggttccaggttatgacaagcttaacattgggcagaaatcgttagcacgagtagcttataacaaacaggaagctgctaagctgggcataagcgtcgctgagtaccaagcgcgtttagctaatgcacaattgcttgaacattataacaacttgaaatcacaatatgaagaattcaagacaatatattctaagacactattagaaagtagtgttacatcaggtgacgaccttgaattagtagcaaatgatgacgagtttaaacggtacattactgacctgaatgggcgcaagcgactgcaaacggtaactccagcaccaattgttaaggtgcttgaaactttagtgcaaaagggtggggaggacacgaacaaaacgccaagtgatcaagagcctaaaataaatcaaacaatagaagataaaggtgtgctgactcctgacccaaatcaactgatgcaggaatgctctgacatgcttatcggtgtgaacttcggcaactcgcttaaatcaaaacttgcgtcagcaattggcatgactgccaagcaacttgagaacgtgagtgagcactcaaatgtaattattaagaaagataatgacttaatagcaaaagcgtacgtcaaatcaaagtatgcaacaatcctattgccgcataacacgagtgagaaaacaatgatacggttgcaagatgagtttggtgagtttgacattatacctggtcgcagtgaataccatcaacatccatatcattcaacttcacgcaagtgcataacgttattaattacaaggcagttcccttcaaacacaccagtatttgacattggtggtaatttcccagtacacttaagctttggtcattataatgtccactcatgtttccgcactaacaacccttatgaaactgcaggttacattgaccgggttgtgcgtttagcaaaggctgttgcaaccaaatattcaaactacaaagagttccaaaaccaacaaaataaaactgtcacatccacggaggaatcggacaacttacagttagccaatgaaaattcatacatcatggtgaacaacttactaacttcacacgcgtacttctgcgacaagccagcacaagactgtcacgcggcacctaagcgaggcattagctttggcatgtcgattgacaccctgttttatgtcaaaccacatgaattgggagtaatatatgctaagaaacggattattaaagccactcatgctctactagtgcctccagggtttgaattgctcaatggcggcaagcttgctgaaggtgaaggttcatggaaaaaggtcgataacatgctttatacaacttttaacggtgtttcccagccttacatcaatgatattgagacactcagcttttatttgtacacgccaataatcagttatggtaagttcatagtttactgcaaaattgactgcagcatagggtcatatgtcttgatcaaccatttcatcatgccatttgagaagttgtcaaaggcttacaacgaagtctgcctgcacacgacattcattcctggcaaagttgtgatgaatgtcccagtcatagatgtgcacagccccatctcattggctggccgccaaccatttaaaatgaacccaatgcttattgacatcaaattcattgaagaactcaaaaaccggttgtctttgccaggtgctgactggaacgatttaatcacttttgcgggcaacttaattggcacagtccattggacgagtgcaggctcaaacaagaaatgggacctaacttcaactgaggtcaaaaaccatgcaatacttgcttacttattttacaacagagaaatggaaggtttccgacctttaattgacctagctggaaggcaagtgcattgggataagtggcacattcatgttttaaattccattaagaacacattgaccagtatagtgaaagatttggaccccacagcgtcacaaatgctaaatgacttcatttcatcaatgtcaaaggatgaaatggaaccaacgaaagttacatcagagatgttagacacctacaaacaaatggacgcacagctcaatgtgtcagacaacacgagcatagcattgagcaacttagttgaatacaatttgacaaactgtcccacatcaccagacatcaacactctcattgaaaacctgcacctaaagtaccatgatgggaaaaacgtgacagtgcacgtgaataagatgttggaaacggcacttgatatacgcccattgctatgcaacaagttgccagagtgccctcatgatcatttgatgccacatttgcacaggtttaatgtggctgaatatgaattaaacccatgctcatgttgtggcattgattcagataccacaagctcattgtgttatctatgccgcaccgattggccctgcaggaatgcagctgaatcatgcaaacacacccacaaaaacttgagtgaacactgctgtggcgtgccatcatgtaaacatggtatggcccatcgtaacaagacttgtagctgttgtaacatagccagcagacatgatccctgttatgcatgtttagaggaacaatcagatgatagttctagtagcagctctgaggccagcaactataacattaatcaaccacatgatgatgaatctgatagtgctagcacgacgactgatgtctttgatacaaaacctaaaccaactgtcaataagcacgagcctaaaactgggccaaaagtataccgcaatcctgatggtgtcaaagtcagatcagtcgtcgcaccctgtgtgacagcattaggtgggcacgtccattcttgtggtttgtgcggtaaacaatattggcacgaccacaagttcaaacatgataaacatcctgagttcgtgggtgattgcccacactgcgagaattcagcaaagagcaaaccttggccatttgaaccaaaagttgaaaaggataacaccgttgtgaatgaaccatcagacgcaacccaaacccaaccccgtggcatctctaaaaacatcaaagatgattaccatgtgcatacctgcaaagagtgtggtgagtactattaccattcacattactacactaaggatgatcatcacatcatacagggtgaatgcccatattgctcaaaccaagatatcgatggaatcaaaggaagcaaatttgatgtgagtatttcaagtaaaagcatatcgaaggtgactagaggttatcactcccacacatgtggccactgcaagttaaattacattcatgcacatgatgaatattataaaagtgagcatcagcataacattgatcactgcccattctgcacaaaacaaccaacacctctgcaccacataacgttactgcctgaagacacatacaatgaagtttataagtccgtaagaaacttgtgtctactattagggcaacaaagtaatacaatggaaatgatgatcacgctccataaagcatcatttggtgaaataattgcagacagttattatctgagctcaacataccacgtctatcacaatgaattcgtgaacaggaatcctatgctcaaagacttaagtggcgtaataatcaagatattcaacaccgttgacgccgcaccacttgacgttgaattagatatggaacggatcaccacaacaaatataatgaataatcaattcctaacgtcatatggcatcaggacgaataaattagatccagcgcaagtcggtactaacataacaaaaccctggcgtataaagcaccaactgcctttgtttgatccaaacacatatgaaccaccggcgctgccagtagcacctgtgggggatgagacaaatgaatgggctgcagaggttgttgaaactaacagcaacaaaatagaagccatgagcgtaaatgtgaatcgggaccccattgttggaagtgaaagtggtttgatggagcagagcactatcccagcgactctaaccagaacggttgctactacaccaaccaaatcacagacaatggatgaagaagcacaacaaacactagaacaagcaagcaatgttgatgatggtgtggttgacacaactgaaaatgaaaaccaagaggagcctgaacatgatggtagcactgttagtgatgatgatgacgattatgacacatggcgtgaacacgagcgtgataatgaaacagattatgatgtgttacccggcataactatgagtttagggttcactcatatggagcccacgctaacgaaactcaaagtgacacccacaagtgcagtggaagatgtgttcaggagcaaatggtttggttacaaagacaacacagggcaaggtgactgtgggctgttggctctggcacatgtgttcggtgatgaactcatccaaagttatagacattgtcttaacaaagagcaaagtgagtggtggggcatggaggaatttgtcatgttctgtaacatttgccatgtcaacttactgttggcaattgatcattacaaagtggtcctcatctgtggcgacaaacaatcagtttcacacggatcaatcatccggacgaaactgtttggcggtgaagaccactgggtggcggcaacagctgatataattgagttgaatgccaaccaaacatttgcacagataaacagaaccctaatgaaaacaaatatgctcttgatgacaaacaatgaaattaaaaccaaactaacgggaatcagtgaacaagtggtgcaacatcacattaattgtttcaaacactctgacaaactcgaattggcagttcgactgggtggcgtaatcaattctgaaggattagtgcacaattcatccaagttttcaacaaaattgcaagattatatcaagaaggatggcaaactcacaatcttcaaacacccaacaggctggggcaaaacgacaagtctgccaacacacttcaaaggaaaagacatcacgttgctcacaccatcaaggtcaacgattattgggtcgtatgaatatattggtcggacttacaatgtttcagtaactggcagagctcatgctaaagactttggttatccttcagttaaatataagcaagttgagtactcaaccaaagaaggcactaaaaccaaggctgtcctacaacttgggcagtaccacatggttacagttgatagtgcttatgaggcgctacaacatggttacccacaatatcttaaccgtcttgtgttcctggatgagctacatgctatgtcccctaaatattactatgttgtgagcaagctgaaatcagtgtatgctgtcatgagtgcaacaatagacaaacacctttcaacggacacaaagtaccctgttgaaacaaaaatcgttaacaacccatcagattacatcactggtaatgacggtgagttcacagtggttaaaggccagcgggatgggtcattcctgacacggcaataccatgatgaagatgacccctacacatacatttcagggaaaatgataagccaaatagacctcaatactgtacgcagaggttgtgtgactaatgctgtgacaactggtacaacaatcccaaatgccaaagtttggattgacatcggtgaaaggtacacaattgacattaacgtgctggcatcatataatgtgtcaaatgcattaaactggttttcggttgtcacttacacttatgacattaatgagatgatgcaaagtaggggtagggtaggcagaacacaagatggcatcttcattggtcaaatgccagtcaacgacaaaccattaacactcacatcagtcattgagtactgtgctatcaacaaagtgatagcactgccacgtgatagacacctagatgttataactgtgggcaaagccaaaatggaactaccaaccgacaaagatgaattaattgaagcattgcgcaacaaagacctagataatgttgatgaggaatccatagcagctcaggttgaagcaggagagattacacaaaaagagatggacatgatattagagttgaacattgaaggcaaagcaaaagatattgaaatggcaacccgctttgcagaatatttgttgccccgtatcaaattagttagtgatctgattgataaggcaagtaaaatcaacaatgaagtggtggattacaacatgactaatagtaaactgacgagagacgctattggaatgttaacaaatgttaaaccaggtgctaaagttaagcatggtactactaaaccaatcatccgcagtgttaaggcaggagcaaacattttcacccgacaatgcgacaagtgcaagaatttgacaattgacattcaacaagaatgctacacctgcagattcagtgccagcaccgaatcaaaattcttgaagaagtacaaattacactcagccaacatcatgaacccattagcattggcaaaaacaactctaatgagccatgacgtgcctaaaacccaagatgaggccgcgaggctagatgaaatatgctttgtgaacaccttgaacacattgtacatgtcattgaattcatgtagaatggcctcactcaactggaccaatgccgacgcagggtatggacaaagctgccatttgataccaataagcagtgacggatcagggcatttcttggtcaatgtgccaaagattaaaactttacaacatggtgaaataggtgttatttattcagaagtcgggtcaagaatgtctttagcacactacactggaaaagtgggtggtaagcacgacttctcaacccaccctaacattaaaggaattatggcgctatacaaatattccaatgcacataccttacccacactagaaatgctcgataaaagacaagtgcctaatgttgataggtacaataaacgtctcaaaatgatgaagatatatagtggggttgctggttctggcaaaacgtggcacatggaaaatgagaaaacaacagaaaaattgagcattgttactgttcaatcaggaatgtatgaacggttcaaaaaacggtactcaacgcctagacatctcatgactggcatgtatgacaagccaatgttcctaatagatgagtttgggctcatttcaaatactgacttgtggatgatgagcaatgacaaagtgtgcatggctgctgctggcgatttgaatcaaatactaccatccgaagaagaagctggcatcattccaggccaacacttttcaaccatgggacaagttgtgtatgatggtaaaatatcaaaacgcatcggtgaaaagagtgcaaagtcaataactaaagtgtacccaaatttcaaatcagaggggccaaaaccatttgatgaaggaatcaccgtcattaacataggagcattaaacaaagacaatttcattggggcagtcaatggcaagcgtgttgacacaatactgacaatgaatacacaatcagttgtcatggtcaatggttggttgagcacgaaatcagacgcaacgaacatcaacatcaccagtgtgagacggtcacagggttcagagtggccgcatgtggttgtgttgtgtgatggaacacatgttggtgatcttaagaaaatattgtatgtagcgatgacacgacacacacattcatgcactctgatttgtaatgattttgccacaacacaagtggccagtattggcttgacgaacacaagaggattaacaatggcaagccggattaaatcacaaattaaagttaaagagcgacaatcagctggttcaagctctactgacatagcagaattggttcacttgccattttatgaagagagagggccatactatgatgagatccagttcaacagagctttgaacacacccataccagatgatgaaatcttaacacaggaagcgccgccagcagctgccacaccgaaacgtggggcaaaattggttacagattggtacaaaaatattgtgctccaatacaaatcgtacgcgcggaaacatccacacataatcatcaatttcaagcgtcatgaggacactgaaaggaattggagttatgggcaatggcattacaacagcggtgaccaaccaaatgttgaaccaaccagagcgtttgatctagtacacggtgaaataagtgaatggtcaggaatgtcaatgcaagaccatgatcgcttgatagcaatgagtgagataaggcagttaagctcttcaaatataatggccaacctgttaaaacctttcatgaacaaaagaattgactatgatccattaacttttgtgcgattcaatccacgtggttgccgccagctaagtatgtcaagtgtaacagcgcaggaaataatcatgctagcgatgtcagacggcccgattgaccattctgacgttgccatcagtgcatgcttgaaaaatgttcaaacactaaggttgttgggtctcattgattcaatcacagccttaacggtgctatcattcaacctaatggcttgtggcatcattataagcgtcatggatgttgataagttgatgatgatagacacatttgattacaagctcacagataatgagaggctccaaagcaagcgcgttcatattgaaatggactttacacaattcatgttaaacggcaccttgttcaaaactatgttggagcgtgaaggacataatacttatatgaggtactgtggcatgatatatgaatttattaatgttgagacaaccaaggggagaacagttgactcaccgcatggtacccagggtgaattttcaacaaggaacgcccagctgttcaacttcacggtaaaagcgacgaccgaaggtttcgtcgactccaacttgaatttatatgatgagcgattcttattgcgatttattgcacaagctagcgatgacatatgtaaattaacaaagatgggttatgacaatttgattcagtacactgtggaactgggtcacagatcagtggacttgctgagaagattggcaacacatgcagctaaagtgttcaggtttataattcatggcataagtagctcacaaacatacctaaggaagttcataaatagcattaagagaatgtatcagcggtctgccatgatattaacaagtttaaaccatgacaaaaaccttgaatcaaatttggaagccatgagcaatgatttggaacagaatcacctccacactgatatgtgtgaaaatgtgcatgagatcgacaacaaggactacttgtatgtgttaaatgaagatggcaccaagacgaaacatgcaatgagtgttgaagtggcactaaattccgatttcacttgcaccagaacaaccaacattttggcgcttttaatattaggtgatctaagctatgataagttggactcccatgataaactactgattgacaaattgattcaaatcatgttcgcaaaccttaatagctgcacagtaaacgagtcttggcagccaattgttgatgctaatagtgataaattattggaaaacgttggctggttgtctgacttgagcaaacttgcaccagccttaggtgaggagtcgagccacgcactgactgagaaaatcattaacaacctcaatgagatgaatgttacatttgcagaaacgcaactaatgtccaccactgacttattctcaattaataacttcatgtacatttatagctcactaccatcagagtttttcctaaacatcaatgatgaaaatctggtcaggttacatgaaaaatatacaaagtgcatgataaccaataatttgtacaatccttatgaatcaatgtgtgaaacaaccacattgctgactgatgaggaaattacagacatgaacgttaaattatcactgatagttaacatgaaacgagacattaatcaagggtcaattgcacggttccatgtggatatggggcaaattgatggaatctatgaagaattaatgacatgtggtcaagctaacccaaatcagtttatcaaattcaacacactatcaagactcttaacaaagctgaagtcatattgcaacaatagtgaactacaaatggttttgactaaatgtaaactaaagtttggcaatgccctaggcatgctagctggttgcattcaatatgtgtggggtggcaaggagcatgtcatcaaacatttaacaaatgtatttaaaaccaaaccacacgcactggtagtgttgttcaacgccatgtgtgacgcaataataacgagtgcaaacaatgctttgaccataatcactaaagcattgaaacagataggaaagttaaaagtgagcgccttgagtttcttagacttcgcactgctcacgaatgaaaccatggcaaccgagtttacaggattaaatgttaaggagtacaaagacacgatattaatgaaacagctcatggttacagactgtgacatggacgtgtacaatgagaacttaaattacattaatagcctatgtgatattgttggagtaacaatcggcatacgtaggcatgttgctgttagtcgcatgttgaacaaattgggattcaactcccaaactataagcgacataagagaaggtctgggcaaattacaccattggtgcattgaaaacgatgatccacaattaaaatcaaatgaccaacatgaaccaatcatacaaatgtccaacctatacatgtatgcaaatgaacctaattcaaaaaagatagaatgcctagtatcaacgttaatgtctgacgacattgaaaatgacttcatgggacatgagattgaattgaatttcatcgcaactcacaagcaatttatggatataaacagtggtctggacgctagcatggcatgctatgatgattttgtgaacttcattaaatcaaaaccatacttgaccgtcatgcgttggattggggtgaattcagcaaagctgatgtcatggctcaaggaggctgccaaatacacatccaacaaaattggaaaactcttagtatggctcatagaaaacaccagatcatgggtgaacaatatgcagtcagcaatacaattggtttacaaattccttaaagctgatgatagtgaaatggaccagtttgagttgcaagacatgttcccaccaagtgctgggatgtcacaagctaggccatattatgaagatgagttgtttacaggtgatagtagtgacaatgaatcggacaccacggtggatgaaaattcatccagtggtgcaaaaatcaacacaaactcaggcacagtagtgtataaacaaatcaaagagttcctgttgaccattgccacggttgtgttgagaggatgcaaagccgccatacgaaccttaacgaattacatcaagagtgggttcatgtgtttgagggacacagtcatggattatgcgagaaatgccatgaaccaggtgaaacatgatggtagtaattggttgtgtcgagtcacaggcaatgctgacagcttagcaggttgtcgatgcatcattgaatcaccaaaaggaacatacttaagcaacactatagaaaagtgtccccatttcatacgcattaactgggatggtgatctggatgttggattgatgtgcaataaggtgcatgcaagcgcacattacttcaaagaactaattaagaacgtaaacacacatgaaacaactggtaatttaataatgaatgacaaccctataaatcaaaagcggttaaatgaatttgagaaactgtattcagagaacaaaataatattggtaggtggatactacatgcatgatagcgtcaccccagacggtgctaacattgataagggcctgctgaaaatgtgtgatgaattaaagtcagggtacatattcggcagtaatggtcttgtaccaacagatgaaacagcgcaaacaatgacaaggctttggaagttatcaatcaatgattcaatatttaaagcaaatgctgctgaacgggagggcaaagctaaacgtgtttgcggtttagatggcaaccactatgaacccaacacattgcccaaatttaaaataagtgggcagctaacagcgatggatctggcagcagtcaatcagtgtgacaaaattgatgaagttattaacattggcaaacaaacagaaaacatcattacgctgccatcaaagaaaaaacctaacagacatgacatgtttaaagagtacagaaatcattcaactaggaccatggatgacattgtgctaagaaggaatattaaagtcattaacaaccaacccattctgaacaacatcgccaaatccacaaggagaaagtcaaggtcaataatcgataatgccacaagttatgatgagctgctcagcacagccttcatcctgtcaaacactagcagcttgaaactaggaagtgagaaagtgcatgcagtatcacacctgcatgatgtgttcagagtggccgaatcaaatggttatgatttaagcaaatttggtgttgatgcgttcaacagtcttgataaggcgaaacaaataatgaatgacacaactatttataaatacatcagtaatcggctagctcacagacaaaggaaatcacgtagagttggcttcaatgatgtggtacgggtgaggataatcggtgatatagaagatgacttaaataaagaatcagatggggatgagaacacacccagcagcgttgtggtgccggctgggcaacaaactattgaaactgccaaagaaacagcaaacaacaacaacacaccagagaatggcacgacacaagcacaggatgaggtgtacacctctgaccaaatggtcaaggacaatgatcatggtcactcgagtgttgaggctaacagtggcccaaccattcaggaagaacaggagaggcgaggtatcaaggaagaagaaaatagaaacaaaactcaaacgccagacgtaccaagtttgaagttatacaaggaacacaatgtccctaaggaatattggggggccaccaatcctgcaccattgtggactaaacgaggggccacaatggcgttattcaaaggccatgcaggactgagatcagataaactggctaaacatgctattgcacaaaatgatgggtcatatttgtacacttatgacatgttcgggtttaaaggtagagtcaagatgcattttgagaaggtggatggtgtgatccagaaacatggttggatagccatcaatgctgttgatgaggactttatagtggtcattatgcccggggaaggaaataggaaagtgtattgttctaagccagctgggccagtggtcaacagtaacttggaaaacaaactttataaagcattaagcatgggaggtagcatcatgggcatgctgcagaacctcatcaaaacgatttacatcagcttagccaacatggttaagaaagtaaagtgccaaatgcaaagtaaattggctttccgtcaatttggtaaaacagtggtgcagaggccaagcaggtaccactcagtcaaacaagaatttaagaacaataagtggctgaatgaaatgtatcaaacttcaaacaacaagtggcatgatgattatgacatttactttgtcattggcaagggcatgggcaaagacaggtgggtgcatgtagcactcggtaacgatgtaattaccgtggaagtgtcagtgaatgccatgtggatggcattaactcccaaggattctcttgtggtgagaatgattaaaatgtatcgcagaatgggtgagcaagagcgtgaatacgtgcaaattgaccgtgaaacactgcgtgagcttagtatggatgatgataccatagagattgaatcaggtggatcagtgttagatgtgtattataagaagatgaaacaactgtttggcaacaccaccaattctgatgcgcttgaaaccatgaagctaattcgagcaaaccccttgtacaacatgcttaaatcagatgggctcatctcgcataacaaacgtcatgtcaaattgaatgccaacagtgaatatgagcaatactttgagaccaagtttgaacgactggcaggtgtcaacgtaattgcaatatgcataccatcaggtgcgggcaaatcaacgttgtgcgctaaataccctgacctatttattgatattgacactttaatgcgcatggaggattttgctgctgtggaaacggttaaattcaatgatggatgggacatggtgaacaagcggtaccgggaaagactgtggtcatacctagtagcaaaacccaacaacacaaaagtgctattgtgccatggccctgaacaagttattggcattagcaatgaaatatatatcatgattccaaagtgggtgggcaccaaaccattctcagaatcaaatacccaatcacttgagcgcgcctggaaacaccgcagccaatataaggcattaaatgtgacactggataaaatggcagtccgtaggccaattgatcacaatgaaatggaagacatgtgcttaaatgtgcaacgaatgaatggaaccacaagtaaattctccagtgacgtattggggcacttggaaacaaaattggttaataacaatagcaacagcggttatcatgcaacttatgatgccacaaatgtcaacaaatatgtgttaccagttgaagggcatttgacaacacgtacaaattatcactctaggcctgttttgcaacaaatgacactaattgatcgtgagcctgaaacaaaccggttggtcgcaaacaagcaatcaaaccaactattcaatgctatcacatctagattgtatgggataaatcaattgagaaaagtgaatgttgacacggatggctatatggatatgctaaagagagtgtgccatgataactttgatgatatgtgtaaagaatttatggaaaacacaatatcacctgatgaaaatgatatcaatgcctggttagaagtaaaggggcacaagtttaactaccttaaaacctgttatgagtacgctatgagcaagccacatatgttttcgtcaaaattagcaaaagcccacctcaaaactgagaacttgatgaaagaagatgttgagcacatagttgaccagttggcgcgagtaattgtttggcatgaacagcaggtaagcatggtactttgcccagtaataaatagggcaaaggaaagattcaagttgctcttaaatgacaacaaaatgaagtatgctgatggcatgtcaccattacagataaacatggcattaaggaaagtaaagaaaacaagcagcattgttgagctagatttgagtaaacaagacaggcaaactgacaaacaacttctagaatttgaaggtgagttattacttaaacttggagtgaacaacaaatgtgttgaatacctggctgaagccaatgaaggatacatgattaaaacaagagaaaaaatcacagcatatagaccaggcatgagatggacagggggtgaaatgacttcgttgggcaatgaaataagaaactgtgtactactggggcaaattgacatggcaatgccatttgagtttgcactaacacttggtgatgatagcatcattttcactgatagtgaaatggatgaaaagatggttcgcaaaatgggtcgtgattaccataatgttgaagttacatattcaattaaaagtgatagtggcatatttttgcaacacattatcgcttgggtgggtgacaagtactgcttctgttgcaacccactaaggttgctggaacgctacagtattagtgaagatggcatcaatgaaaacctgctaaataaagccagttcatatttgaacatgttaggccactcaaccaaaacagcaatggtggcagagaagataggttgtgatgaacccagtagcaatggcataagtcaagcagatgccctgcaggcacagagcatgtatttaaacataacactgaatcaagtacatgacataattgatcaactgttacactcaatgattaaaccaaaattccgcaccatgggaatcatggtatggtcacaacgccagtattatagcaaatttgacatgaataatgtggcgcacaatgatacaaaccgtggatggacatacagcaatgagtatgagaaactaatggaagtaaagcgtaatgcgcacactgagtggccgcttcttggccattttgcactgtaaagtgcacacaactagttaatgggttgtgaaaccactctatgatgagagtgggacaaataaaatttaaaaatttaaagtca

SEQ ID NO: 845 - DNA, 11557 bp, Botrytis cinerea betaendornavirus 1
  source 1..11557: mol_type = other DNA
tataattaactactacctacaatcaatctatcactaaccacaccaatcaaccatgtcttaccaaaccgctgccacaaattcaaacaacaacaagaggagtctcggcctcctccctaaatatatgccgagaaaaaatatgtcgcgttctgatgatttcatcaatatggatagcgacatttatactatgaccaatagtatgacatccagatacaatcagcccaagatatcgaaacttagcacttctctgagaataatgagagaagatgtatatgggccacttggtgcaattagtaccagaaggaaccatgtgtataaagatttgatatgccataaatgtcttgataaacacaacaaaacatgttcggatgaagatgggctaacttacagtaactacgtaaaatacaaaaatgatattaaaagccgcaaaacaattggtgggtttatctacaagtcttatttccacttgaaactcgattgtgaaatcattggtaactataagcctgtctttccctatttgcacgaactcatagaaactagtgtatcatttgttgcacttatcaacctaattgagccggaagaaattgccgaacctgttactgatccggtcgttggtggggacggttactgttggaaaaaaatcttcccattctcaaactatggtaagttcatgacctacgctcattttaagcaacagttagaattcaagtacaatggagtctttaagatgtatgtgttactgattatgactgaagatggtaatttgcatcttgaggatgtacaaagctttggttttggaaaagacgagtatttgggtcctgatttagctcgcggtgcagaaacagcgatcggcaaagcagcacctccatcagcttgggtacatgtgtgcaaactgccagaatcgcatactgatttaccttgctggaatgatagtctccacaatgttaagatcgaaacacgcgagacagaacctaatggtttgatcaatactaagtttgtcaaagttgaccatagcgatatgacgctaccacatgagctttggaacccaaacaagacgttagttcgctgttcaattgataaccttattgaaacactagttaccaagattgaggaaaacaaatctcaaaataaacactcaaccatgcgatacggtctttgctattatagtggtgttcttgttatgtacagatggaggtttgtcgacgctctaagcaattttactagacactactcgattgatgaatttactgtatatttgcgcacattaaatatgcaaatcaacagattcaaagaaatacgtggcttatcctggctgaaagaaggcatagtaagcactgattctgacgtaacagatgtccggctgagcatagacagattaattgatagtaccaacatctatatgaatggatggacaaatacgactagatgtgctcttgttgggtacacaccgataactatgcttgagaagattgcgaatgatatcggtcttgacagcagcatggttaatactaaccaattaaataatgctattagtgacatggttaataaacgagttaccagagcagttacaaaacataccgacaatgccatcatactaccgagcagctgtcctgacgatatagtaaatgaccttaataatgaattcggcaacggcacttttatgcgtggtaacacagcacaccattcacatgtctaccaccatggatcacgcgttgccgttaccaatatgttatataactggcacccacgtgaaggtttggtatatgacataggtggaaatccaaatgtacacctaaatgctgggcattttaatgtccatagtgtctatagtacaaacaaagctgctgacaatgcaagacatataaaatgggttaaaaatgccacaagctgggcaaagcgcaactgtgatgtagccaaacagccaagtgtaatacctggcatggcaaaatcagtgttatccgaccagaacggtgtttggtgtgacaaaggtttaaaaaattgcgtgcattcaaacaaagctggctcattcgcgatgagtattgatacaattttccatatttcacttgaagaacttttcgatttttatgtgagaaacatggtcatccacagcgttcatgctctaacaataccaagcgattatagctataaatcttctggaacacttaaatataatgaaggacactggtataaaaataatgacaattggactattgagtttaatggtgaaagtttaccctatacacaatcaatagataaaaccaacgttctcctgaatacccctctttttactttaggggaattagtgatttattgcaagataggtggtcatcgcggtgcacacttaattatcgaacatttcaccttgttgcggtcagaactcgatagcctgtatgcgcagcatgtcatgtggttcaatactaatatggacgagttgtttgttatgattcccaggatcgacatggacaaatcaaaaacactaatgggtagggaacctttccatcttgaacaagttgtgataaatattagattttatgaacggttacttaaccgccttatgcaatcttacacatgggaatcattacttagttatgcagcaggattaatcggtagagtgtatgcaacgagcagtggtttacatatgaagtgggacttaacaaatgcccaagtacgtgatcactgtttggttgcttattggagcatgaaccacataaatgagtctgctaaaccattaatccaacaagctgagagatcaaatcgtgaccctgatttcctaactagtttgtggcattcacttaagaattgggtcaaagactttggttctcaatttgacccaactggttccaatgctatacaagactttattgcatacaataagggcgacactttaaaactaattcaaatgttcaacaatgcctcaaagagtgtggaatccctctctgttgctactcaaatggtgcactcacgtagtataatcgactgggttagtactgatctaggcatgatttatgaaggagttaacattagtattgacacctggcgactaagtacacagatgctagataagttaccaacagtatatgacttactaacatatcaatcatcagaaaaaatgtataaaagaagtttgtgtgccccgcagcctggctgcacacataaccacgacactctgcacagccatgttacaagttcacatgggaaatcagcaaaatgtgtctgctgcggaatatttagtaacgtcagtaccaacggtggctgcaacctctgtagtggtaacccaccatgttccaacaaaaatctgaaatgccaacatgaacacacgacagtaaatgatgagtgctgtagcaagaaacaatgcacctgcaagaaaacgtttgtttgtttatgctgcggattgggttcgatgtctacatactgcaacgtatgtgaattaacgcctaaaaacaatgcagaagcatatccaaccaactcgaaaccaaagcaaccgcactaccaacattctgcaagcatgccggacacgatgaatgatactagtgccaggcaaccagaggccactgttccgtcggaagattcccgcgagtttgggtttaaaccaaactcaagcagcagtaacaatccggactctgacacaaagttcgaaaaaaatagtggaaataatgctgatatggaatcaaatgtttctataccagcttccaaacctgaaaatgacaaacccaatgtggcaactgacaactcacgtgaaaatggagccagccctgttaacgataatgatgatgcctttaagttcacaaaacccaaattagctccgcttgacgaactctatgccgatagttccctgattagctaccctagcccaattatcaatattacgaccgaagaaagagattacaagcacactaacatcaatctactgccagaaacatatagtggtgccattggagtgaaagttatcaattatgttaatgtaccaggcgatggccactgcggtgcgcacgctcttgctcgtgcgttgcacgttaatgtcgagtctgtgaaaaagtggttctcaatagcactaggtcatgatgattggaacagtagtgatgaattagttgcatacgcacaatcagtaaacactaacattatcactattgaaaaagacgcagctatattgactagatcaaatgaggatgacattgcaattgccatactgcatggatcattgattggtctgggcatgcactgggtaccatgtgaatgtgttattgttagttatgcgtcaatgtttaacgtgagaataaaccatacgtttcaagacatgctggccgctttgccagtgtctgaagtcactaatgatgaaattactgcattcacttacagccacagccgtgaaaatttaagcaagatactcactattggccagtcattggtggttgattacgattatatcagtgttaatacaccaggtcacaccactaatccgctagttagtgaccacaatacaaatggtgtcaaatttataactgggcccactggtagtggtaagacgacgttggctcacacattaatcaaggggaagatactgttagtaaccccactcagaagtgctgtcactactacatacaactacatggccacaaaatataaagtttgttgcaggtccaacagtgaatgggcccctaatgaggctaacaataacacttgccacggttatgacatagtgataatgacagtagaaacgttatacgcaggtctattcagtctcgaacgaggtaatgaaacatacacacaacttatcaaaaaccgaagtatcatctgtgatgaaatacatgacttgacacctcactacgctcgtgttttaacacaattgcccgcacataaaacatatctttgttcagccactattcctggtatctcaactaattatataaatacatttgatactaccactagcttcatggcaaacggtacttttgacaagtggttcaacaacgatattgagagaaatgacattaatgataatacatgttacatagttagtactaagaatgaaactaacctaataagaaacaaatcagtatctgtattaaatagtgatacattaaataaaattgacattaataacgcacggaaaattattgctacaaaaattgcggcaacatccgttactttgccattaattaagaccatcattgatagtggagtacgtatttatgctgaaatgatttttgaacccattatcaataataaaaccatccggtttttcaactacacaaagtacaattatagttggcttgaaatgatacagtccagaggacgcgttgggcgagtacaggctggacacttctttggcaactgccccagtgactccacccctttggctgcagacagtatgctgctctacagcatgtacaccaacactgtttgcccttcatcattacagtccacgtgggccagtatcacgcaatcgaattacaatagtatcaagtccaaaattactagtttgtacccaactgacggtaccactccagaatgggatagcgaatttataacctggaaatctgtttacaatgaactacttgttggaaaaaaatctggtttgcgaccaaggtttagtgatctcgaatgtagtttagaaaacataatgctaaacctgagcaatatcgttggggtcagtaatgttagcaagaaaattggaaacagtgtcatagaaacatcaattatgtggaatgaaatcgggtttgacagcaaattacttaataataaaaagattgattttaataagttggttgtcaatgttaatgaatcgcagagcttgattaatatcaaaaaagataacaatcaacagctttcagaaaaactacttttgatgacagtatcaaccatctttgagactattacagggttaatagcatcaggaagtgccatagtgaataaaaacaccactgcaaaccaaataggacaatttatagtatacccaaatataatggcagctgaaaaaagtctcggaactaaactgcgtgataacgaaatcatcggaataatcaacaattcaacaaaaaacataactgttaacatagttaagaatataccaagcaacgacacaatgatagttgtatctaactatcgaaccactcattacagagctgagatagccgctattgaagcgatagttgaatcaaaaaacaacattatgcaaacgcttagcaatagtacaatttattttggtgctccagggactggtaagactacagcaattatgaagcacaaggaaggccattacattaccacgactaacacacagatgctaattaaaaacaggtcatgggtgcctcccaacgcagtaccgtacgatcaagatttaatactagttgatgaagttggtctcatgtctgtaacaactgtattgacacttgcagctaagtgtgaaaagttgatttgcactgctgacctccaacaaatggtaaacactcacagcgatacccatactatgtatagtggttatgaatctggtcttcaattattaaaatcttttagtagaaatgaagaattaactttaacatatagatttggcccgaaaacgtgtgcgatggtaaacagattaggattcaaccttaaatcggctgtagatagagatgaaaccattactagttcaattggcaatgtgagaaacaagaagacaattagcaatctgctatttgaatccaaccctgacctaattgtgtgcagcagtaatgctcttgctagacacataagacagattacttctattaatacatgtaattttgcgaaatgccaggggttagaagttgataatgtactagtattaatagacaatttacacaataataggaaagatgcaaacattaatgagtttgcaagtctatacgttgcactcaccaggcataccaagagagtgcatatacacgtatccactgacgatgcgtctctactgaaaaccctgaatgtcacccctatgctaactgacatatcagtgaataacaacataggtggcaactggactttcaatttcaatatttatggcaaaatgttagatgcaatagttgatgacctatgcaaatctaattcattcaacaatggaatatcaattctgcgtgagtggggctcaggtaaaatatcaagcaacacggcgctattacgtatggacaatttcaatatcaattttgatccatcaacgctcatatttaattcactgcacacagacattaccaccggtctggaagtgtgtagtgttagtctattcggccacaatgtttatttgtttaagttatttttggatgacaacaaaacgataatagaattgttaactagtggcttacccagtggcacagtcgttaggaaatttatgactctgactggaaagaaatttatcaagaaaaccggtagagtaacagcaaagttgatatctgcaattgcatcaattatgaatgtgccacgtgaaatgtatgaattcgtaatgtcatttgaccttgaagagaaacataatattggtggtggcatcaacattggacatctactggggatggcactgcttggtatcaaaaaagcagtcatattattaatacgcataactaaatctattaaagataaagttatgagcagcatagacggtaaaataaccgcacagtttttgaaagattatttttatgcctattttaacaccacccatagtagcgacattgggggcggtgtgtggcctgcgaatgttgtcggtttgtatcaagcatgcaataaggctatatcaaataccgctgtccacatatatgactggatctgcgatatcattaaaaaaatagtatctttcatgtcaaaaaacgacaattgcactggcacaggagaacaaccgcagactaatgctgatcccgaacatacacaaggtgatgatcatgatatgaatgacaaatcaatacttgttaataaagaagtaattacaactacaaataaaaccagtaggaaactatcagttactttcaatgataaagctataaattactataatgatggaaacactgaatttaccaatcttgatggagaatctaaaaaattatcacgggcgcaacgagctacattacaactaaacaaacatttagatatcaatagtgagaaaccagaggtaccaatacttaccgattgtgatacagatgagtggacagatgattatgaactattgtttgactatgatgaagttgtcaaagaccttgaaacagagaacaaacaaaaattagacaacaccagcgaacacgtagatagtgactatgatcatataaatgatggcccactgcttaataatgaggatggtaatggtatagctagcaaggtcaaaccagacgaacccacagataataatgacacaattacaagcacgcaagcatcggaactacacaatattagccaacaaagtgccaaacaagatacgtcacatattacacagctggctgattacacctatataagtgatgtgaagacaaaactaaactttgatacgtttaaacctaactttgttggccgcatggtaatgactgttaaggatgatactattgttgcgaatattagcttaccgggggctgggaagttcggcattactgtgacaaagttggtgaataaaggtgaacacaaaataattgttaaggacaatgtttctacaactgatctgataatgattaaaaacgatgatgggtatagagtttatagccatcgtgagaataacgctttcagcatggaagcctttggcacagctattaagcacatatcaaaattgggtgggggccagaacagttcagcaattaatttaattagtgatatacttaaaacggtttaccagtttggtaaaaaactagtcaaattaagttcatacaaaatgttatttattgccggcaaagtaagccagcgttgcctaatgtctgacaatgattgcctcactacttacaggaaattatgtaaacgtataccaacaagttacaaattttctaaagaatatgagtattcaacaagcggtgggacaacactatcgacgattgaaatcatgtctgtcaataagagtccaacgaaactctttatcgcgatttttgaaatatttggcaaaacacgtgtcatcctttattcgaataatgtaggcttgaccaatatattagaacgactgctgttaacgaccaacgcacaatcatacaatgatgaagtcggtggctcagatggcgcaatatctgcattattaaagctcggtattaacgttaaagacatcctttaccacaataatgacatgggtgttgatgaaattaaaaaatggttatattcaaaccccctaaattcaatgttcagcacatcaaatgaaccaacacatacaagctataaatcattattataccaagagatgcacatgcacagtgaaatccgtgataaactagaaaaaaatgagactagtgggaaaaaaattgccttctgtatagcaagtggccacggtaaaactacgactgtgaatcgcattagaagacaaaatctagaatttagtattctagacgcggatgaagttcaagagcaagctagcatactaatgatgccgttcgtagataaaatgctcaactataaagctaagctcgaaaaatacaccgccgaacatcctacacttgacgctatgtttatccattcaccaatatgtgctcctcatgggtataagctagtgacaataatcaatgatgctgcggtttttccagttgatagagtatggtctcaagataacgtagaccatctcagcaagtgtggttcagtgacccatgttaacgggtatgatgatctatacaaactttgtgttagctatttaaataaaattagcacaggggatataacacttgagaatggtgcgacaattgttgacaacattgattcaatattggggtatgactttatgcataaccagccaggttatgatgatctgtttaggctgccagttgggacacaagacagacttgagtttagtaatggcaatcttgggttagggcaacagcgtgtatacgtcactggcgcgcatgtagacgttatgcggccaaccattagcaaattaccgtcagcactaccaaacgctatcacatcaagactaatgggcagacaaaaattacgtagcatgcacatgacaattgatgattatgaactcttaatgtcaaaaatgctagtcaatgattataaaaccatgttagaaatattctcgcatgatacaatatctattaattataaggatatattagattggttagttaacaaagggaataaactacaattactcgaaacaatgctcaagaaagttgttaacgatgaacatgctaccgatccagcaagcataagtgtgcattataaagttgaaaacctcatgaaagaacaagtcaatgacgtgcttgatcaagtaggtagggttattgtttggaacaaccagaatattaacatgtatgcctgcccattgattaacgaagcgaaagcacgttttaaaatgatgctcaaaccagatgtagtatatgctgatgggatgacaattgccgatctgaatgagtcaatatcgaaatacagatctaaatggttgttggaaatggatctatcgaaacaagacagacaaactgacatgccaatattaaaatatgaatgggatttaatgagaaggctcggagtgcctgaagactttattgaatttatgacatcgtttatgccaacttttaaaataactggttctaataatgagaaggcaaagctaccagctatacactttagtggtggagcaatgactagtattgggaatgagatacgtaatctactgttgattgctgactgcgttggcaataattattcggccatatacactctaggagatgacagcctagtactaatggacacaaagcctgacttagaatattacgatagaatttgtaggagtagacataatgtaataaatacggcattgtgtgataaacaatgtgctctgtttttacaaatgatcgtcaaccgtgatgcagatggaacgttttacttgtcacacaacttccaaaggctgaaagaaaaaatcgcatattcatcgtatcccaattcgagtagcgattggaaaatgaaatatgcggcatacctcatgatgatcggatacaccaaacaaacctataatgctatgattgagatgggattcgcaacttttccacacttgggtacgagtatgtcacaacgagtgtcagccaatgccatatacaataagatgccagaggtggcggtgtttaatttaataaatgatataatccaaacaaagaatgtcataagtgaggagattattatcgacacgacaatgataatgacgagaagtaacctgctgaatgggtataagagagtggggccgtatgttgataaccatacaaccatgcttagtactcttcaagagtactttaatgatcacaattaacatagtgcattaatcaataccagcgacatgcaaatgtgaaatcaactgatacatacatgcacttttcaaatagaatgtggctaaatatatctatagataagctaccattaaacgttgttgtttgatatatgtggccccccc

SEQ ID NO: 846 - DNA, 10375 bp, Gremmeniella abietina betaendornavirus 1
  source 1..10375: mol_type = other DNA
atataacaattcacaactacaccatgcataccaacacatacaacaccacaaacccaatcaactccccaaacgccgccatgaacaatataaacaagaggaaggctggcctctataaatccacagccaacaaaaaccactcacgtaacaatgagtgtactgagcctaagggaattaggcccagtttcaaagattggggtagcattaaaaaagtttctagaacaaaaatcgttaaaggaactagtgatagtaaagttgaaattaagaacaaagtcatggctactaactcctgttggaactcaatatttgggtacgatttaggcgtagatgctatgattgacattgacatgattaaaatgtctcttattggccaagaagaagatgccgagcatattaggctccacgtaacaatgcgcaagggtatcttacatttcgaaaacccaattggtttaccaactggcgacccatctcctgaactgtttgccaagcaacgagagtttgtcaaaacatataaaggagaaacggtaggactgctcgatatattaaacaagcatgatggcaatacacttgtcggattaagtgaagaaccattacttgatagaattgctaaggatgcaggcatctccatacctcagattactactagccaattcaaaaccgagatggacaaattagtcaatacacggttacagcatgcggctaccaatcatgccaccaaagttattctccttccaacaagtacgcctgttgacattgttgaagaccttaataacttacacggttccggttctttcgtacgtggcaacatggcagcacatagtcatatttatcaccatgctaaccgcctaatgctaacagagatgttagccagtagacacccgcgcaatgctttactatacgacataggtggtaatatcaaycgtcacttagatcatggaagattgaatgttcattgtgtatatacaacttcgactccagctgatctgagccgtcacactttatgggtaaagaaagccacacaatgggcacatgctaacctaaaaaacaagagcgtacatggtgctacgtactcaagcattgctgcatccatgataaaagaagacaactcaatgtggtgcactaacgggatagctaactgcagccatgcacccatatcagttggattcgcaatgtccattgacacattagtccatcttgacccttcggatttgataaaattttatattgacaacaatgtggcacatgcttcacatgccatgactatacctgataactatgcttatgccacaaaaggagtcttgcgtcataatgaaggtcattggtacaggactaacaatggtacttgggtcattgagtttgttggtgaaagtctcagctatgaacaaaaggtttcatataccgatgcatatttacaaactctaatctttactgctggagaaatggctgtatataataaagttgttggacgcaaaggcccacatatgttatttgaacatttcttaattacacgtgctaaacttgagtctgaatgtattaagcatgtcacttggtttaatatgaacatggatgaaatctttgttatgatacctgaaatagattttgattcagctgtcacattgatgaaacgtgaacctttcactatgaaaactgtctcaataaatctccgattttatgaacgccttttgaatagactattgcaagaatactcctgggaagcaactatggcatacgcgtcctcaatgattggtaaagtatatgctacatcatcgggattgcatttaaaatggaatatgactaatgctgaagtccgtgatcattgccttgttgcttattggtcaactaaccgagttaatgagtcaatgcggcctcttatacagcaagctgagcgaaataatcgagacccagattttttgactggcttgtggactgcagtcaagaattggggtagagattttggcagccattttgacccatctggcagtgaactaattcaaacctttattaaaaacaacaaaggtaacgtattacacataaccagacttttcggagctactagtaaatccattgatagtttgaatgttgcagcccaaatggttaagtcaagaaatgttttggaatggataggtagctcaacaggtgtagtagctaccacacgcaatgatttgatagatgattggcgcctagctacaccttcaaagaatgagataccaacagtatatgatttagcttatgaacgatcagctccaaaaagtaaacgacaagtctgtaacgcaagcgaaatttgtccacatgatcactctacttaccatcaacacttaattccaggcacaactgacattgaaggtaattgttcttgctgtaatgtatatagcaatttagctcctaacggggcttgtagagtttgtagcccacggccattagttcgtggtaaacagttaagatgcacacataaacatatttacgtgaatgatagctgttgtggccaagcaatatgtaagtgcaagcattcacacacatgttcatgctgcgggcttccatcaaatgctcagttatgtaaagtttgtaattttacgccaattcaggacattattggagacaagtatggtcatcttagtaagaatgatgcatcattaaatgatgtagtacacacttcagataaacttaccaagatattaaaattaagagacaacaatcaaaatccagatgtagataatgaaaatgatagtgaccttggttcatttgatactcctattaaagctcccaaattggctaaagaatttgaagtaaagtctcgcccactttccgttgaatcagcaaacttcgctgatgtgatagctgaacttaaaactcacaaagggttaaaaccagtgaaagagactgacaagaaggttatcgaaaatcttattgttactgctaaacagagtgacaacgaagtactggattgggcagatattgtcaatgaagaagccaacaaagaggcggaagaaactacgcaagttgaacctgtagttttaaatttaatttctgaagaacaagcgaagccaaatagtaacactgaattctgggctgaaagacctaatatacttaacaaaaaaccagtaacatccgtgaacttggttaaaattgatgggataccattcgtaccgattagcattgttggttgcaatgtccatgggtttattgatgtaccaggggatggtagatgtggttcacatgctttaaaacactggttaaaatgtgacattgctgaaattgatagatgggctgaaactgcgtttggccgaaatgattggctcgaaggcgaagagatcgctgcgattggtaatgcttacgggaggaacgtgttgattgtaacagaaagcatcagtacattataccaggttgattcagagcgtttggcaatagcaattgtacatgggaactgtattggtaaatctatgcactgggttgtcggtgatgtcagtgtgtcaacagttagctcaacattaaataacagattatatgagaactatttacatttgattaagtctgcagctaatactatgaaagacagacatgatactgcatatggttatacacacgctgaactcgacattgagttcatttgttccctaggtggtactgtaactcttacgcccagttcagttaatgttaattttaccggtatgaattcagagccgataatacaaacattaaacaatgggatgcggttactttcagggccaacaggctctggcaaaactacacgagcttttgaaatattacaagagaaattattaataattactccatcgcgttccacagtaatcggctcgtctaagctaactaaaactaaaaactgtgggcgtgcttcaagccgctggtggcctaaggaacatatgacagtaaatgaaataaatgcttgtgatgttgtatacgtaacggttgatgccatgcatgctgccttatctaacaacgaacattcgatgtaccatgaccttatcaagtcaagacttgttatctgtgatgaaatacacgaaattacacctaactacatggaagttgtcactcatttgaatattagtagaactattttagcaacagccaccatgccaggtgtagccacgcggcataatttaaaatataataacactgttgaatttgtaagtaatggactcattgaagctattgttgatgagaaaacttctaatggcctatctgatggccaaaccgtaatagttgcaacaaaaaaaaatacatatgttaatcaagatattacagcaattaattctgacacacttaacactattgatctaagcaaatgtacaaaagcattcgccactaattgcgtcaccacaggagttacgatgccccttctgacagaattgattgatagtggcaagcgatgtacagtcaatattaattattcacccacttttgatggcaagcttgatcttttcaggtcacatattcgacagacgtcaattgttgaatttaaccaaagtaaaggacgtgtatcacgtacacacccaggtagatatgttacccctataccaacacaaaaaacagaaatgtcaattgatgatttgctcgcttcgtcagctttaactggttgcccttgccctgacaaattcgctcaatactggtctaacttgaaccaatctatcctgagtaaagcccaagataaacttgggaaaatacctgttaaaactgggagcttaaaagaccatgaggatagagttaatctttctacttggataagcagatatggtaggttattggagctaaaaaatagaaaattaaagccaacatttgttagttcaaatatttatcgagaagacctagttaattttatccctagctgtatcgggacaaaaaacaacatgaaaaccaaacatgttggttattttaaagctagaattaacatagataaacaggctatcataccaaaagcaatttttggtaacacaaaaggtcttgattatgatacgttgacagtagcagttgagagcggcggtgactttattgatattgaaaatgatgatatggaaaatattatacccaaagttaaattaattcttgttgctcaaatcactaaggctatcaagacaattaataatagtatgttagcaatacttaattcacgtagtttaaatgctgccccttctgactgtcctggatacagaggccacaaatcaatgctgaaagcaactggccgtgtacctaaattaaatgatatggtcggtgttgttgatatcaacactggtataggtgcaatccagttatataaagatgcccctaaacaggatgaaaatgctacttgggttttaccaacttacagaacggcacaacttcaagatgacatgcgattactaaacagtgctaacagcaatattaaaatcgttgattacttgcacaattgtaccctctatgctgggccacctgggtcaggcaagacacacagtatgttgaacacatatggaaatataccaatagtaacaacgagtgaaacgcaattaaaattacacaatgattggactactccaagtggtgtggttaactacgtgccaattataggtgttgatgaggcaggtctaataacattaagcacgttattaacattaattgccaaagctgacaaattgatttttacttgcgacgttggtcaaataattaacaaacaagagcagaatatccaagaactaactggtattgatagtgtagcacatctattaatgaaattctgcaatgttattactttcaatgaatcttacaggttaggaaaaaacatttgccaagtggtaagtaagctgggtacaaaattaagtagtaaacgtgagcaggatgatgaaattgtaggcatttcatgtgttattggcaacaatccagagttcagtaacgccattatcaattctaaccccgacttaataatatgcgcaacaaataatttggctaggcaattgcgtagctttattgacattaatataactactattacacgatgccaaggtgctgatgttaaacgggtattattagtcatatctggtattgattaccgtaacataggaaacgaaacattgtatgtagctctgacacgtcacagtcaacacattacgattgttgttgaccgtcctaacattaatttgcttggttcactagaaatagcaaccaatgactttgttaattactcacgcgccgtaggtggtagctctaatataacttcacgcatgtatgattcaattgtcaaaaaatcaagttccctgcctatgcctgatgcccaattagaggatatactcaaacaagcattgtatatatctaacaattttgctcataaccctgttgttccgagctgtattatatctaaggttgggaaaaatggcctactacaaggaaacttatcagtcatgggcctagatggtgctgtgcataacaaatttatcacattaactgtgtttggcttaaaatattctcgtcctgtagtattattctatggtatgaaaatagaagaattaagatataagctcttaagcgacatgcctgtgaggcgttttatgtgtctgttggtacgccaagtaacttcgcgattttatgcttatggccgggactttgttgttttactaaaatcatggctcacattggctttagagaaaactagcgaatgggcagcgacaagccatgtgatgcccagtattaatgaagtagtcagttcaagtggtaatatgttgatgaaaattttaacaatttttatgactccagtaacatcactcatttcaattttacctacattgaaacaaacattaaagaaattattcaacaccagcggcgacagcctaggtagtgatgcagctaggctgttacatgattggatgtttaatccctcgagcagtaaaacgaaatcaggtggaaaagttgatatactgtcaagcttgtacgatattattatcatgtcaaccaaaaccgcaatcagtggagtcaaagaatttatcgtatgggtcatcgagtccatgaaacttggcttcacatatgttaaaaataaattacagcctaacaccttagatgattctgatgtgttatttgattatgatgttgaccagaataaggatctatacactgatgaagaaaagcaattatttgaacacggcaatgctgttaacgttaacaacacaaataatgaaccgcctgtggttccatctattaatgtagaggaatacgatataattgatgacaccgactcaaaacccagtataccacaagaaaaggtggtagaacctttgcctgattactcaggtgaaagttggggcaatagtagtattgacccagttaatctcttaaaaccaactgacatcccattaccaacttgccatgcgaaaactttaattaaagtagataaaatcaagactaagttggatattgaaacattcaaaccaaattttatggggcgtttcttaattaagcgtgacgacataggattaagtggaaacataccattaccaggcatgaaggttaagttttccatacataaaacatgtgagcattattatactgtcaacattattagagacactgagataattgaagtttatttaaagaaacgctccacaggttatgaactatttgcaaatcaagacactgctgcagatattgatccccaacatattcgcacggctctagttgccttgaataagttgggcggcggtgaatcagcttttattacactactaaaatctataatgcaagctacatctgatttcgttgaaaaattgacgcacattattaaatggaacacgcgacgtttgttaggacaatgccagcacaagtcattccaaacggatctaaatgtgatcgatacataccgggcttttagcactgcattgaacagatcgttctatgggcgcacccacaaagggaaattcctatctggtacaatcatcacaacttgttacgtgaagcctgaggtggaagataaaatgcaagagagctttattctaattaacggtattggatttgatactcgggtcacaatatattcttttgaacaaattgatgaaagcttattacagatcatggctaattcactgggagcaagagctgctgatcacattggaggcaagtccaagtcatttgattcattgttgcgtttaggtgttgacttgaaagctttaaacactgctatcactccacaagatgtcaagtatatcaagagacacatcgagaaaaatcccttagttgcaacttttgattatgggcctgaacagacacatatggatatgaaagcgctaggtaaattgatgtctgaattaagtgtaaatgcacatgtggatttaaaaaacaaggtcatgcaaaaaaccgcattcatcattcccagtgggcatggtaaatcgactacagtacgacgtttacgacagcaaaaaccacatttgcgtgtgctagatgctgatgaagtacaagagcaagcaacaattctattattgcccctagctgataagtttaagtcatacaagtacaaaatacaagaacatgtaaatagtacaccaactgatgctgtttttgtccatgctattgattgtgtgcctagtgggtacaagcctatattcattatgaatactaaagcagaggtaccgttagatcgtgtttggtcacgtgaaaatgttgagtataacgagaggacattggcaaacttaacattaattaaagcagatggttatgatgagttgtataaagtgattagccgaatattagatggtggtgtgcgtgatttcatgactttcacagattacggtatgttaattgacaatatagatgatatagacggatataatttctttgctaacgaaccatatactgatgatgtcatacgattaccagctggcaaacatgataaacttacttatagcgaggtgagacatggcccaggacagcagcggttgttcgtttcagggacacatgtaggtttggcaaggccaactatacaatctgtagcaagttcactaccaaatgccattagcacaagattgatgggtcgagaaagtttaagaactgaagctactactattggccaataccatacactaatgcaaaggttgtggcacccaaaagctgaagaattatttaaaatttttggtgctgaccaaatttcgttaagtacgaacatgctcatagaatggttagtaaataagggcaacaaaatgcaactattcgatgatatgctgagagatgtgcaagcacgtgaatatgcaactgaccctaaggatgttaccgttcactataaagtggagaatttactaaaagaacaagtgaatgacgttttggaccaagtagggcgtgttattgtatggaataaccagaatatcaacatgtttgcttgtcccattattaatgaggctaaagctaggttaaagttattattaaaaccaaatgttgtatatacagatggtatgagcacaccagctctaaacgcaaaattaggtgaatataaagcaaaatatatattagaaatggacttaagtaagcaagatcgccaaactgataggccaatcctagaatatgagtggtggcttgttaaaaatttaggagtctctgaaaaggttatagattttttgtctagtcctataccaacattcaatatccatggttctaacggtgagacagctagactacctgcgatccactttagtggtggagcaatgacaagtttgggcaacgaaattcgcaatcttgtgttggtttctgattgtgtccaaaaatatgtcgccatttttactttaggtgatgacagccttgttctgatgaatcaaccaccccaacttgacctttataatcgtatctgtaggtcaaggcataacgtcacaaatacagccgattggtcaacttcacatggaacttttctacaactgatagtaacacgagatgatgatgggttcttttacgctagtcataattttagcagattacgtgaaaaactagcttacagcgcatatccaaatgattcgctagaatggaaaatgaaatttgcctcatatttaatgatgatagggtattgtcctgctaccagaaatgcgatgcaatattcaggatttgtcgtatttcccgacctcggtacgacgttatcacaaagactagaagcgaatgcgattgccaataaatgcacggttgaagcagttttagccgtaatacaagatatgatgcatatcaggctcgagaaatcaacaccattaattgtgaacacgaccacaattctaaaaccaaataaattgaagagtggttacaagagaattggtgattatcaagaagatatcactttcaacaaacaactggctgcactactttcctcgttgtagtcggagtcattgcaaaataattattgttttaaaatttaatgtttataatgttcatggccccc

SEQ ID NO: 847 - DNA, 9639 bp, Rosellinia necatrix betaendornavirus 1
  source 1..9639: mol_type = other DNA
gaataattataacgaaatcccataaataaatcaaaagaccaataccatcacaattcaaaacctaaacaatatattcataaatatgacggacaacaagcaaaacaacggacaagctcatgcaaatgagcttgtccaaatggacattaagcaagaaaaactagctaagtaccacaacttagccactaacaacccagagttgtttaagtttgcaaccgatcgggttaacgttaaatccggaatcactatgggaggtgatggcagctgctgggttcgaatgtgtaggtacactattaaccctagccaacctcgccccaagtttggcgcattcgctcgtgggaagccatatgattggactaagttcatccagtttgacttccctgatgatgaagatgaagaacccacggtcagacctattgaccttgaaactatgcgcactattgctggttgtttggaccccaatgtgattgtagagctaacctggaatggcgacaacttgcacttgatcgagagccacctgatgcgttgtcaccacctgaaattattcagcaatggcaagcactgcgatgatccgcaagaggacaagattggcctgacctttcaacctttgatgggcactaaagatgggaaacaggtgcattgtcatgataatggtgtaccggtctatcgctttggtcgagatatacttctggatttcattgacttggtggaatttaccaacaagggtgctatgcttggccttacaattaagcaaatacaagaggttcttgagaatgacaccatcctccaaggaaaaataacaaccatnncggaattcaagaacgcaatagttgatctggaccggagattggtgaacagtgtgacgaaaatcaacctcaacaacagcttaactgtacccatgtcagtgccgaagaacgtgttggatgaattgaatgtagcttaccctgatttcttgtatgtgatgaacccaaaggcacatcataagcacccgttcatggccattagccgccaaaccttgaataagcgtatcgtcaacaacacaccaatcaatgtaccaatattcgatataggcggcaatccatccttccacttggcgcatagacatacgaatgtgcactcatgctttgctcgggttgacaacaccacggaagcgcgtgctattgaccacgaactcaacactttcaatgaagttaatatgcacgcaatacgtaacactaagaacgaatcgcagcgccccaacgtattggttgaacaaatgtttgagtcaattaaagatggctctgacttacattattgctatgaacgagctcaagattgcaaggtgtcaccgaaacatgcagcggtagggatgatgatagattccatctataacatcacccccgatgaattgataagcatcatgtgtgccaagagaatcgtaaaactaaccaatgccttcacgttacctgctgactattttatagctgaaggtggccagttggcctttaatgagggacactggatcaaaacaaaacgggacttcaaaatggtcactaatgatgatagcctcgtatacaccgggcctcgcgagaacattgagttttggttcaggtcccctatagtgcattgtaataactttggtgtatactcaagattcaaaggtaggtcaggaccccacgtgatatttgaacattacctactgacaaataccgacatgacggagaaaaccatggagtttgctcactgggtaacaggtgattctgaagttgaactattcaacatacctgatgtcaattataaacagccaattagcctgacgtttgtcaaaccagtgacatactctcaacgcagaataaatctacgattcctgcgccgattgcgtcaaaagttgctcagcaacgaaccaagcatacaaatgctgaacgaatacgggcagcaattggttagccaagtctatttcaattcaaagaatgaatttaaagcctacgatattcaagctgacgacataaattaccacagcatcgtagctcttatgatgcaccagcgtatggtagagagtacacaggacatggttgaaacctatactgaaagaagagggttcgacaattggtggacttcggtactgggcagtttaaagaattttgctcagggcctcggataccaatttgaccctagcactaacgctatgttgtcggaattcgtagaaaattgggcccagaaaccaaatacagagatattcaagattacaagtgcttggtcggatttaattaagagtgtgaccaagagtatggacgtatcaacaaactgtgtgatactgacatcaaaattgattgtcaagcccttcacaattattaacccaccagaacttgaagacttggcagtgaaaaatagcagccaatctttatccgatatggtcaaccatgatgggccgcaatacacccgcgatgaatgcaagcaacattccgactgtatccatgatcacaattcccctcacaatcatttagtgttaggagtagaaggcacaccttgcaaatgttgtcagatacttagccaaactgtcaacggattttgcagcttgtgtcttaacgatcaattctgcaattcttatcactcagagtgcccccatgaacataaattgttaagtgaacattgctgtggaagagcgtggtgcaactgtaaacgaacctttgtgtgccaatgctgtggcattgcctcgtcgaccaaaaattgcccggtctgttttgatgacaaacatctcaatgtagaaccgaccgtcaaggtaggcgctgaagccactgaagctaaacatgggcgtggtcattcgaaatctgaatcaaagaacaatgaaacaccaagtgggggttcagatggttctgaaaccaaaaagcctatgaacgaacaaccacctaaagctccgcaaagccaaactaagactaaagcctcagttaataccgatgaaccaaaacctagcacaactaacttaccgacgccttcagtaaaagttaaccaaggtgagttcaagaaaaagctggctgcacaaaggccaacgatagttaaaccgcaaacagcaacccagattaatttcatggcaactgatgatattgaagtgcccattgatgatagggtaaagataccgttaaatgatttgaaattcggtgaatcacgatacataaagcgagcacccacggttgctcctaaaccagttgaagtagctgcggcaacgcccatccagaaggatgataacgatgaacaagagccattggaagttaatgatgataatcaaaaaattgaacctgttatccgtttctcgaaggagttatctgataaaagtaacttcacagatgttatcatccgacgaacagtgttaaatgagatcacaaagtgttatatctccggttacacgcaggttgatgcttttggtgattgcttcgctgcctcttacctgtcaatgatgccacaaaaaagacatgcaattgtgtcaactaacatgggactggaatacatgtcacttgaagatattgtgactttatgttacagagcccatctcaacgtttgtctaatcaccaagcgacccataatcatcacaggcgaccctactactattagttacgtgaacatccttgacgtgaaactagtgaatggtaagagccattggaacccttgtatgatcacggacttacagtacgacgatgataaaattatacggccaatggacttatccattgaccacatcactaatacttatgcaggtcaaccagaattcatcaattttctaaaacgttatgccattaagtatgagtccgacgtactgaccttacatataccagctggcaaagagatatcgggcaaatacaagattcacaatgataggaaaccaaccaagagcctgtacgctgacttgaacgactacaagtacttacaaagtacgactcaaccgcgttgccatatcggacaccactttataaacaatttgcctaaccctgtcactatcagaatgcatattagtagtgatccaattagtgtcaactcattggcaaccaactccacgaaagactggagcactggtgacatcaaaattgatatcaataaaatatttgaagataaaacaaacttggatatccaggatgacggcttaagacattcttatgatttaaacgtgaagggcgagttgattgagacagtacgctatacagaattggctgacttttatgaaatgattaacttgtgctcttggaggaagtgtgatctaatcactaccacccctatgggagagccgcaatgtagttattatgaactatacctgctcaacccctctagcctacatagcacagcctaccagatacttaagaataggaattctaaactggtttatctaacaaagacgcgtatcaacaataactcaatgtacataacagatattgaagaatcacttacgcacgctaggtggcccattacggtgagtggtaagtgtgatacctgtttgaatatacgtataccaaccaaaacacagtgcttcaaatgcttatatcctaagtacgtggcttcggttaacttcaatcaaccatgcgtactagtaaaacacagtttactgaataatgactattcaaacgttagaagctgtgccatgtcctaccatctcaatatcttaatcaagatatttaatgacttacatgatgcagtggctgctactgactatgggaagaagtcatttagcaatggatgtttcattattaaaagtgtagaacaagttagggccatacgacataacctaactaatgacatatgcatcgtacttaatgaaaaggctgaatgggcttatggtgaccataaatttattgaaagttgtgtcagaaacaatagtattgttattcggcataagaatgctactaattatcactttaagagtatgagtgaacttaacaatatggaaaatataccagccttcccgcaagtccaactgatagatggacccccaggtagtgggaaaaccacgaaattaaccaatatggttgatgaaattataacaaaacaaagcatcatgttgaaccgcgataagtttacgacgaagcccaccaaagaaagaatcggcttagacgaagctggattattcaacgtgtttgacatactacaattggcaattaagggtgtgaaagaaataatagcaacttacgatagcaatcaaatgggcacaccagacctaattggatacgaccaaggtggctcaacccaatggcttaataaagcctcgaccatagaaacgctaaacgtgtcgtataggtttgggcctgagacagcaaagatattgtcaaggtttggaatgcccatgtctggactaaatattaatgataagggtataaaatttattaaaactgtgggtagcatcagtaaggcgttgaccacgttagaaggaaggcaagtaaatgccatactaactgttagtaataaaactaaatcttacgtcgcacgattcaccaatgacgttcaagtggtcaacatcgataaatcgcaaggttctgaatgggaccatgtagtgttattactattagataatgatgcactaactgataaagccttatatactgccttatccagacatcggatttcgtgtacggtgttagccaataacaacgacttaaaattacctaatggcttgtcaatgacaggcataaatgaaattggcattaatattagtagttttgtggtatcaggttgtagattgatgttggaggagatacttatccctacagtcgaattagttaaatgtgtaggtagatatctaccacaattagcaaaatatgtggtagattatctgcgctttcaagccgtaaggatgaatgtgcttagtttctcggatacagctaccatactatggcaaatggaacacgattcaaacccatctcggtttgtcaccaacattaaaaaatatgagggatcaaccaattatgaaaagttatttaacttcatgctagattctaacatattgatatatggttttgatgatatgagtaattacaaaatgaaacgcttggtcgacgaattcttaacgtcgttgagaggctacaataattcacgcaagtttaatatggtaaaagctattagcgtgaaaaacctactaagggctaacgggaaaataacaatggaagaaatatcggaaatattaaaccaggatttacggcaagactatgctacagttgacaaaatacttgacgatatgaacataactaaagtggctgctgagaatgggcgtgaggattatgaaatacgtagtagcgccttattgcacttatggatgatggacgaagctaaatggactaatattagatataaacttggccgcaacgcagctaccgggtgccttgatttagatgctatggaacgtagacataaargcttacttagccgtatgaattataaaactatgcgcaacttaacggaggccatgatagttaatggtgattacaaggaagtatatgacgtattagctaggaatggaattagcatcaacctactatatgataacaaggttatcagcagtacgcttgatatcatgaagaccatgactgattttagtaaatatttgtacaccctatcgatcaagtggtttaaaaaactgtacaaccgctttataggagcaaaccacgctgaagatgatatagaaggaggtgtgaagttgccaatcagtccggataacctatttgacgcaacaaatgataaaaaggaagacatgaaagaacccgattatgagggcaaaggctacggcgactatgtggaagagtataatgtgtcacatgacataaacgaagaatacattgagtgctcacatgcgtccaaacgcatggtatcaaacttacctagtacagctaacaaggacattagaactaaagtcaaccaggatgagatgctactcacaaaaccgttcagagtattaggcaagaacttgaactgcggatgcattgaattgaaggtttcaaacttcacattatatgtaacaataggcaacactgtacacagtgatggttccggctttattttcaacaacatgatgaaagtagctcgaaagatgctggatacctggatgaacaatggtaatgttatgatggagaaattaactctatatataaaagacataatgattggattgttgaaatgttattattgcaatagtggcaataaattcttacacaaagtggttttaccaatatttggtgattcggctagtcaaattgtccaatcgcacccgcagctaagaagattagccaggatgcataagaggatagttggaatgagaaattactatataaacgtaccgtggttccaagacaggtcccacgtatttataactgtgaacaagaactcaacaacaataatgattacatcctctgggatcaatgtaaatcacttaggtttgagggatatccttaaagagcatgacacgccagcacttactggtttacaacaattagtatttgaaacaatgggagttaagttagctgaaggggatgccaaatatcacaaacacctatttgaaatacatccattgctaaattatgagggcccaggccgttcaagttttgatacagtggacatgatgttggaagacgccacacgccaaataatgacaagtaatttgttaaactatgataagaaatttaaatcccaagtaagggccatatgcatacctagtggttcagggaaaactacattcatcaagcgtaataaagaactaaacataaccgatgtagacgatttaataccagttgattctttcctcaaaattaaagatctaaatttgaagaaaggttggcgattagttgaagacgtatacgttactagaattagaatgtgggatgaacaacggagcagccccatgattttgtgtcaccacccagaccaagtaaaacatataacgagtgacatatcaatcatcataccggaatatactatttataaaccttggcatgagaatgacatggccgaattaattgaggcaagcagatactatcctacagtgagggttaaaaaccacatcgaattacacgatcaaattattagtatgtttaactataatttagctcccaaattacgtgatgatgacgtattagacattgactacactgattccattgaattttatcaaaataaccatatagacgatcatattaaatacgtcttacctaacaaaggcattattagtagtagagaacaattacatgggaagaaagttttaacaaactacactaacagatatctaccaccagtcactaggccttccacaggcaaaatttacaatgatctattcaatgcaattacgactaggttatatggagtggaacctctacaagagttggtgcctgattacgacgaaacattaagtaacttatcaaagtttttcgtgccaaattataaggaactcatggcaaaatacaaaaatgcacctatcacggttgaccacacacacatgatgcgttgggtagaaaagaaaggtaaccagtataataatatcttagtactcaaaaggcatttagaacagctccaacaaggattcaacatgcaacaagctagagtccattataaagttgaactgttgctcaaagaaaaaatcaagtcatacaatcaacaaattggtagagttatcgtatggcatgagcaacatattagcatgtatttatgcccaataatcgatgaagtaaaagccagaatgaagagcctattaagggaaggtatactatatacggatggtaaagacttgttcaacctgaacaaaagtgctactatcgtaccatatgacgtcaattacaaggtattagaacttgacttaagcaagcaagatcgacaaacaagtaaagagatattaagtaagcatttcacatttatgcaggctttaggcttaacagatggtcataatgccctatatcaggaattactactgacatggagctttaattcaagaacgaagatacgtggcaacttaccacccatgcatatgagcgggggtacattcaccggtcttggcaatgaactgcgtaatctttatatactatcagatatcaatgcaatgtatcctattgattacagttggtcattaggcgatgatagcataagtttaactaaatcggaaatggatgaagaagtattgagagacatggcagccaagagacacaacgtacgtctaaccattagtttaggaaaaaccggcaaattctgtcaattaatatttggcaaaattcctggagtgggttggaggttttcaccttcgattatacgtctatttgataaattgtgcactggagttggcgattacatggccaacttaagagaaagagcatatagctacttacaactaatagggcaccataggtatgtaattagtacaattaaacacctaaattatgattacttacctatacaaggcactaccatagaagaacgtatatatctaaactgcaattattacaagctaggagacaacactatagaggcatacattaaaactatatgcctaatgtgctatgatccccagcttgaagaacataagttttatgtcaactattaagttttgcggaaatgttgaagggacgcaaataatgagggatggctaaatagccatcactgattagtagcaacctaacaaatccacaagttaagcttgttttcccccccccc

SEQ ID NO: 848 - DNA, 12626 bp, Sclerotinia minor betaendornavirus 1
  source 1..12626: mol_type = other DNA
tatatatatattacaaataccattaccaccatgtctaactacaccaaaaccaacaccagcaccatgaaccaaccaccacgaaacaaaataacaaacattattgattctgttgctctcgaggctagcaacagaatcatgactctcgaaaaagcctcggaaaagaaaagaaaacaacaaacaaaatcacaagatgttgacgatcttgatgacaacaattataacagcaaatctttaacccacactggtagccaagtggcactaccacaacttaaccatggtagcgccgctgacaacagcgttaaccacaaccgctacaaaggaccatttgcaactttagtcagcgatgttcaaatgccgcccaaacatgctgaacgtagtgtggtgactgacttcgctgactaaagttgcaaatgccgcccaaacatgctgaacgtagtgtggtgactgacttcgctgaatgacaagagtgacttcaatgaagcacccaccaccttcacagagatgggtttccctaagcaatacaccactgagccctggtatgtcaagatgttgtccactttccggtctagtgacactaatgctgaccactacaagtctttacacggagtatcccccgctacccaaacagtcatgccatggaagaaaactgacgtgccgaagccaattgaagatgtcttggacaacagtaagactcctgatacacccacccttggcacagcacgaaagtcatgtctatggtcagcaatgaatactcttaatcccaggggtatggagcagatacctatcaatataagtaacttgaagtatttggactaccaaaaatacaaagtatggcgggcaggtgtaacaaaaggttggttagccattgagataagacgtgaccactccaaaaaccacttacactgtctttctggaaaccacaaagagcagttgttatcaggcgatggtaaacttactggtgtcatacattggacaaagatgtttactgaaataaacaatgagtcacagttgtcatggggccaactcaattggagcaacccagatgcgggccgcattaacttttatggtgctaaagcaacggtattggaaaaattagcacacgatctcaatgtgccattgagcatgcttgacagtggtgctgtaagagcacaacttgcatcaacgattgcttcaatgtcagatatagcagtaaaaccacgtgatacacgggttgagcaattgcccaatgacacaagtgatcttgttattgaccagttaagtcgtgactatggtaatttcaaattcatacgcggctccagtggtagtcacccacatccatatcacaatgccgctcggcatgtcatcacaagatatattgtatcgcttttcccaaaatctgatttactgtatgatattggtggcaacatgttgtaccatgtacagaatggcgattggcatgtacactcggtgttcaaagctgaatcgtatgaagacaagtcgcgatatttaacctacacgacagcagtagtgaaacacatcagtgtaagaaaatcgcaaactaacatcactggagccaccaattctatcacacagagtatgttatctaaagttctgacagcagataacaagttatggtgtaacagttcatggggggattgtcaacacggcactaagaatcatgcaacctttgctatgtctgttgacacgctgtttaacatcgagccatccgagttgttaaaagggtatattgcgcataaggtaatcatggcaaaacatgccttgaccgtacccaaagcatggcacatggccgattctggcactttaatgtttgatgaaggctattggtctaaatctgatggcaatcttaatgtggtgtttcctggggagtcaatgacctaccaaaacagcataagtttgattgatacctacataaaacgcccattaatcatgggtgacagccatgctatttattgcagagtaaacggatacaaagggccccacctaatgatagaccattttgtgttgcctcgcagcctcgttatagagcaatttatgaaacatacgatctggtcaaacccggatacaaatacgattgtggtcgtagtaccagtgatcgatatacacgccccagttactctattaaagcaacaaccattcacgatggaagcaatggtattaaatatacctttttatgagaagttgatgaatcggttactgcaaccacacacgtgggagggattaactcagtatgcagccggtctcgtaggcaggacctatggctctgctagtggttttacgcgccaatttgacataactaacagagacgtgaaaaatcattgcttggttgcttattggtcgaacaaccgttcccttgagtctattcgccctctagttaggcgagctgagattgatgtccaccaaccatcttttctgcaacagctttggtcttcacttaaaacattcttaactgaattgggccgccagtttgaccccactgagtctgacttcattaaaaaactcgttagtgacaattcagaagactccatgcacttagggctactacttgacagtgcattcaaggccattgatagtgttaacgccagcaccagattagatgtatcgcattacataactaacggcatgatgtatgagacaggagttactgcaacaacaaaatgcgtagatattgacacgtggagacaaaatcatgtcgaggtatcacatagtactgtctacactttaataacaggtaaagatgatatcactcatgttaccattgagttgtgcaaggctgcagttgagtgccaacacaaccacaaagtagcccatgaacatgtagtgggtaattcaatagaccaacgagtgggcatctgtaattgttgtaaaatacttagcacgctgaccgaccaaaatctgtgtgcgctatgtggaagcaccaggttgtgccatggtaagagccatctctgtaaacatgaacataccgttgtgaatgatgaatgttgtggtaagccagcatgtacgtgcaagaaaaattataaatgttcatgttgccagatgcctagtccattaccagtttgtgagatgtgtcgcaacgccccgcctcctaaaaccgcagtgtgggatgcaggtacgatacggcaacctagttctcaggccgatactggtcgccccgaacccacatctacgacaggcgacaacagaacaggcgatgcaaatgataataatgacaaacccagtggcgatgatgcaaatgatgatgggccatttggaatgttaagtgatgcttcacgacgcgcaagtattgtaggcgctgaagatactaatttcacacaacacatgtcatttggtgaccacccgtctactataccaatcaataccaatattgtagaccgtgcccaagccttacaaggaactgactcgccaatagactatgaagactttgtcgctgaaggttcagatcactctgttgttagtttccaaataccagatgacacatctaccatcaatgacagggtcagtgctgaaagacaattggatgaactacgcaaactggtgcccattaacaacgaaccagtcaatgagtatgggtttgcaggcttagaagcattaagtactgtgtacaacgccattcgctttaccgagaatgcggctaccaagtcagttactaaactaacattgccaccaaacttggttgctaggcagacaacggtcagtgctgtcgttattgcgtatggcgaagctcgcggtgatggcctgtgtggtgcacatgctttaagccaattgtgtgatagtgatatagacacagtaaccactatactaaagcgtgtaactggtaaccatgattggtggtcagatgtcgaacttgccaaagccgctgcagtactacgtattaatattctgcttgctacgccagctgggtctattttgtacatcaatgactctagccaacgtcattatgtcagcatttgtaccttggttggcttgacaggacaacgacattgggtaccgtgttccagcatggttgaccaactttacactagtgacctacgtaaccaatattataattatatattcctagcgacttatgcgagcatgagtcaagacacatctaaaagtatagaagatgtacgttcggcagttgaccgattcgaaccaataaatgttgactctgctagtatcatatcttaccacgttgactatgagtggtcaaacataattgccaactaccctaatggtgtgttcactacccttggttatgaacatacatctaagagcttttatggccaaccaatatcaaactatgtagctgagggtgaaaatgggctgttaatggtatctgctccaaccgggtttggtaagacaacgcgcattgctgagtttaatgaccaaaagaagaatcatgtagtgatatcaccgagtcgtgccacggtaattagtgcaactacgtattgtaacgacgtacttaacataacgtcccagggccgcgcagactcaacttggcatccaaaaggtaaaagtgattcaacccttagcacggcaaaagtagtttacctaacagtagattcagcttacatggcattgtgtaacggtaaacctaacgcgacttggttaaaaatgctgtctggtaggtgtatatggcttgatgaagtccatgatttgactccaaagtatgttagtttagctaaggtgttgggctcacttgtaacaggcgtgctgtctgccactttacctaatttaccacctgttactgatacattacacccaatacgtacaatatttgcggctcctgatcaactagacagtgactttaatgattttatagagcgtggtcccgaaaaaggttcattctgggtggtccctagctctactcagacagccaatatgccagcagagcgtgtcacgcaagctaccaataatggagttaaatttgcgagcataacttcaaagactttagctagtctcgacctcactaatgtgaactcggctatatgtactaattgcattactactgggtcaactttaccaggcttagaaaacatgcatgacttgggctatcgaataaccccagagttgatatacccgccatataaggctgaggttaagggtgttaacaagatgagatttttcaactacaagcggcatcaatatgacatgacacagttaacgcagtcacgagggcgtgcaggacgaacaagtacggggtacgcagctatgtctctacccgctgcagccaatgcaccagctgtgcatgtggaactattatatagcttgatggttggcatcccagcaaatacgcggtgcaaagacttatatgataatttaaaaacaaacaaggttaactttgatgccattaaacgagaacgtgacattgcaacgcaacgtggttatgatttccaaaatgagcaatgggatgtgctagatgcatggattgagactgtaagcgaactatatttgcatctcaaaaacaagatagcgagcaccgacgcagtcttggacaacaacacaatatcagcagcctttatgtctgctcttaatacagacagcaaattgcacatcgacaaatccatcaaacggcgtatacaaaccaatatgcataataaatcaattcactatcctaaattacacaagtgtgactgcgggttactaacaatccttggaaaacatggatgcggtaaccagctcgtgttacccaaaccagaggcggaatggttcaacatgactattgagcaatcttactctgacggtagtttcagccaccctaaatcaattttggcaatcgacacgtcatcttctgcacgtggcattaatttgtcaacaaagctgtcacagcaatttgtgtcaatatactttaaaatgctcaacactatactccacgcagctaaacatgctacaaccagtaacataccaacaagtataacccacggtgttttgtttgaaagcgtcaatagtaacaagcacgttaatgtctctgagttgaaacacccccataaactcaacagtggttcagtactgggagtttttgatagtaatatgagagtattacgccttgagtgcgttgtgggtgctacaattgattgttcagtaacatcgccgcaagcaatagtgattctacctgtgcatacagcaaactacgcgttaggcatggggctagctagtctagcgcgcaacataacactcaatgatgccatcgcagttgccacacgctccactattattgttgggccacctggttccggcaaaactcgtgaattacacaggctgtttgataatgaccagcagacaaaacgaatagtttctaaacagactgaccaaatttcggaatttaagaatattactgttccacccacggctgctatattctctgacaatgtagaaactatatatgtagatgaattcggtctaatgactgcatctgatatattgctattgtctaccaagtgtaacaagatggttatgtcaggtgacgtcaaccaaaaaattgcagatgacaccgatttggacacatcaactacactcgatctctcatggtttagggacaacgtgggttcttctacagttttcaatgagtcatggcgctttgggaccaagactgcgtcggtgctgagttattttggcacactaggcccgtgccataatgcaaacgataaaggcattggtatggtacagtttaactggctcaccaagaaaaacttaaatacaatactcattgaccatgacattcaattgatcataacccattctaatgctttagcaatgcagatcaaattaatattaggcacaaacagcaacattagttgcacgacgacgggtcgagctcaaggcagtcaggagaaacgtgtattatatgtggcttatggtaataccagtgaaacttacaccgctgccgcagatttgccagccctatcacgacatagcgaacactgtgttatagcagctgactacacgtttgaggccacagcaaagacatacgggttcaataaacatatgcaaaatgtagactcaatgagatacggggctaccacgatgcccaaagtcagtgacatgagcgtggactatgttatggaagcctggtcaaacatacgcttgaactaccacaaatttgctgaacctagatataacaaagcatttgataattacctgaaataccacaaagcattgtcacactgcattgattacctaactaatgacgtgtctggcactaatggtttagatatcagcatatctgcttgcgtgatatataacaagttgtaccgtggtgttgatgatgctgaatttacgcggccactaacgccacaacacctagaagtctacaatagtatgacgaacatactcaacacatttggccccggagtcacagtgtcagttgagcgaactgccgaagttatgagcgagtacttacggcccatagttagtgtgcgtcaatactttatcctgccattttcaactaacgtaaaactgattggtaatgccaacaaatttacatcgtatgccttgtgtaacgtgctctctggtaaaatcataatgacacaaaccaataacctaacctttcagcgacctactgttaattcattgcgtgccttcattgaatcaatgaaggacaatgttgactgggacaaggacatgtgtgcacgaatgtccataagtaaattgctatttgagcgcctaaagaaaagtgtcactatatcataccaagagatgttaaatacatctgagtctatatataattacaccatcaataaagtgccaactttatactcgctgtcacacaacaaagcacccaacttgcctaaatcccaaacactatttgagcgtattatcgatagcctacttatcgatacaccatcacctaatcaaactattaccaaggtctacttggatgccgtcaaccaactagtagagggtgacacgcccaaggggtctagcttaggctacgccacattatctgaagagctcatgtacgatgctcttgtgagcacattacgcgggttctatgagcataacaatgtggatttgttcatttcgcaagtgtgtgacattacgtctacgtgttttgacgctaaagaaactgcgggtgacacgcacttgctcactttaccgataaaacgcttacaccaaacggttgaacacattcataaacacatccataacgtagtaatagtagatgtaaagaggagaaaaataatagcaactgtggatatacgacccagtactgaacattattggcatatcagcgacttgtataagagaactcatgcactcctactgctgggattggtagatgatcagattaacacatacaataactatgcgttatgtaatattatctcaaatgttaaggaaaccgccacaaaagcaattacagcccaagagcaatttttctcgaagttgctgaagtatatacagaatatcataagctcgctccgtataaaggttcttgaaggaaaagaaatacttaaattatgtggcatagagcaaatgtatgctacacgtatgaagcaatcaaacggaacagcacaaaatacagcagaaacacaaaatgacgtacattcactatcaactagcactttgaaacataaagctgtcaaaggcttgcagcttatggtattgggtcatatcgctaatcattatgacattgatatcaataagcagctacaaagaactgtcgcttcagctgtgagaatggcacacgacgatcgggcgggtgatgacctttcaacatcaccattattacgtttatattacagcttaaaactttatgctcagggttatgaaacaggcgctgccaacattatgggatatgatgtgtttaatatctgcaacgttaaggtgactattaatgaatcgttaccagtgactttgctgcgtcgtcttaatgatagcgcgcgtgatagtttaatgagtgaaaccagccgtaaacacgttgttagtcccaaacacactagagtaagtagttcgaataagtgggacggccaaagtgtaggtttatccatcaaacgcatattcgccacaagtgagagcaatccagccgacgacacaccatttgatgacctgttatatgaactgaaatctacactgtcagacgacatatcagttacaacttcagagaatgctaacaggcatggtatgatgaagctcaactcactcaagatggtacttgcgatgtatcctaacataaccaccacaatgctagtgattacgaaagcctattatgagttgtataaccatgtgttctcaccagtattgggtgcattacagaacacaatatgtaagagtgtaatcaaggtaaaaaatagtattgtgcggtttctggaatatgatgccaatcttgccgatgccaagttggaaatacaagatttacgtgactcattagatagtgcgcgtgaaagccccgcacttacgccacttgatccartaccaattaaagatgatagtagcggtgctgagtcgtcaatgtatgaagatgctgctgaaggtatatgcaacaaaatggagccagcaagcactgataaaatccatgaaaactcggtattagcggagtatgtaaaacaacaacttatgtctggtaatggttcgataagcgagtcactgttcaccacatgtggaagtgatgtgaaaactaaaatggtgtacagtcagagagagaaattcaagtcaagcatgtttgttaagtgggatcataaagcaagctattcgacagttcatgccaggccactaccaaaaataaccatgggcacaatagatagcgttatctacatggtagtcgataaagttgccttgaagctagtacccacatatgagggttacaagatttggtggaacgatgctaacgcattgagaaatgagaacaaactgtgcattggtctaaacctgttgacacgcatagctggtgataaggcaagtgacatgattttagcattgatcactaaaatgtttactgatgttattaactggtgcaagcttaccaaagatgagttggtgtggaaaacaaagtatttggccaacggcgtgtgccgatcaaagtacaactattcattctcaacgatgtcattataccatatcctacaagacagtaaaccgttcaggcgactcatgtgccatgatacaaggtcaaggtttacaatggttggtgacacgatacacattactaggaggactgaagcactagtgcttgactgtcacacctatgctgtagcaagaaatactgcgactggttgttgtctaactatttatagtgccctgcagagtcgcattgacataatggtacgcgcaattgaagcaaatatggtagcaggtttgtgtgactacacagatagggctggcaaatctgggctagacggcttgaggaagctgggtatcaatatagactctagcacattgagtgatatagactttgtgaaatggaaaagcattttacgggatgcgttggaaaataaccctcttagtgcaatatttgatatgagcttagatgatacttttacatctttcaaacaactgatggaaagtgagaaagcaatgctcgacattgagaacaggatagacaacaccatcagcttactaaaatcaagagttgccatatgtatgccaagtgggcacggcaaaacaaccctcaaaggcacactactaaggaaatacccttcgatagatgtgtatgatgctgatgactacattactgatattgacgcgctaggatggtctaattttgaccgtatgatggcgcagtacagkttgcgtctaactgaagcagtcgagtgttctagtaacaataagcccaagttgatactgtgtcatcaccccgatgccgtaccagatgggtttagcatagtactgttcatgaatagtgaaacgccgtacacaccggaacgcttgtggaaacaaaccaatgaggctcgtttgttggcaatgcaggacaaatatccgctgtatactgtaacattttcagatatggaacaccaaactatcttgttcatgctccgatcaggtgccacgccgagtatcaagttgcatgcaaagagtgagctggttgatcctatgccatatagtgaagcagagcaattctttcaatcgcctggaccagataacttgtggcacatgccaattcaaggaaggttaggggtcaatgaccacaggctaggcactgcacaacaggtgatttacaagcaaggaccacatgtaggcttgtgtagaccgacagtgcaaatgctgtgctctagtactttcaatgcggtgtcttcacgcttacgtggcattgaacacctacgtaaggtaaatttcagccgagaagaatacatgacgaaaatgagctattggttcaaaccgaattggcgtgatatactacacgactaccaaaatgaggtagtaatgcctagtgtttctgcttcacttgagtgggctattaataagggacataaagttgaactcatacgtgatatggctgaagctgtcttgaactatgagcgagctactgagtacacaaatatacaagcacattttaaagtggagaatcttatgaaagagaatgtagatgagcttgagcaccagcttgggcggatcattgtttggaataaccaaaatgtgaatatgatcttatgcccaatagtcaatgaatgtaaagctcggtttaagaatttatttaatgacaatttgctaacatataccgatggtatggatatggtatcgttaaataaacacctcagcaagaattcacgctcaaagtatatgattgaactagatctcagcaaacaggataggcaaactgacaaacaaataattgattttgaacagtggttgttaactgaattaggacttgatggacgagttgtacattacatgaatggtatattaaatgggtttagcctcaaaacaccagacaatgttaccggttttatgcctacgatgcacctgtctggtggtgcaatgacatctttggggaacgagatgcgtaatttgttactgttatctgacatatgcaaaggtaaagcagtaaaccatgtgtatacactgggtgatgatagcttgatacttacggatgacgattttgatggtaagtatgtggcaattgtagcagctaataaccacaatgtcaaatgtactttcacaacgtctgaacactcaggtgtctttttgcaattgatagtgatgtgggtaaatggtagatacatagctgtacataactttgtaagactgagggataagttagcatattcaccatataacgctgatagtgatgaatttaaatccaagacagcatcttatctattaatgataggcaaccattatttgacaagtaaacgtctcctagagttaggatttaatggcacaataccgttggggacgacaatggaagacaggttagaagcaaatgcgctacataataactgtgatgtggctgacgtactgaacattgtgcacgatatagtagtaatctcatacggtaaacacgaaagcaagctaacaattactggtgtgggtgtactaagttaccgacacctcaaaggcggtatacacatgacaaaaggaagacagagtgatacctcattgttagcatcatttcagtcggcagtgcaaaaagaattggacaacaactaagtcgttaaatgtgaggccaataactagaagagagtcaaaggtagataaccttttttaacccc

SEQ ID NO: 849 - DNA, 10513 bp, Sclerotinia sclerotiorum betaendornavirus 1
  source 1..10513: mol_type = other DNA
atataaataagttaatacaatcactatgtctcaaacaatcacaaacacaactattactactacaacaataaccgatgcacaaataaatacacataagagggcttttgggtccctctctaaagattacccaaacaaaaaccatcagcgtggtttaacttggtttgatgttgttgatccacctaagcaacagaaacattggcccaaacttacgcctaatccgcgatggaagaagctatcaacgtcaaaaaatgctgttggtaaagctgaacttggtggtgaaacccaagttatggctagttacaattgttggcagtgcatttttggctatgatttaggtattgatactgctatctcattagaaatgattaagatgacgattatgtgtcagcccgaagatgctgcacatatccagatccaagctagttatgctaatggcatgttacacatagcaaatccacctggtttaccaaccggggagatgacacctgaattgttcaacgcccagagaaaatttgtcgagcatccaattgatgggtgcattaaattaattgacttagttgatttatatgatgagggtaccatggttggtttcaccccacgaactatcacagagaaattagctaatgacattggtgttgacgttaattcagtagatacacaacaacttaaaaaagctatctctgattcagttaatagccgtggtactaaggctgttaccaaattcacagaccaggcaattattttaccgacaagttgcccagaagaaattgttaatgaccttaataatgaatttggtaatgcaacattcatacgtggtaataaagagcaccatccacatatttatcacaatgctagtaggaaagctgttacaaatttactatgtggttggcatggtagagatgcgctcatatatgatattggcggaaacccagctagccacctaaatgctggccggtttaccgtgcatagtgtttatagtaaaaatcaagctgctgacaatgcgcgacatattaaatggtcaaaacaatgtgtggcatgggctcgtcgcaacatgaacaatgaaaacaatcattctgtcgtcaatggtgtggcaaattcaatacttaaacctaacagtgcattatggtgctcagatggaataaacaagtgtgtgcattctagtaagcatggttcttttggcatttcaattgacactttattccatttacctgttaatgacttgtttgatttctatataagaaacaaggtatttcattcagtacatgctattactttgccaaccaattactcatatgctagaaatggtgcattgaaatacaatgaaggccattggtataagaagaacgatgattggacaattgagttcaatggcgagagtttagcatatagtcaaagtgttgccctcacagatacgtatttgactgtgcccttacacaatattggtgaaatggttgtttattgtaaagtatcaggctacaaaggtgctcacttaattattgaacattatttgattgatcgcgcacaacttgatcaattatatcttaagcatgtaatgtggttcaacaccaacatggatgaactatttgttatggtgccacgtattaatatggaccagtcaactactgtcatgggtaggattccatatactatggaacaagttgttatcaatgttagattctatgagcgtcttctaaataggttaatgcaatcatacacttgggatagtgtcttgtcatatgctgctggcttaataggccgtgtttatgctacttcaagtggtctacatatgaaatggaatctaactaattcacaggttcgtgatcattgtttaatcgcctactggactacaaaccgtatcaatgaatcgatcaaaccactgctagcacaagcagaacatgcatcacgagatccagattttttaactagtctatggaactcacttaaaaattggcttaaagacttcggatcacaattcgatcctactggaaacaatactgtccagaaattcattgctgataataaaggtgatactcttaggctaattcagatgtttaatagtactgtacgcagtgttgaatcgcttaacgtggcaacgcaaatggtacattcaaggagcgttgttgactgggttgcttcttcaactggtgtgagctacaggcgtcttgatgttgatattgacacctggcggttaaatcaagacatgagtggcaacaaaatgacggtatatgaccatattgaattcaaagatgcaaaaccagctggagttaacataggttgttccatcactaaaacatgtacccatgatcacaaaccattccatctacatctctcagacctcagcagacgtatgggcaattgtgcatgctgtggcgtggttagcaacttaaacataaccaaactatgtactatatgctccgatatattaccttgccatggtaaaaatctacggtgcactcacatccatgaacaattaaatgatgagtgttgcttattaacaaaatgtacttgtaaaaaagataagaattgctcttgttgtggactaccatctgtcggtacatattgtaaagtatgccaatttctgcctgacaaagcaacaaataaacagccaacaaattcagttaataacaacagcacaactgtcgcgcctattataatgaaacctacgactgaaagaaaagatgctcctgtacgattcacatttgaaaagccacaagttagtaacacacagaatgagtttaaaaagaatgaatcagccacccatccccttgccactaacaatgactctctatttgttacacttaaagagcagcttgttgatgatgttgttacttttgatgacaaaactaccattaaaagtgatgatgctgagatacgtagtgttgctaccgagtcgattgtatcagttgaggccagcgttgatgccatccaactcaatgataataatattgaaccattgttgcctgaagaagaggttgcaggcacagaacagattagtaccttaatgagggctgttgtcagcgttgatgatgttaacccaggacatgctgacacagtattaacaagactgccaccacggtatcaaggaggcgtggctgtccgtgttgttgggtatacagatgtgccaggcgatggcacatgtggtgctcacgcactaagcgtagcacttgggctcaacgttgatgaggtgaaacattggttaactgttgccactggccatgatgattggcataactctgaggagctggctgcttgtgccctagcatatggtcggaatctaatctgtgttgacattggtgacactaccatttacagaggtggtgaccaagattatgctggctctattattcatggtactgttgttggttgtggcgcacactggttagccgggaattgcaacatccttagttactcatcgctcttcacaaataagctaatcagtgattataccaatttattacgagcagctcatctcactctaaatggcagtgatcaaacagcccttgcttattcacatagtgatttagatgttgatagtattattgacatgaatggcagtatcatcattagccgggaaggtatctcagtgcaacatgagggtggtaactcaaagtgccaaatatcagataagtcagatgacattaaaatgattattggaccaactggctctggcaaaactaccacagctttccaacatattgaagggaaagtattattgatcacaccactccgatcagcagttaataatagtttcgattatttaaagaacaaagtaaaagtggtagcccgtgcgcaaggtgcttggatacctgacaatattaacataaaagatataaccaagtcagatctggtaataatgacaatggagacactatattctggtatatttattggacaagacaagaaaaacatctaccatcaacttgtttcagctcgtgcaattatttgtgatgaagttcatgaaataagcccacactatgccaggctattaactgtactaccaaagaacaagacatacatctgctcagctactatgcctggtatcaagcttgattataattgtaagtttgatgtaacaacgaactttgttcaaggagacatcgttgattactggtttaatgaagtcaagacaagtagaacaatgccacttaatacatgttatatagttggaacaaagaatgagtgcaagtttgctgatatgccaaatgacatcaaagctattaattcatctactatcaatgaggtaaccattaatgaagtcaatagatgtattgcaacaaacatagtgacaacaagcattaccatgccacaaattgcaaacataatagatttaggagttagaattacaagcgatgtgattgttaaaccatatctaactgatgttgaaaaagacattaggttcttcaattatagtaaacgcctatacagttgggctgaaatgacacaggctaggggtagagttggccgtgtttctgatggacaattttatggaccatgccctgataagacaactcgacaatcaaatattgaagcaatgttaaatagttgttacacgcgtgctccatgctatagtggcttactacatgagtggcaaatgattacacaaaaaaactatgatgaagcagtcaatcatttcacaaagcttggtaacacatttgatagtaaacctaaatggtgggatgagttccagtcatggcaggaatcagttgcagaattattacaatgcaaaaatgctaacctacaacctgtgtttgttgatgaatacatacacaaagaagatattttagcactaataccaaattacattggcactaatccaatatcaacaagtatgaaacataacaagaatagagttggtgcattacgttatagttgtgcagttgattgggataatgtcttacctaagcacttgtatgaaacaactgacaatattgattttgaaagcttagtgatatctgttcccgatagctctcaatttctcaatattgaaactgattctaatgaagagatagcatctaaactacggctgttagctatagctagtatattaaatgcaatcaaaggcttaatggcgcgagggcaaatctatattaacactaataaatggagtgatcaacatggtcaatatatattatatgatagtttagaagatgcccaagcattatcaggtattaacttatcagagtatgacattattggtttagttgatattaagaaatctagcatgcgtatcacacattatcagcaatcaaacaaatgggtaggttatgttatagtaccaacttacaaaacacaccactatatgggccaattaactgacattggtttaattcgtgatcgtcaagcaccactagttgacacactacgtaattctacattgtatgtgggaccaccaggtagtggtaaaacgacgatgatggttaacgaaaacaaatcgtcgtatactacaactattagttcagggcaattaaaaaaccatggaacatggttgcccccatcattgataccacatagtcaagaaaacatcaatattgatgagattggattgctagatgtttcagtcatattatcactcgctagccggtctaataaattaacaggcacaggtgatatcagtcaagttgtgcatattgccaatgaaaccaatgcctattacactggatttgatagtggcattgatttattttcaaaatatgctaacaaaatttatttagataagactcaccgttttggtccactaacatgcaatttggttgctaaactaggttttgatattaaccccaccaatatagataaaattgaagaaattaaaggttatgtttgcgcaacgaatgacaataaatcatatagtaaagtactaattgcttctgagcctgatgcaataatctgtgctactaatcacctagcaagaatgtttagaaaaattactcaaattcctgtgtataatatcgctaaatgtcaaggcattgacacaccaaatacattagttgtactacaaggcgggcagatagacgtgctagccaataatcaactgtatgtggcgttgactagacatagccaaagattatcaataatagttgatccaccacatgcagcattactaactcagttatgcattgaaactgaaaatatgatatcttacgctgatgctcttggtggatcaagtaatatcactcaaccaattttcaactacatcatcgagtccaatatgaatagattgcttaatgatgctcaagtgatgaactatctaacaacgatctgtgctctgcaatcagggaaaatttcaccgaatacaatgattgtaattatggaccagatgaattcgcactataataactgcccattcaagtttgttagactccgagagatcaaagatattaaacaattggagtgcgtcgtcagtttgtatggtatacagtgtatagtatacaatatctcaataactgatgaacgagaactactttgttgcctattgacacaagtaacaacaaacaaacacattaaagagtatttaagaagtctaccaaataggtttgcggcaactggaaaaaaactttgctataacttatacctctggcttagtaaatttatgaaagataatgcttctgtgctgagtacttatctttatgctaatgatactatagacattggaggtggtgtagatttatgtcatgtattgtggttggcaatcaatggtgttcggagtgcgtttatgactttaatacatttattggatgatgttggcaataaattatctaaatatactgatgggagttacgcagccgaacaatttaaagagttattaatcgatacttggaagaaaagtaacccattgagctttggtgatcttaaaattagcagtagtgttatctcactgtttaaaatattccgcgaccactttggtagtggcatcaaaactctgtgggatttcatccagtatgttgttaaaaacatgcgcgaatggtgggaaaatcaatttaacaatgacaaaccaatatactatgaactcgaaggtaccagcatgtcgttgatagttactgattcaccatgcattgatataatgagaaatagtttggacggcgactactcattgattgatggatctccaactatttcaaacacacaatatattacaaccttggataacttaattgacaattcaacaataggttgggagaaaaaggacgttccctcacccacatgtgaggactgtccagatgatatacaagaagttttggatgaaatcgaagtattatttgactatgaagctgagactaatgagaaatacgactcactaattgacaatgaacaccatgagtctactcatgagtgttctgaacccgaagttgagtctagtccgtgtgaacaaaaaaatgaaaaagaaaacatcaaacaaaatcaatgtttatgcatagaaacatgtaatgattggcaactagctgatacaatagttactagcttagacttaaatacttacaaaccaaatttgatgggtaggatggtaattgagaaaatatctgatgggattaagataaacttaaaactaccaggtgttgggaaattcaatgcggttacaaagaaatgctgtggggataacactcatctgatatatgtaaccgtcaatggtgagcagttaaccttaaagatcagcaagattgcatcaggttatgagctctactgcatgccagatgttgttgatgtaaacttttcacagcttgaacaagctattaaaatgttgagtaaattaggaggaggcaagcttaacaatggcatgactttactggttgattctctcaaaattaccagaaaatttattaaaaaattggttaggttgacacactataaattaaagtatctaatgggtacaatcaacttgcgtcatcttacaagtaacaggtcaaacttagaagtttaccgtacaatatgtcatagattaccaacttcatatggcaacagtaaatttagtacacgtgagtgtattggtggtactgttttatctaccattgaattgatacccaacaatgctgcaaaccgaagtgaaattttcattgctatttacaatgttaatggagatacacaaatactaatttttactaatgataataactattcaaattacattacgcgtcgtctgatgactccagttgaacatggtaattttgctggtgacaggtcagcaataagtgcattacttagactgggtattgatatcaaatccatactgacgcaggataatgatttgactatcgatgacattaagaagtggctattagcaaacccgctgacttctatgtttgatgttactgaccaacgaacatacaataatgcaaaagagcattcaattgttgagaaacatttatttactgatatccacaatatattagataagccattagatgttaaatatgctttttgtatacctagtggtcatggtaaaacgacaacagtaaatcggatacgaagaagtaaccaagaatttacggttttagatgttgatgaagtacaagaacaggcgacaatattacatttagggtttgaagataaaatgttaaattataaagagaagctggaaaaatacattgctaatagtacaaaaccaccagatgctgtgttcatacattcgcctatatgcgcacctgcaggttacaaagttataataattttaaatgatggtgctgatgtcccattggatagaatttggtccgataaaaatgtctgccaccttgaaagcatgaataatattatccatactcagaattatgatgatgtgtataatgtaacaataaactatttaaataaaaagttgaccggtgatatcactttagaagatggaacaacaattgttgataacatagatagtatacttggagactcgttcatgagaaatcatccagggtacgatgatatctataggttgccaactggaaaacaagatattctgaatatgaatactggaaatattggtttaggtgaacaaagatttttcaaaactggaccgcacccagaagtaatgcgtccaacagtgaataaaatgccatctgccttaccaaacgcaattatgacaaggctaatgggtcgcgtaaagtatagaactgttgacttaactatcaaagattaccataaattaatgactaaattcttcattaaaggttatgagtcaaagcttgctagttacacagatgacccaattaatttaaattatgaagacatactcaactggttagtggcgaaaggcaataaaatacaactattggacaacatgttgcgatctgttaaagacgatgagtttgctactgatccagctaatataaacgtgcattataaagttgagaatttaatgaaagagcaagtcaatgatatacttgatcaagtaggtagagtaattgtatggaataaccaaaatatcaatatgtatgcttgcccagttattaatgaggctaaagcacggtttaaatcattattgaaaccaaatgtcatttacaccgacggtatgacggtcgctgatatgaacaagagtataggccaatacaaaagtaaatggctgcttgagatggacctgtcaaaacaagataggcagacagatgcacagatcctgatttacgagtggaagctaatgggtatgttaggtgtgccagatgtattgatcgagtttatgacatcatttataccaacattccgaatcaatggcaccagccatgagacagcaaaactaccagccatacattttagtggtggtgcaatgaccagtatgggcaatgaaatacgtaatttattactgttatcagattgtattggtaataattacgttgcgatatatactttaggagatgatagtcttgtcttgatgaataccaagcctgatttggaattatacaagcgtatttgtgctagccggcacaatgtagagaatacagcggtggccagtacaaattgtgcattatttttgcagatgatagttgctcggaatgaagatgggacatactatttgagtcataattttgcacgtcttaaagaaaaattggtatattcaacatacccaaatactagctccgattggaaaatgaaatatgcatcatacttaatgatgataggatactcagcccaaaccaagagagcaatggagtacagtggattcgtgtctttccctagtttaggaacaacaatgtcacaaagagtctcagcaaatgctttgtacaatgagattaatgatctacaagtgttcaacataattaatgacataatcaatgctaaagagcaaatatcagaggagataattatacaattgccagtgataatgactggtagcaaacttaagtcaggtatgagtaaagttggcaaatacgtcgacaaccacaatacgatgcatgaactattgatacaatatatggaagagcacactgagacttagggtaacactactttgtaagtgttacccgaatacaagtaagcacctatttttatttacaactgaacaccaaacaacaaccaactatgtgtattcgttctgtgccccccc

SEQ ID NO: 850 - DNA, 10770 bp, Sclerotinia sclerotiorum betaendornavirus 1
  source 1..10770: mol_type = other DNA
gtgtgcgtatgaatggaagtctatgggcaattaaccctcactaaagaattcgatcgatcatgatgcaacggggcaattaaccctcactaaagaattcgatcgatcatgatgcaatgcatataagttaaatcacaatcaccatgtctcaatcaattactcacacaactgttactactaaaacaataaccgatgcacaaacaaatacacataagagggcttttgggtccctcttaaaagattacccaaacaaaaatcatcaacgcggtacaacgtggtttgatgttgttgatccacctcaacaacaaaaatattggcccaaacttacgcctaaccctagatggaaaaaattatctacatcaaaagatgctgttggcaaagttgagcttggtggtgagacccaagttatggcaagttacaattgctggcaatgcatttttggttatgatttaggcattaacactgccatatctcttgaaatgattaaaatgaccataatgtgtcaaccagaagatgcagcacacattcaaatccaggctagttacgccaatggcatgctgcacattgcaaaccccccaggactgccgacaggggagatgacacctgaactattcgctgctcaaaggaaatttgttgaacacccaatagaaggatgtattaaattaattgaccttgttgatttatacgacgaaggtactatggtcggttttactcctcgtactattacggagaagttggctaatgatataggtgttgatgttagctctgttgatacacaacaactcaaaaaagcaatatccgattccgttaatagccgtggcacaagagctgtgactaaattcactgaccaggcaatcatattgccaacaagttgccctgaagagattgttaatgatctgaataatgagttcggaaatgcaacatttattcgtggcaacaaagaacatcacccacacatttaccacaatgccagtcgcaaagctgtcacaaacttattgtgtggttggcatggcagggacgctctaatatatgatattggtggcaacccagctagccatcttaacgcaggccggtttactgtacatagcgtttatagcaaaaatcaagctgcagacaatgcacgacatatcaaatggtcaaagcagtgtgtggcatgggcacgtcgcaatatgaacaacgatagcaaccattcagtggttaatggtgtagcaaattcaatattaatgccgaatagtgctctatggtgctcagatggaataaataagtgtgtccattctagcaaacatggctcttttggcatttctattgacaccttattccatttaccagtcaacgatctatttgacttttatatgagaaataagattttccatactgtgcatgcgataactttaccgaacaattactcatatgcaagaagtggtgcgcttaaatataatgaaggccattggtataaaaaaggtgatgattggacaattgaatttaatggagaaagtttagcatacagccaaagtattgccctcactgatacttatttatctgtgcctttacacaacattggtgagatggttgtttattgcaaggtgtcaggttacaagggtgctcatctaataatagaacactatttaattgatcgagcacaacttgatcaattgtatttaaagcatgttatgtggtttaatactaatatggatgaattatttgtaatggtgccacgtattaatatggatcaatcaaccacagtcatgggcagaattccatatactatggagcaagtagttattaacgttcgattctatgaacgtctattaaatagattgatgcagtcatacacttgggatagtgttttgtcctatgctgctggtcttataggtcgtgtttatgcaacatcaagtggtttacatatgaagtggaatttaaccaattcacaggtgcgtgatcattgcttgatcgcctactggactactaatcgtatcaatgaatcgatcaagccactgcttgcccaggcagaacgtgcatcccgagatcctgatttcttaactagcttgtggaattcactcaaaaactggctaaaagattttggctctcaatttgaccccactggcaacaccacagtccaaaaatttatagctgataataaaggtgacacccttaggcttattcaaatgttcaatagtaccgtacgtagtgttgaatcacttaatgtagcaacacagatggtacactcaagaagtgtcgtagactgggttgcatcctccactggagttagctacaggcgtctagatgttgacattgacacttggcgaatgaaacaagatatgagtggcaataaaatgacagtttatgatcatattgaatttaaagatgcaaagccagcaggggttaatattggttgtttaaccacaaagacatgcccacatgaccacaaaccattccatctacatttatctgatctcaatagacgtatgggcaactgtgcatgttgtggtgtgatcagtaatctgaacataacaaagctatgtaccatttgttccgatatactaccttgccacgggaaaaacctacgatgcacccacacccatgaacaattaaatgacgaatgttgttcattggctaagtgtacttgcagaaaggataaacattgttcatgctgtggtctaccatctgttaatatgtactgtaaagtatgccaatttttacctgacaaatcggtgaaaccacagccaaccacaacagttgatggcagtaacatcactatcgcacctgtcattgtaaaaccaacgaccgccaaaaaagaggcacctgtgcgtttcacattcgaaaaaccacaggctaccagcgcaaatgatgatgtgaaggacaacacaacaatcaatcatccactttctactaataatatttcccaatttgatgttttaaagcaacaggaagtggataaaattattacatatgatgatgaaaccactattaaagaagataatatggaaatacatagtgttgatgctgaatcagttggtacagtagataccaatattgatgctgaccgatctattaataacgatgttggaccattattacctgaagaagatgttgctggcattgatcaaatcaatacgctaatgagagcagttgttaatgttgaggatgtcaatccagggcatgctgatactgtactaacgaggctgccaccacattatcaaggaggtctggcagttcgcgttgttggatacaccgatgtgccgggcgatggcacatgtggtgcccacgccctaagtgttgctcttggattgaatgtagatgatgtaaaacattggttaaccattgcaactggccatgatgactggcataattctgaggagttagctgcctgtgctttagcatatggccgaaatataatttgtgttgatattggtgacaccactatatacagaggtggtgaccaagactatgctggttctatcatacatggcactgtcgtcggttgtggcgcacactggttggcaggaaattgtaatatccttagttactcttcactcttcactaataagttaataactgactacaccaatctactacgtgcagctcatcttgccttaaatggcaatgatcaaacagctcttgcatactcacacagtgactttgatgttgatagcatcatagatatgggtggtaacatcgtcattagccatgatggaatctctatacaacatgaaggtggcaattcaaggtgtcaaatatctgataagtcagatagtgtgaagatgattgttggaccaactggatcaggtaaaactacaaccgcattccaacacattgaaggtaaggtactattaattacaccactgcgttcagcagtaaataatagctttgattatctacgcaataaagtgaaagtggttgctcgagctcaaggcgcttggatgcctgataatattgacatgaaagatataaataaatcagacctagtaataatgactatggagacattatattcaggtatatttattggacatgacaagaagaatatttatcatcaattagtgtcagcacgtgccatcatatgtgatgaagttcatgagattagccctcactatgccagattattgactgttctaccaaaaaacaagacctacgtttgctcagccactatgcctggcatcaagctagattataactgtaaatttgatgtgacaacaaattttgtccagggtgatactattgattattggtttaatgaagttaaatctaatagagcaatgccacccaatacttgttacatagttggaacaaagaatgaatgtacatttgctgagatgccagcagatattaaagccatcaattcatctacgatcaacaatgtatctatcaacgaagttgacaaatgtatagctactaatattgtgacaacaagtataaccatgccgcaagttacaaatatcattgatttaggagttagaataacaagtgatgttataatcaaaccatatctaactgacgttggaaaaaacatcagatttttcaactatagtaaacgattatatagttgggcagagatgactcaagctaggggtagagttggtcgtgtctccaatggtatgttctatggaccatgccctgacaagacaacacgccaatcgaatattgatgcattattgaatagttgttatacacgtgttccatgttacagtggtttgctacatgaatggcaaatggttaatcagaagaattatgatgaagtagtcaattacttcaccacacttggcaatacttttgataacaaacccacatggtgggaagagtttcaatcatggcaggattcagttgcagagctattgcagtgtaagaatgccaaccaacaaccagtgtttgttgatgagtacatcaacaaagaggatatcttagctttaatacctaactacattggcactaacccaatttcaacaagtttgaaacatgctaaacatagagtaggcgctttacgttatagttgcactattgattgggataatgtgctacctaagcacttrtatgaggctacagataatattgattttgagagcttggtgatatctgttcctgatagctcacaatttcttaatatagaaacagactcaaatgaagatatagcatcaaaactacggttactggctattgctagtatactaaatgctatcaaagggttaatggcacgtggtcagatttacattaacacgaacaaatggagtgatcaacatggccaatatatattatatratagtttagaagatgcacaagcactatcaggcattaatttatctgaatatgacattattgggctagttgatattaaaaaatcaagcatgcgtattacacattaccagcaatctaataagtgggttggtcatgttattgtaccaacatacaaaacacaccattatatgggccaattaactgatataggtctaattcgcgatcgccaagcaccattggttgacacacttcgcaactcaacgttatacgtgggtccacctgggagtggcaaaacaaccatgatgattagtgagaataaatcttcatacaccacgactatcagctctggacaacttaagaaccatggtacatggttgcccccatcgttgatacctcatagtcaagaaaatattaatattgatgaagttgggttgttagatgtttccgtcatattgtctcttgcaagtcgatctaacaaattaactggtactggtgatatcagtcaggttgtgcacatagctaatgagacaaatgcctattatactgggtttgacagtggcattgacctgttttcaaagtatgcaaacaagatatatcttgacaaaacccaccgttttggtccacaaacatgtaatttagtcgccaaattagggtttgaaattattcctactaatatggataaggtcgaagaaattaaaggttatgtgtgcgcaataaatgataacaaatcatatagtaaagtgttaattgcttctgaaccggatgcaataatctgtgctactaaccatctagcaagaatgttcaggaaaattacacaaatcccagtatataatattgctaaatgtcaaggtattgacacacctaatacattagttgttttgcagggcgggcaaattgatatgctagccaacaatcagttgtatgtagctctaactagacatagccaacgtgtctctatagtcgttgacccacctcatgcagcactattaatgcaattatgtatcaaaacagaaaatatgatatcatatactgatgcgctcggtggtgcaagcaatattacacaaccgattcttaaccatattatagagtcaaacaagaataatctactgaaagatgccgaagtgatgaattatttaacaactatctgtgctttgcagtctaggaaaattacaccaaacacaatgattgtgatcatggatcagatgaatttccattacaagaattgcccattcaggtttgttagattaagaaaaattaaagatattaaacaattagaatgtgttgttagcatatatggcatccagtgcgtggtgtatgatgtttccctaactaatgaacgtgaattgctcagttgtttactgagccaagtaacaacaaataaacatgtcaaagaatatctacgtaatctaccaaggaaatttatgagaacaggaaagaaaattggttacaacttatatctttggcttagtaaatttatgaaagataatattactatacttagtggttacttcaatactagtgaggatattaacattggtggcagtactgatctgagtcacataatatggctagcgatcaatggtgttcatagcgcatttatgacattagtgcacatattagatgatgttgggagtaagttgtccaagtatacggatggaagttacgcagctgaacaattcaaggaactgttaatcgaaacatggaaaaagagcaatccatttagctttggtgatttgaagataagtaatagcctcatgtcactttacaaattattccgagaccacctcagcaaaggtgttaacacattatgggatttcataaaatatgttgcaaatacactacgtgaatggtggcataaacaattcaatgtcgataaaccaacatattatgaacttgaaggcaccagcatgtctttgatagccactgactcaccatgtattaatataatgaggaatagttcggatggtgatcattcgctaattgatggttctcctacaattcccaatacgcaatatattacacaactagacaatttaatagacaattcaataataggttgggagaagaaagctactccttctccaacatgtgaagactgtcctgatgatgtacaggaagtcttggatgagattgaagttttatttgattatgaagaagaaactattaatcataacccaacagttagtactgagcaccttgaacccaatattgatgaacttgaccaaatgcggagatttagctctagtgagcctgtagaaacaaaagataatatgtcctcagttggcatagagcattcagaaccaacattagacaaatcaactcagatagaagaaaacaatccaattaaactagataaggggattaatgaaagtaagcaaaaccaatgcttatgcatggaaacatgtagtgactggcaattagctgataacatagtcactaaccttgatttgaatacttataaaccgaacttgatgggtaggatggttatagagaagataccagatggtatcaaaataaatttgaagttaccaggtgttggcaaattcaatgctgtcaccaaaaaatgctgtggagataatacacatttgatctatgtgactgtcaatggagagcagataacactcaagattgataaaacagcttcaggttatgcattatactgcatgccggatgtagttgatgtcaatttttctcagctggaacaagccataaaaatgttaagtaaactaggtggtggcaaactcaataatggtatgactttgttagttgattcacttaagatcacccgcaaatttattaaaaaattgattagattgacgcattataaattgaaatacatgatgggtagaatcaatttgcgccatcttacaagtaataggtcaaacttagaagtctatcgtacaatatgccatagattgcctacctcatatagtaacagtaaattcagtacacgtgagtgtattggtggtacagtattgtcaactatagagctagtaccgaataatgctgccaatcgcagtgaaatcttcatagcaatatacaatgtgaatggtgatacacaaatactcatttttacaaatgataataattattcaaattatatcacacgtcgcctaatgaccccaattgaacatggcgatttcgctggtgacagatcagcaattagtgcattgctcagactaggtattgacatcaaatcaattatgacacaagataatgacctaaccattaatgacattaagaagtggctactagctaacccactcacgtcaatgtttgatgtcactgaccaacggacttacaataatgccaaagaacactcaattgttgaaaaacatttatttactgacatccataatatattggataagccattagacattaagtatgcattttgtataccgagtggccatggtaaaacaacaacagttaatagaatacggagaagcaaccaagagttcacagtccttgacgttgatgaagtacaagaacaagcaacaatattgcacttagggtttgaggataaaatgttaaattataaaggaaaattggaaaagtacatcacgaatagtacaaaaccaccagatgcggtattcatacattcgcctatctgtgcacctgctggttacaaagtcataataatcataaatgatggtgctgatgtcccattggatagaatctggtctggtaaaaacgtcaaccatcttgagagtatgaataatataatccacacccgaaattatgatgatgtatataatgtaactatcaactacttaaacaaaaaattaactggtgatatcactttagaggatggaactacaattgttgataatattgatagtatacttggagattcatttatgaggaacaatcctggatatgatgatatctatagattaccaaccggaaaacaagatatcttaaatatgagtactggaaatattggtttaggtgaacaaagattttttaaaacgggaccacacccagaagtgatgcgtccaacagttaataaaataccctctgctttaccgaatgctattatgactagattgatgggtcgtgtgaaatatagaacagttgaccttggtatcaaggattaccacaaattaatgactaaattcttcattagtggttatgaatctaaacttgctagttatacagatgatccaattaatttgaattatgaagatatactatcctggttagtagccaaaggtaataaaatacaactgttagacaatatgttgcgatctgttaaagatgatgagtttgctactgatccagctaacattaatgtgcattataaagtagagaatttaatgaaagagcaggtcaatgatatacttgatcaggttggtagagttattgtatggaataatcaaaatattaatatgtatgcgtgcccagtcattaatgaagccaaagcacgtttcaaatcattattaaaacctaatgttatttacactgatggtatgacagttgctgacatgaataaaagtattggtcagtatagaagcagatggttgcttgaaatggatctatcaaaacaagatagacaaacagatgcacaaatattaatttatgagtggaagttgatgggtatgttaggtgtacctgatatattgattgagttcatgacttcatttataccaacgttccgaatcaatggcacaagccatgagaccgctaaactaccagctatacattttagtggtggtgctatgaccagtatgggcaatgaaatacgcaatctattgttactatcagactgtattggtggtaattatgtagcaatatacactctgggtgatgatagtcttgttttaatgaacacaaaacctgatttagagttgtataaacgcatttgtgcaagccgacataatgtacaaaacacagcagttgctagcactaaatgtgcactgttcttacaaatgatagttgcgcgaaatgaagatggaacatactatttaagtcataattttgtgcgtttaaaggaaaaattagtgtattcgacatacccgaataccagctctgattggaaaatgaaatatgcatcatacttaatgatggttgggtattcaactcaaaccaagaaagcaatggaatacagtgggtttgtgtcttttccaagtctaggaacaacaatgtcacaaagagttgcagctaatgctttatataatgaaataaatgatatacaagtgtttaatataataaatgatataattaatgccaagcagcaagtctcagaagagataattatacaactacccgtaataatgactggtaataaactaaagtcaggtatgaccaaggttggtaaatatgttgacaatcataataaaatgcatgaactattaatgcaatatatggaagagcatactgatatttagggtaatattgcaatgcaatattacccataaccaaataactatttagactacgaatagttgaatatacaacagcaagtaattatgtgtatttgttctgtgccccccctgcattgcatcatgatcgatcgaattctttagtgagggttaattgccc

SEQ ID NO: 851 - DNA, 10520 bp, Sclerotinia sclerotiorum betaendornavirus 1
  source 1..10520: mol_type = other DNA
tacaagacccaagttaatatacaatcaaaatgtcgcaaacaattacaaacacaacctctacgactacaacaataaccgatgcacaaacaattacacataagagggcttttgggtccctctcaaaagattacccaaacaaaaaccatcaacgcggtttaacttggtttgatgttgttgacccacctaaacaacagaaacattggcccaaacttacgcctaacccgcgatggaagaaactatcaacgtctgtgaatgcagttggtaaagtagaacttggtggtgaaacccaagttatggctagttataactgttggcagtgcatttttggttacgatttaggtataaacactgctatctctcttgaaatgattaaaatgactattatgtgtcagcctgaagacgctgcacatatacaaatccaagctagttatgccaatggcatgctgcatattgcaaacccccctggtttgcccacaggggagatgacacctgaactatttgctgcccagagaaaatttgttgaacatccaattgatgggtgtattaaattaattgaccttgttgatttatatgatgaaggtactatggttggctttactccacgtactatcacagagaaattagctaatgacataggtgtagatgttaattctgttgacacacaacagcttaagaaagccatttctgactctgttaatagccgcggtacgagagctgttactaaattcactgaccaggcaattattttgccaaccagttgccctgaagaaattgtcaatgatctaaataatgagtttggcaatgcaacgtttattcgtggtaataaagagcaccacccacatatttaccacaatgctagtaggaaggcagttacaaacttattatgcggttggcatggtagagatgcactcatatatgatattggtggtaacccagctagccatcttaatgctggtcgctttacagtacacagtgtctatagtaaaaatcaagcagctgataacgcacgacatattaaatggtctaagcaatgtgtagcatgggcacgtcgcaacatgaataatgacagtaatcattcagttgtcaatggagtagccaattcaatacttaagcccaatagtgcgctttggtgctcggatggaatcaataactgtgtccactccagcaaacaaggctcctttggtatttccattgatactttatttcacttgccagtcattgatttgtttgacttttatataaggaacaaagttttccatacggtgcatgccataacattgccgaacaactactcatacgcaagaaatggtgcgctaaagtataatgaaggccattggtataaaaagaatgatgactggacgatcgagtttaatggtgagagcttagcatatagccagagcgttgccctcactgatacttatttaaccgtgcctctacataacattggtgagatggttgtttattgcaaagtatccggttataagggtgcccatttaatcattgaacattacctgattgatcgagcacaacttgatcaattataccttaaacatgtaatgtggtttaataccaacatggatgaattgtttgtcatggtgccacgtatcaatatggatgaatcatccactgtcatgggcaggatcccatacactatggagcaggtagtcattaatgtccgtttctatgaacgtctcttgaacagattgatgcaatcttacacttgggacagtgttttatcttatgccgctggcttgattggtcgtgtttacgcaacatcaagtggtctgcacatgaaatggaatctaaccaattcacaagtgcgtgaccattgcctgatagcatactggaccactaaccgtattaatgaatcaattaaaccattgctcgctcaggcagaacgcgcatcccgagatccagatttcctgactagcttatggaattcattaaagaattggctaaaagattttggctcacagtttgacccaactggaaatgccactgttcagaaatttattgctgacaacaaaggtgatactcttaggcttatccaaatgttcaacagtacagtgcgcagtgttgaatcactcaacgttgctacacaaatggtacattcaagaagcgttgttgattgggttgcatcgtccactggtgttagctacaggcgtcttgatgttgacatcgacacctggcgactaaatcaagatacaagtggaaataaattgacagtatatgaccatattgaatttaaagatgctaaaccagcaggggtaaacattggttgcgtaactaacaaatcgtgtccacacgaccataaaccattccatctacatctttcagatctcaatcgacgcatgggtaattgtgcttgctgcggagtagttagtaatttaaacattacaaaactctgtactatatgttccgatagattaccttgccatgggaagaacttacgatgcacccatatgcatgagcaattaaatgatgaatgttgtttgtcagcgaaatgttgttgcgaaaaaaataagaattgttcttgctgcggtttaccatcagttgacacatactgtaaagtttgtcaatttcaacctgataaatcaattaaatcgcaaccagccgtagctgttaataaagataacgtgactattgcacctattccgttacaaccgaacactgttaaaaaagaagcatctgttagattcacatttgaaaagccgcaagttatcaatcctgatgttgatattaaagacaatacacttactaaccatccacttgctgatagcacaaattctcaatttgatatactaaaaaatcagcaggttgatgagattattacatttgataacgaaacaatcattaataatgataatacagagatatgtagtgttgatgctgactctattgcaacagtcgactctaataatgatgatattcaacttggtaacaatgatgtcgttccacttctacctgaagaagaggttgctggcaccgagcaacttagtacactaatgagagcaatcgtgagtattgaggatgttaacccaggacatgctgacacaatattaacgagactaccaccacattaccagggaggtgtagccgttcgcgttgttggttatactgatgtgccaggtgatggcacatgtggtgcacatgctttgagtgtagcacttgggctaaacgtggatgatgtgaaacattggttaactatcgcgactggccacgatgattggcataattctgaagaattagctgcttgtgctctagcgtatggccgtaatttaatttgcgttgatatcggtgacactaccatttatagaggtggtgatcaagattatgctggctctatcatacatggtactgtagttggttgtggtgcgcattggttggctggtaactgcaacattcttagttactcatcactcttcacaaacaaattaatgactgattacaccaacttactgagagcagctcatcttaccctaaatggtagcgatcaaactgcactcgcttattcacatagtgacttagacatagacagcattatagacatgaatggcagtattgttatcagcaatgaagggatctccatagaacataaaggaggcaattcaagatgtcaaatatctgataagtctgataatgtcaagatgatagttggaccaacaggatctggcaaaactaccactgctttccaacatattgaaggtaaagttctattaatcacaccgttacgttcagcagtaactaatagttacgattatttaagtaataaagttaaggtagttgcccgcgcccaaggtgtatggattcctgagaatatcaacacaaaagatataactaaatctgacctagtaataatgacaatggaaacactgtattcaggtatattcattggccaagatgggaaaaatatttatcatcaactagtatcagcacgtgctatcatttgtgatgaagtacatgagatcagccctcattatgctaggctattgactgttttaccaaagaacaaaacatatatatgttcagccactatgcctggcattaagcttgactacaactgtaaatttgacgtgataactaactttgtccaaggtgatgttgttgactattggtttaatgaagtaaagtctagtaaaacaatgccacccaacacatgttatattgttgggacgaagagtgagtgcacatttgctgaaatgccagctgatattaaagctattaactcaactactatcaataatgttgatattaacaaagctgacaagtgcattgcaactaacattgtgacaacaagtatcactatgccacaagttgcaaacattattgacttaggtgttagaattaccagtgacgttatcatcaaaccatacttgactggtgttgaggaaaacattagatttttcaattacagtaaacgcttgtatagttgggcggaaatgacacaggcaaggggtagagttggccgtgtttccaatgggcaattttttggtccatgtcctgacaaaacaactcgccaatcaaatactgatgccattttgaacagttgttacacgcgtgctccatgctatagtggtttgctgcatgaatggcaaatggtcacccaaaaaaattatgatgagacagttagttacttcaacaagcttggcaactcttttgatactaaaccagtctggtgggatgaattccaatcatggcaaaattcagttgcagaactactacagtgcaaaaattccaatttacaaccagtattcgttgatgagtatatacataaagaagacattttagcattaatacctaattatatcggaacaaatccaatatcgacaagtataaaacacactaaacatagagttggtgcattacgttatagttgtgcagttgattgggacaacgtgttacctaaacatttgtatgaggcaactgataatattgacttcgaaagcttaataatatcagttccagatagctcacaatttctcaatattgaaatagattcaaatgaagatatagcatccaaattacgactcttagctatagccagtatattaaatgctattaaaggattaatggcacgtggacaaatatatatcaatactaacaaatggagtgatcaacatggccagtacatattatatgatagtatagaggatgcccaagcattatcaggcattaatttatctgaatatgatattattggtttggttgatattaaaaaatcgagtatgcgcataacgcattaccaacaatctaacaagtggacaggccatgttatagtaccaacttacaaaacacaccattatatgggccaattaacagatattggtttaatacgagatcgccaatcaccattagttgatacattgcgcaattcaacattatatgtggggccaccgggaagtggtaagacaactatgatgattgatgagaataaatcttcatatactacaacaattagctctggacagttgaagaatcatggaacgtggttacccccatcattaataccacatagtcaagaaaatattaatattgatgaagttgggttattggatgtctcagttatattatcacttgctagccgatcaaacaagttaactggtacaggtgacattagtcaggttgtgcatattgccaatgaaactaatgcgtattatactggttttgacagtggaattgaattgttctctaagtatgccaataaaatttatttagacaaaacccaccgttttggcccattaacctgtaatctagttgcaaaattagggtttgaaattaatcctgtcaatactaataaaattgaagaaattaaaggttatgtttgcgcgacaaatgacaacaaatcgtatagcaaagtgctaattgcctctgagcctgatgcaattatttgtgctactaatcacctagcacggatgtttaggaggatcacacaaatccctgtatataacattgctaaatgtcagggcattgacacaccaaatacattagttgtacttcaaggtggacaaattgatatgttagccaacaatcagttatatgtagccttaactagacatagtgaacgcctttccataatcgttgatccaccacatgcggcgctgttaactcagctaagtgtcaaaacagagaatatgatatcatacgccgacgcactgggtggtgcaagtactattacacaaccaattcttgattatattgtcaattcaaatagaaataatttactaaatgatgctcaggtggtgaattacttaagaacaatctgtgcgttacaatcagggaaaattacacccaatactttgattgtgatcatggatcaaatgaatttgcattacaagaattgtccatttaaatttattagattacgagagattaaagatattaaacagttggagtgcatcgttagcatatacggtatccagtgtgtggtatataatatctctttgactgaagaacgggaattactttgttgcttattaagccaagtgacaacaaataaacatattaaagagtatcttaaaagtttaccaagtaaatttatgacaacgggaaagaaaatatgttataacctatacctctggctcagcaagtttatgaaagataatgctatcatactaagtaactacattaatactaatgaagttattgatattggtggcggaattgatttaagccatattttatggttagcaatgaacggtgttcgcagtgcctttatgacactggtacacatagttgatgatgttgggagcaaactatccagatatacagatggaagttatgctgctgaacaattcaaagaactgctaattgatacttggaagaaaagcaatccactaagtttgggtgatttgaaaattagcaatagtcttatttcactctataagttgtttcgtgaccatctcaagaatggtatcaatacattatgggactttgtccaatacatagtgagtgcaatacgagattggtggcaaaaccaatttaatgcaaataaaccaacttactacgaacttgaaggcaccagtatgtcattaattgccactgattcgccatgcatcagtgtgatgaggaatagcttagatggtgatcattcactgattgatggctcccctatattcataaatacacaatacatttcacccctggataacttagttgacaattctgcaacaggttgggagaagaaggctatcccttcaccaacatgcgaagattgtgttgatgatacgcaggaagtactggatgaaattgaagtgctgtttgattatgaagatgaaaccaacaatgaacataacccactagctgataatattaatcttgaaccaaccatagatgaacaaattcacataaaagaacccagccccagtgaattcgaagataaaaaagaggacaacaaacaagttaaatgcttatgtatggaagcatgcgatgattggcagttagctgacaatatagttactagccttgatttaaacacttataagcccaatttaatgggtaggatggtgattgagaagatatctgacggaattaaaataaatttgaaactaccaggtgttggcaaattcaatgccattactaagagatgctgtggggataacactcatttaatatttgtgacagttaatggtgagcaattaacattaaaaattgaaaaaacggcttctggttatgcattatattgtatgcctaatgttgttgacgtcaacttttcacagcttgagcaagctattaagatgcttagtaaattaggaggtggcaaactcaacaatgggatgacattattggttgattcactcaagatcacccgaaaattcatcaaaaaactgattagattaacacactataaattaaggtatttaatgggcacaatcaacttgcgccatctcacaagtaacaggtcaaacttagaaatttaccgcacaatatgccatagattgccaacttcatatagcaacagcaaattcagtacacgtgagtgtattggtggcatagttctgtcaactattgaattaataccaaataacgctgcaaatcgaagtgaaatttttattgctatatacaatgtaagtggtgacacacaaatactcatttttaccaatgataataactattctaattatatcacacgacgcctaatgactccagttgaacatggtaactttgctggtgatagatcagcaattagtgcattgctcaggttgggtattgacatcaaatcaattatgacacaagataatgatctaaccattgatgatatcaaaaaatggttgttagccaaccctttgacatcaatgtttgatgttactgatcaacggacttacaacaacgcaaaagagcattcaattgttgaaaaacatttgttcgcagatatccacaatgtgttagataaaccattagacattaagtacgcattctgcatacctagtggtcacggtaaaacaacaacagttaatagaatacgaagaagtaatcaggaatacactgtcttagatgttgatgaagtacaagagcaagcaacgatactgcacttagattttgaagataaaatgttaaattataaagcaaaattggagaaatacatcatcaatagcacaaaaccacctgatgcagtattcatacactcacctatttgcgcgcctgccggttataaagttataataattttaaacgatggtgcagatgttccgatggatcgaatatggtcagataaaaacgtctgccatcttgaaagtatgaacaatatcatacacactcaaagttatgatgatgtatataatgtaacgataaattatttaaacaaaaaactgactggtgacatcactttagaaaatggagctacaattgtagataacattgatagcatattgggagatgcgttcatgaggaacgatccaggatatgatgatatctatagactaccaactggaaaacaagatgttctaaatatgaatacagggaatatcggtcttggagaacaacgttttttcaaaactggaccacatccagaagtaatgcgtccaacagttaataaaataccttcagctttaccaaatgcaattatgaccaggttgatgggtcgtgtgaagtataggacagttgacttagccatcaaagattaccataaattgatgactaaattctttattaaaggttatgaaacaaagcttgctagttatactgatgacccgattaatttaaattatgaagatatactcaactggctaatagccaaaggtaataaaatacaactattagataatatgttgcggtccgtcaaagatgacgagtttgccactgacccagcaaatataaatgtacattataaagtcgaaaacctaatgaaagaacaagttaatgatatacttgatcaagttggcagagtaattgtatggaataatcaaaatattaatatgtatgcttgcccagtcataaacgaagctaaagctcggtttaagtcgctactaaagcctaatgtcatttatactgatggcatgacagttgctgatatgaataaaagtattggccattataaaagcaaatggttacttgaaatggatttatcaaagcaagataggcaaacagatgctcaaatattgatatatgagtgggaattgatgggtatgttaggtgtaccaaatatattaattgagttcatgacatcatttataccaacattccgaataaacggtactagccatgaaactgcaaaattaccggctattcattttagtggtggtgccatgactagcatgggcaacgaaatacgtaatctattattactatcagactgtattggtagtaattacgtggcaatttacacattgggtgatgatagtcttgttctaatgaacacaaaacctgatttggagttatataaacgcatttgtgcaagccgacataatgtagcaaatacagctgtcgctagtacagagtgtgctttgtttctacagatgatagttgcccgaaatgatgatgggacatactatttaagtcataattttgtgcgtcttaaagaaaagttagtatactcaacttacccaaatactagctctgactggaaaatgaagtacgcatcatacttaatgatgataggatattcaacccaaaccaaaaaagctatggagtatagtggatttgtatcatttccaagcctgggaacgacaatgtcgcaaagagttgcagcaaatgccatatataacaaaattagtgatatccaagtgttcaacgtgatcaatgacataattaatgctaaacaacaagtatcagaggaaataattatacaattgcctgtgatcatgactggcaataaactaaagtctggtatgagcaaagttggtaagtatgttgacaaccataataaaatgcatgaattattaatgcaatacatggaagagcatgctgacatttagggtaatactacttagagtattaccctcaatcaaataaatatttgagctgtaatagccgaaatgcacaacagcaacaaattatgtgtatttgttctgtgccccccccacagt

SEQ ID NO: 852 - DNA, 9760 bp, Tuber aestivum betaendornavirus
  source 1..9760: mol_type = other DNA
tttgccacaggcattacgctaactggggaattaagccctgctatgcttgatcaaggtaaaactcaatttttgaaacctgaaccagtagaaggttattgctggcacgctttaggccttgattatgagaataaagtctcaaaccatgaagcagccaagacaatgaaggcatcattgaaactgaatggtatgctctcatctgacgccatgactatggctatgcataaaaaatttagtccgaatagacagatgtgtgttgacattgatgatgttgttgaagattatgcaaagaaagtcaagcaattggaaaactacttggatgaaccagttaatgatttggacttggattatgctaacagcggcatgttcacattttctatgacccgctatagagtctcagtccgtgagagttacaccacttcaagtctgaaccttggaggcaacgtgtttgagaaaactgtggtcaccacaaccatccatgttgttcgacatgacacaggtattaacccaaaaaatatgttggatctgttgattttctatttccgcacacctgggaagactgtcattggttatgacggggacagtgtgcccactgaggctgagtccatggctgtgtttttgaaagcaacttcctcttcaatgcaacacaattctgacttccaaaacaggttgaaagaaaaacagaaaagagtgttggcacatggtatgagagccaaggggactagtcccatccctgtacctcagaatagaattgatttagtgccacaattacaagcagaattcccacaatttgactttttcccaagttcatcattagtttcaccacacccttaccaccatgtgagtaggatggctgtcactaacactctggttgattacttcccttccaacatacctttattcgatgttggtggtaagtttgatagacatatacatgccggtaattataacgtgcattcatgcttcaaagttgaagacccagtggactttgctcgaggggtggacaatatgttgagtttggtgaaaaaacggttgactaaaatcaacagtgtgagacctggtgaaaatgaagaggctatacaagctatgctttcaatcacagatgggtcacacaaatatttctgttttgaagatgctgaaaattgtcaagtgaaacctagtgatgagattggattttcaatgagcatgagtgtcgacactttgtggtttctgtctatggaaacccttggcaacatttatgttcaaaagaaaataattaaagcaaagcatgctttgaccatcccggatggtcttttatggaaggatgaagggaaactgtctaggggtgaaggtacatgggctaaacgtaatggcaaattgatcatgaatttcaatggaggaagtcatgtatatgttaattctgtcaacaccattatgatgtacctaaccagccctttctttatttatgaggacttcgttattgtaaatcgtgttgacggcagattgggaccttacacaatttttaaccatcatgtgatcccaaaaactgatttcgttgaaactatgtctagttcttctcttcatgctgtttggagtagctctgaccccgatattgttattatgaaagtgccaaaaatcgatattttcaaaccagtaacgttattattttccgaaccatttagcctagtgaaacaggaaataaacttcaaatttatggaacgacttaagctgaaacttttgtccgacatgtcttttgaggaagtgttggaacactgtcaaggtctaatgacgagtcgcttcttgagtacaactggctacacaaaacgtttcaacatgactgcggaatcagtcaggaatcatgccataattgcattctgggaagctcatgaactcactgaagctttccagcctttggttaaaagggcatcccaaaaaatccacagtctccattggtggactcaggcttggaatgctataaaacaagtcttcatcaagatgggccgtgagtttgacccttctgagaactcagagttaactaagttgattgagcaagggtcacatcgtgattttgagattgaaagtcttttagcggacactatgcaggaattggaccatttgcgttccatagtgaacaatggcactagttcttcgatcttccaaataaatgctccttattatgctttggtgtatggagacggggctaagaacatcctgaccaatgtcaataacttgttgtgccaccctgatttcaaacgcattcacatgcatgaaatggcatcaaacgatgaaacccctgtcacaacagcagagtttgtcccctgtgtgtttcctgaaggttttgcaccagttgctgaccacagtgtaaaacatcagcacgttttaccatttagcaaaaattcaacaggaatttgtaaatcgtgtggtatattctctactctgttcggccaacaatgcgtgctttgtagtcgagtggcaaaatgtgtcggggctaacaacagttgcccacatgcgcattctaagaaaaatgaacattgttgtggtttggacaactgttctcatcatgagccaggagtttttgtcaattgggttacttgtttctgttgtctcattccaagtgtgactaacccctgtttagtgtgtgacaacacagacatccttaaaccattgaacaatccgaatgagcctgagttgaacaatgatggacagcaagttttacctgaattcaacccggaccaggaggagactcaaaccataaatccttctaagaaagctgaaggtccatcaactacaaaggtacagccagaggagaccggcaacaggattgatcccaatgtcactaatgcagacctagcaaagcatgttgagttcaaaagacttgatggcactaaagccggagcctgggttctatgttggaaggtccgcgagatttgtgccccagtaccagggtcgaccacttaccaacatcaacataattgtccagtttgtggcaacacttatgagcatgctcattcatacaaaaaattaacccattcaagaagattgagggactgtaagtgtcttaagccgtcaaggataaatatgttgatgaacatcatgcagtctgacattagggaaaaaaccaaaaccccagccaaaaatttccctactcaaactgataagactgaggagaaccgggaacaacagactgttgaaggggggaacaaactaagtgacgttggtgacctaacaccctcacaaccatatgaacatgataatggggaaaagggaatagtagagaaaccatctccatcagctcaggcaccagatgaaagatctctccttgaatcagaaaaagaaaaaggagtaatcagtgccaacaataacattgagcccgttggatcaggtgttcccagtatcgaaccaagtatttctaacttttttcctgttcttcctttaaccaaagaatttccctggccgtcttctgttgcacttggaaagaacaagtctaatgagaaagaagaggagtcgcctcaagatgaaccaggggcaattgaggaaacaacaggaaaaaaagatggggaaaaagagagccttgacgaagaaaaagatgttgaacacgcacctgttccagttgctgttggggagaaagcgtatgaagttccacctccttcaatcccatcagacctagactcagattcggagaatggagatttctctgtcgccatggagtttgattggggtttcgatggagagggctttaaatctgtaaagccctgtcatgtgatggacagagagttacattgtcatcaatgtcgagtttgtggttcattctactcacattcacatagattcacatcagttttccataaacagtatctggctgagtgtcctgtttgtgaaagcggagtaaaactaacagtagtgtcaacactcattgattctgagggaacttctcatttacaagacttccaggataatgatgaggattgggttgacactatgattgattaccagcgtcagttgatcaaaggcaaattcataaacgaacccggagatttaagtagaactaagtcttcgaacatacctacagtgtctccttcattacccagttctcaacctgttgctgatctccctagaagttcagaatcatcacaattaattccagctcaccttgtgactttgaaagagaatctgaaattcatgttgaatgaaaaccctcacaggtctttgaataagttatctttcaaaccaaaatcaatcatcactagggttaatgtgctagtaaggacattggtagaaaacagtgaggatggcaagtgtggagcagcctctttgtctctgaccttggaggaagaggacgtggcccgattgtcaagtgagattgaagagtgcacaggcaaacctgatttctgggacaaacgtgagttgggagtacacgcattatcttaccgttataaccttgttgtggcgcataattctggtagttatctctattacggtgactcaacgtcagatgaatacattcttgtggttcatatgtatagtttgacagggaaattgcattggcaacaaggcagcggactcattagccccagcgctcgagagttctctgatgaatataataacatggctagggctgtagtgcacctttacaaccaatctcctgaaaacacaaagaaagttaaaactttctctgaaataccaatgatggctggttggttttcaaatcctagggatttgttggcaatgtcaaacccagtagttctaacattgctagagacttttggagctgattttatagatggtcaattaattcataagagtcagcagttcaagtcttcaattctgcattatataactgtgcaagatgggctgttgttgattgcggcacccactggacatgggaaaactacacgaattcattcagaattggtgaggaacgttctttctaagtcagggaaaaccctaattgttactccttctagagctactatcacgggttcctttgagtacattgcagagctgaacaaatgctcagtcgctgggcgggcaaaccaacaatggtatgcttcacctaagaaatttgaaaaaaccccttgggcagcagacattgtgttgttgactgtcgattcaatgtatgattacgttacgaaagtgatacaaggtgatcaaaggccttggggtgaacgttatttgttccttgatgaattccatgacatgacttggaagtatgcaaccatagttaaaagattggggcctgaaattacagggatcatgactgctaccctaacaccagaactggcttcagtagacactaaataccaagtgaccatgaagctctcagccatggagccttatgttgaggaatcagatgataaaatgggggctttcgttgttgtagggaaaaaaactgactgttacttgccagagacacatttgtcattgccacatgatgtgaacaaaaatctgaaaatagaggacatgaccaaaggagttcctctaaattctgattcaattggtatggccaaattggcgaatatcactagtggcattggcactaatgctgtcaccactggctccacaattcaacatgccaagttatgggtagataaaggcatccgttacaaagtgagttggaaaccagagaacgtgtattctccaaatcgaaaaggtgaaaacagtcatttagtggatgtggtccctcagcaatatagtttgtcagacatgttacaatcacggggaagagtgatcaatcaaatggacttgatgaaaaggcgattcaaattaattacagcagctggtgtcgggcctagtaaatcttcaaattacaggaaaaagactacaaagtttaacaaagaaaatagtttctatttgagtgacagagatgttattgatgcgttcaacaaaagtaaagtgtccgacttcgacgatttcatgattgaacggcttgaagggattatgagggctggcacacctggggactggaagcatgacacggactctgaaacaaatgatggaaatgaggatgaaaatgagtttgtgcctgaagtcctcactctgcatcacaataatgatgatcttgaggatgacgaagcagcggttgacccacttattaactgggtcactaaagttgccaccaaagggaaaaattatatcactacagccgctgatcatttcatttcatggttgaaaacaacttttggcattgctattgggtccttaaagactatcactccggttttagcctctttttttagacgattaattggttatgcgaacactccttgcaaaatcctgatagccaattttttgaaactaggaaaattcagtgtgaatttggtcaagagaataataaactggaccatgatgaagcttggtgtcctaatcggcatagattgcttggaagacttgagcgacttaattgatgacatgattgacaattatggggtgtcaatggattcaaaaaacccttcccttaaaacattttttggacatgatgatcaatcagttgaaaatgaagccgttgagaatgacatggagtgtatccaacaacagaggaaaagtcagacgctactaatcaacaaatgcaaattgaaaatgccaaagggccatcatttggcgaaactggtaagtaagattatgaaggagaaggatttgaccgatgaagagaagaaactgtttataactggaaaggctgtgtcatattgtaacaccaaaggtaaagccatggaaccagtgacttgggaaaatgtctgtaaatatggtggaaaagaccctaaagaatggtgcatttatttcactttctggcataaaatgattccgtgtcctgttaaattttataatttgggtggccatgtcctagctttcttaggacccgtaaccgggctctggacaatgaaagaagggaagagcacagacatccactggatgatggacagggcaagtataggagatgagtggtcttcaacaatagcagcaaagttgaactccattggtggttcaccttttgaaggtttcaaagaattcttactatcattgttaaattcattcatgggcgcttgtaaacgatggaaggataatttggccatgaagtacgaagtgctgattgggaagaaaactaaatggagtagtggtcgtaggaggcaagggaaagtaataatgaagtctagatggtataatgatgagcgttggaacattcaatacaaaaccacgttgtttaaaaaacctagttccactaaccttgttgaacattggttgtataaaccagatgataactttgaaatggacatcattttgacctgggagaacaagactcatgaaattgagattttccattcttcccacatgaacaaataccaagttgaaagatgtgtgaaagattgcgtgttaacaagtgtttattccacatctattcagccgaaggattcaagaggcgggaaaacagcggaagactattacaagaaattgataggtagagtttatgctaagcccacagtcagtgatagtgtgaataaattgattaaaagagtcgtgcttaacaacccattgatgatgcaatttgaagccgggctacaagaaataagtgacacactcgtcaatgatagacaaatagaaaaagaattaatggaacctggaccttcaactgatgtcacaagattctatgaagggcgtcaaataatttatgcaccaagtggatgtggaaaaacattcactactgacctcttgaacaaagagtatggagaaacgaaactggtggacattgatacattattgacaatcaatgacatgactaacctagattctattgtgtgggattggtcagcagttaagtcacaatatgtgttggctttcaataactgggtaaaagatcctaactcaaagggtaaagttttgatgtgtcattcacctgaacaaactggatacaaaaaaggtctgatagtgttacccacatatgacttaaagaagacttgggcacccaacaatcttaaaagccttaaacgaatagcaaaagcaaggcgaggttttgacgtggtcacagtgaactcatataatgatttcactaatgctattaaagattacataacttgtttcaatgacgatttcgaagatagtgcgaaatttcttagtaacaccattgactcgattgaaggtgatgagttttttaacttgaacaaggacagcacaactcaaacactgttgaggacacctgctgaggggaaagtggcccttaaaaatgacgatgacctaaaacttggaacagaaaggttctacgtattaggtaatttgcctgaagttaaccggcccaccttggacaacgcagcttacagtttgatgaatgccatcacaacccgtttacatggtattgaaacactccggaaagataagatagaaacaagtgaatatcttgaactttttcgtaaatttattgttacacaggaatttgactcgaacattcccacatgggccaaccatttgatacggccgaatcttgagagtacaagagattggctcatcaacaaagggaatttagctgctaacttagcaaaaatttatagatactcaatgtccaatatagaaagatttgatcctaaacgagccagagcccatttcaagtcagagaacttgatgaaagagatggtgttgagcgctacagaacaaatagggagagtgatcgtttggcatgaacaacatattagttctataatatgccctttaatgcaggaagctaaatatagactcaaaagcgttttgaaaactaaacatgtttattatgatggaatgaatgtgacttcgttgaattcccatttaaaaactcttaaaaaatcaaagcatattatttgtttggatctttccaagcaggacagacaaactgacagaccattattggaaactgaacatgaacttatgagattattgggtgtcgacccccttgtaatagaatatctaaagcaagctgaggacaagtttattttacgaacaagtaacaacatttcatctatccgacctggcatgagatggaccggtggggagatgacagctattggtaatgaaattagaaacttactgttattagcagatttggaagcccatggtcttataattgacaacagtttgactcttggagacgacagcatgcttttttgtgacaatgaactagatgaggaagtcatcaaacgaattgcaatggaaaggcataatgttaggtgcacttatgagtcaaaccacccagacatgggtctgtttgtacaactaattgtaggctgggtagaaggttctggctattgtgccacaccaagttggtggaggctggatgagaaactcacagtgtctaagcatagtcctggtagtctcgagcatctggcaaagtcacacagctttttgatgatggtagggtatgactcggacactgcaaaagcttcaaacatcttaggaatgagagtctttatcaatttaggaaccacagcgtatgagagacttagattgaatgcttaccagtttgagaatgatgagttaactgctttacaagtcaagagaaacttgttgagcaaaataacaaaccctttaatcagggtcatgaagattaagttaatggtcaactctaaaaagaaaacacctttgtatgctgaggatgaaattaaactgaatttcaattgggaaaccaatgttattgatgaatccatggcaaaaaagaaaaaagatttgattaaatctcttgagaaattgatttcaagaggaggttagcgacaaggaaattatacaccaatgattagccatttagtgaatgggtaaggggcccccccccccc

SEQ ID NO: 853 - DNA, 21494 bp, Almopos endorna-like virus 1
  source 1..21494: mol_type = other DNA
tctcgagaagaaatcatggactgtgcaaagacgaaggaagctcaacctgctcccggcgaaagccgggagcgaaaaattaattataaacttaaaattatgggtgcttggtcgcctccgattgaggcacagaaccgcgtcaagaaccgcacagattacaacgagttgtactggtgggattacaatcactctgcttggtcatacagtgatacctggcggaagttggctcgcgggaaaccgagtacccaaaaaataaaacaaaatgagcaggccgcagaggaggaagcccccacgcgtaaggtcgggtcaaagactggttacagccgaccccggccacagcctgctcgtacaaaacatcacaaagtgtgctgcactaattgcagggtgatagattgtaaacatcagagccgcttcgagtggtttgggatgcatgtccctcgctctccgatgactcttttccaaccagtccatccagctcggagcggccacttgcccccatctatctcgaccattaaccgaagactcggtcgagcagccgctacattgatccttcggcgcaaaccgaccatcaaacgccgggctccaaagaaacggccaacgattgatcgagccgcgctatcccggtatttgtcttccatcagttttgacaagccagccccgaaaatctctcctcaggtggttgaaccctccgttgcagagaccatgaacccgaagcgtttcgggtcgattgtgctgccgagttgcatacgaaagttggatagagaatcctgtgctatggatttccagcgaggtgaggaatgggcatacagtcgtttggattttgctgacactgctaaagttatggttgctgaaaaccggttgttgggaaatagcattgagttctcctgcaagtgttgtgtttcagaggacaaggcaagggagatcgtcactggaatgtctttgagcgccatcacagaaaggcgagctgtcaagttgcttagagttgatcaaccagatgaggattgtgacctggacacttctgaccaaggttcacggtgcgattctgatagtgattgtgaatcctcggatggaacagacaattcttcgacggatgcggccgattctgattcgagttgcttgggggcggttgaggcaggacaagtggtggcgtctaaccggggcagatacaaggtggaggtgcaacctagttgtatcagcgggaagttggccacccgcactttcagtgaactgttggccaaacatggtggctggaccaatcttctggaattatcttgtggtcaaacaggattgcatatgcagtttgcggaccaccctcaaaggtttgtgacgaatgtggagggcggaataaatcatatccttagatgtccccactgctccaagtgctgcatgaatccggtcaatgattatcagtggcccgattatcagccaccgaaaaagagctggcccaaggatctaaaacgcctgcggtgtttggggctaaaagaccacgccggttcttggccgcacttcgtagaggctaatcatgatgctgctactggcaagaatgactatgcacccggcccattgccagagatgtttgaatttttgtgcccctggtgttttggtagcatgcataaattggtgaaatcccctccagctctgtactccatgttgtttgccgctgtttacaacaacaatgtgtgcggcacttggttgtcattccagatgctagctggttatggtgacgcagttgctgaatatgatgcagaatatttttcggatgcttcacgaacagattacaatttgctcaagaggaaatacgccctctacaaattaacagaagtcgatatgatttcaggtatggactctttggaaaggacgtctttgtttagtgcttacccgcaatgttctttccgtaggtcgatgacaccggataatgctaatgcgcaattgctgacagagtttaactgttgtgaatcgctggctatggcagagttgcgtgcatttgcaccattcactacttcattatatggccgcgctgatttcagtgatggctgcacagggtttggtggcttgatgcaatccgggtttttatcggacttttgctcttcagattgccactcagtgatggtctgcgtgccgaagtttgtggcgagacccaatgtttgtcagcacatgaaccataatcagggacgctaccaaagtgacggtgaatccctgtacatgatcatggaatgcacctccattgtttggaggttcaacttgcaagaattgaatgttgtgtaccaacatatgttcaactggaatggtatgtacatggtggtctcattttcccatgaggaaggtgttaatctaagattgatcaagctcaccaaaatacctaacatacacaaatgtgctcaattaaacaaaaccctatccgtagacacattcgttgccactatgcgcatgccaaaagccaatgccatccttaggcatttgtatatccctgtttatgaagaaattcaattcgaggtcaatcacaaattgattaacatgatcatttctcgcaatcttgatggcaatcttaactacagtgatgtatcaaagttagcaacggccatcattcggtcaaaatatgaggttcacggccataacactcactttgcttttatggatcccagcactctggtatatcacatatatcttgccaaggtactgatgataaggtatttgtccagtcgaggggtcttgaatccagattaccctatggcaaagctgctcgctgctaccgctattagtattttggaacacgtcatggctcccaaacttattaacttgttgtcccaatggaaaacctttaaggcaaagtatttgaagggcctttctgagagtgttcaagggcacctagattgtgccaattgggacaggatagaatttatgtgtaattttggccaagtggatccttcctccatccgtgcacccttttcagacacagaggaccctgaggatgtgatggcggactgggatttcggttatagcaatttaatgacagatgcagagttggctgattggctggagaattataatgctcgcaaaggagggggcgtgcggtcacacggcccggaaaaagtcatggaggatatcacagtaaagactgatgatactcggaacttttataaaaggttggtttcgcagatgaagcttgacccaatggtcaagtcatgcttgcaggctgaaacacaccacctgatgggggatggcgaacagaatttgacttggtgcccatacaaattaaattggaacgcacgtgggggtaacaatgacagccaccaccgttgcgtatcgtgtgttagagtcaaattatgtatggaccctcgaaacccgtctaagtgtttgaaatgtactggtttggatgaaccagaatggttcgagcacggcaattgtgctttttgccaggccaatgatggtcttggtgatatacctgagtccgagcgcgtgccattaccccagtggcaagctcaactgcatcagagatttgttgggggactcaaagccaaaccagcagagccgccagcgcaagatgatgtttctgatactttcccttccttgcctccgccccccagagctttcggcgaacctcaagtggggctcacgctcgttccaccgaaagataaagtttctgctgcagagcgagcactcaggagtggacagcagggaagaactaagttgctaaccactctgaagcaagtatcagctgggtcgaagcaaaaaaccgggctgaatgtggtagacgtagaagcatctgtgcaaaaaatgagagtcgatggtaaatctttggcattaagtaggtgcaaaatcacttctggggctcctagtggtcctaaaccatcgttcactaatttggctttggatgaactgtcggaagagaattggaatttgttgcttccgatggacgacgttgccaattttgggaacccacactgggctgggtgggagttgatggtgcagtttggcgtaaaggacgtaaccagccctgaccttaccgatccgtcttataactacttaggtaggctgcctttactactgtccgggagtgaacttatgtttgctcctttgcgattagggcaaccagtgaggtttcatatctggttggttaggttgaattcaggattgcctgagcaaatgaatcgtgcggtagaggcagtctgtggaatatgcaaccaagaagggaagaaaatcgtggtggttaacactttaaggacgtttcaaacagaatgtcgagcaaagtccatagtggatttaatgcgaggcattcatgcagcccaggatggcggtcaggtgttgataaacacacaaggagtggataggaagacctcgcaaatggttgtcaaatgtagtgacgagctgcgggattatatgtctattttgggcaaagagatatccgagttctcaagttactgcagggacggctatgtcggcaggatcacagaccagggcaaaatggacacattttggttgaggccaggtgagtacaccgctcttaaccttcgtgcgaatttttctggacctagagagtaccctctagagttgatggatgccacaccgaaacaatgtgtcatcaatgcactatatgttatgtatcatgttttgttagcagacgtatttaacataacaggcaagcgagagaatctggaaattgatgatatcaagaaggtgttgaaggctaaacatcttgacctgttattcttggaggagggggacgctgatgggttggttaatgtacacttcctgctttttagtcgtcactctggcatggcaaccgctagagaggtgggcgtcatgtttaggaaagtaagacctgacgcgggctctgatcatgtgctgatcggtccagatgacatttctttcgttccaaccagtgataaatgtgcatggttaacagaggaaccctctgacacactggcggaccccaaaagaattccccccttcgatgagggagaaatgatttgggatgcaatccataaagccgagacctcagccatgttgcccaattcttttcatgtaacagatgagcgtagaattcatttcacgactcaagaatttatggaccgaggggataaaaaaccattcatcgttgtacctcatgtatcaactcgagataggcaaggcgagcgttcaacattatcctttccagtactcgcgaattggcgacagttcccgaaactatttggcaatttttctggctcggtggaaatctcagatttcatgcaccaacctatggacatagcgtttggatcctgtgataatatcaattccaaactgcagacattagcaatggataaagcaagatcgttgttactcgctatgcgcatcgcccctagtactccaaaagtaccaaagagacatgatagcgctatccaactggtgcttcactcccctggttgttatagatacgtcccactaccgagggacaaggcaggtgacatcatgtggttgcatgtcaaggatgacataattccagtgatgatcactcttaataaaaatcggtttggagttttggtggattctcttagggttttgaggccaggtccggtgaagattgagcggctccatgactcggctggctccagtctgcggttttttaaccaggtggcgaatttgagactgactgatgaccatttcatgtccttaattgagcattgtgaggttcaatgtggagttcctggtgcggggaaaaccagagactatgccatcatggccagcttagataagacaatgatcctacattgcagaagttccaaactagcaagcagaacacggatgcgccatccgggtttgcaggccgttgggccggaggcgtgggcagccaatccaaagactgattactccaccctcataatggacgatgtgtcctcaagtgacatcctcgatgtggcgctggctttgtctaatgatgtgaagaaattgattctgacaggtgacaaattgcaaggccgaccagctaccatgttctgttctggtggtgagcatgagcgagtcagcgtgctggatgtgatcccggaaaaatgcttcaaacccttgcttaacaagactcatcgcattggtaacccttgggcttccatcctctcatatatttaccctgatattgaagcatcagatgatcatgagactcatgggtatatccacaagtataatggggatctagcttttattctagcagggatatatgaagaccatggtatcccgcacagttgccggtacggcgaggaatccgttattgtccttggatcaatgcgtgtacaggaagatttggtgagagatgctatgaagagtctgtctattacgaactatgagtatatgacatttgcggcttctcaaggaaacacttatgagcatgctgtgatccttaagggagaaaataatgtggtcggttcgtcgggagatgtattcaatatgaccgtcgctatgtcacgggctaggttgactaatcacattgttctttttcccgagttccatgatttttcagctgcagatgtattgttggggtccatggaccctggtaggagtccacctcccaaacctatggccgctctggaggtcatgcacggtgggatgcgcgacctggcagaggtgctgatagagctgatctccgagattatgatctcgcggttacaaccccatcaaacgttcacattgacctacaatgagcccaccaattgcttagtcttggatatcttcacagatggggtcttggaggttggtctggacatagatttgaccaacttggcaatgagcaatccaagggcaggatattatagcgtacgtatggctttaaggatggccagcccttttgttactcctctgatctgcaagagttttatgctggatctcggagcctggacaacagagaacagattattattcgatttgcgcggcattgacacgacattacaacttaggcaattctctagagcgctaacagcggcagtcatggaagctatatctcaagaatttggggatactgtcaccacggggtctatcataggtatgataacctctggaggttccagtatgatcagaactatgcgcagatgccttttacaacaagtggagacagtcggagcagccccatttttaattccagaagaacgtgtagatgcgttaggcggaattactgatgaccaagcggcctgtgatgcagctcctgcagaaccgaataaagacagcgatggggatgcttcctcagagtacggcactgtactatcagggtctggggatgacctcccaccgctatcgaacgatactcctccagatcaatctgggtgcgagcagaccgcaatgaccgccgccaccccaatggcttctctcttcactgggctgccctgggtctcgactacagcacaaccatctggcgatgaggagttggatggaatgagtgggcaattgcttcaagcatcactacagcagggtcgtgcaggtgatattttagatgaagtcaccaggttgcgccacatgggcttggagccaaatgatgggtcagacaggctatttacaacagactcatggtggggcaatcacgagagtattgtgtggtcgatgcctggtaacccttcaagtatcttaatgacgtggtctgaagagcccaggagttatagggtcagttatgcgggcctcatggaccctgaccctgtgggcgtcatcatagccacgaccatagaaggctcttggactctggctcttcggcgccttgacgaagaaatcgtccctttagaacctccccacatggattccttacgcttgtgcttagctgaggtggtcaatggtgaatccccgagtgaacctaatcgcgtccgtttgtcatcaattcgcggtctactcaactgcttcaacatgaggactggcactttgaacgtaattcagggacggggagctgatttgctggcagaggccgacgttttgatcagagacatggcagcagagctctctgattataatggattcgagattgccggttgtccatccgccaccgtcttcgtagtggcactcatgttggaacaaatcggttccatcaacaacctcggtttgaccagggaattgtcaatctctttggcagtactgctgggatcgacggttcgtgaggtgagtgtttattgcgttgcgggacagctcacaggaggattcatttccctacacacaactatctccagtgtggtcgccaggtctaatgtgttcttgcacatgcaaccaactgatgctgctccctttaactccgagatgatcatgccggcagacatagaattgggtatggaactgttggaccatgtccatcacgatgaggcttcaatggttgcaaggttacacgacgcaagaatattcagatcctgtttgatcggggatgcaacttttaggacctctttgatgcataggcgccaggttactgaagacgctcggagtttcctgatgggagtgtcagtggaaagcaggtataaagggattatccgcactcttattttgacgattagttgcttggattatatctggaaattgggacgagagaacgacagacccatggagatgtatgacgtggtaaatgccgtcaacttactgttggaatctttccacaaaggaatcaaagtggctacaatgtacgctggtcgaaccatgatggtgcaagcatgggtaggcaaaaagatggtagccgcagtcaactcggacaccgatgtgttatacattcaagcgtgctcgtttggtgcggctggtcatgggttgccacctgacgtgcttattatggtgcgcgaagctatgtgggccccggatcagattctgaagcccagacaaactttcttgttgtatgctccaggcctcattgtatcgactgatttgatcaagactgttactgcggggggctgtcctttgcttgtcaagatatcaggtcaggattatgagattattacatctccaggttgcgggttttgctgcagcttgtcagtccgcaacatcaccacacaggcgtgggcagttgtggcggcagcctacattaatcccgcccggccttatagaaaattgatcagtaacatgagtgatgctgaatttagatcagtgaaggaatggatttactcttcttctttgtctggtaataccaattggcaaaccatagtggatgctgctgccgtgataatagatagattgaagtgtggtgtcatacccggcatctggtcaaaggtgagaggccaccagtccacaaatcaccgtaagatcacttcgattaacactaaacacctgatggatgtctccaccatggggggaagtgacggcttcactatagtgatgccagaatacgtgccgaatgctgtcttcctggcgtttagccctttgatagtctatgaaaatgggtctaaggccatctttgatcctagcttgtccagaactgtgaatttaactcagtactcatctgtgttggctaggtgtgttaccttttaccagcaaaaccggcttcgcacgctgactgattctcatggattgaagtggaacctgtggggggctttggacgctggctggccgaagaacaccaagttaagctttgacatgcacagggaccgtgagactcaggcatttaagtattacatgaagatagtgcgacggatggaacaagtccggcacggttctgacactgttaatattagggtgcccattaatttgaggcatgaagtcaaaacccagttagaaatgctattcaaggacgctcaggttggagatgcaaatattaatcatccttacggggtggctgagatagcagccagccttttgttggcgagtcagagatttgacttagacgcatcccaaactggctgtttggtcatcaccacctgcccgtttttgaccattctcaacaccttgcatggttttacttgcacttgtggactctttacgggcaaccaccacaattttgtagctgggttggacaccgccaaaaccttgtgctataattggaaagagaccctggaggccagagacatgacggatgcaacggccgaggagcggcaaaaacaccaaagtgaactggacgacttgaataaccaaatcgcagggagagggggttgttggttctccgagaccgaaagacggccatcatccgctcccaggttggtctgtttggattgcgtcaattctaaagtcgtggaagagttttggtccaggaggtatgaggttatgtggatgttgccatccgtatctgagttttatcgctggcagcatcacccccgtgagcgaggggactggatcgtcaattgtggtcttgacaatagggcatattttgtcagcaggaagatggttgatgcaattgatggtggtgatcctgaggcaatcgtgattctggacaatactttattccgcattgttatctttagagaacacaaccagtgggttgcccctctggactatggtgtaaatacatttatggagttgcagtttctgcattttaatgctgattttatgtcgtgggacacagaaggcatgttgaggaagatgactgttaagtgttgtggcaggttgcgagctgcactcatctataaaatggctatggatccgaactgttcaaaatcagatttgttgcaatacgctaaattgaaggctggcactataagatacaactccacccactacacaaagttgtttagtgaaactaatgagatggtattaaatacggtagaagtggtgtggcaagagaaccataatgtgattcaagagctgaaggagcacgctttgcgtatcagcaagctgcgtgggcaaggcgggatgagagtggaccttgcattggctgaccgattgtccgacatgttgctgggggcatttgcccatgtgttgcaccttcttggcctggatgccagcatctcagatatcattacacagcttaaagagtggttgggaaggagacctctaaaccaatggacagaaggactgctcaaagtagcggatgatatgatattgtccacgaaagattatgtggtacctccgagaagagtgattgggacttctggtcctgtcaagttccaaaccacgggtagtcggttagaagagagtgcacgagtgctggcagaacaattgaaactagacaatgtgtactccgctgtcatggcagctgcaggtggtttatccgctgtactgcaacaacagttcgggttcgaaaatgatagtggttttatcctcaagttcaataaagtagcagttgctacactccgtgcgataacgtgttttggggataaatgtaagtctatgatcgaattcggtcacaaattattcaccactgattggatcacagtggctgctttcaaattgttccagaaggtcttgcgcgatttctgggacaaaagggacccctggcgttggaccaccgataggtctggtagaacttggcgaaccagttccgatgagtatcagcccacgccaccatcctctggccaaccatcgccagcaccgtctgaggaggatgatgctatctcagaaattgctagcttgacggagtcctttatcgatattacggatcgcacgattagtgaactcatgacgagtggcgctgcattcgaccagacccaagtcatgttagaactggtgatgacaaaagctatggtactacgcagtgctagccttgaagtgttgcgaagaagaggcgttagtctagaagatccaaggtctagggaagaattgagatacgtcgaccaggccatttggattttgatgtttttgttgaaagtgagtcacggggtcgacatgaggaccatagggataatgacattggccaactactttgaacgctccattggaggggaaaccaccaggacattcgctgagcgcatacaggcagaatttggtagccattgtcacgcctttatgtggcgaaaccctagcggggatttggagttcaatttccttggtaggcattgggaggtgccaacacagggtatcttgcagaacttatttcatcaagccaccaggagtctcaaggattacaaactcgggagctccagtggcggtgtcgcacctagttcgtccaaggaggctaccggagtggatgcatcggaagtgggtgaagagttgccaccggatttgatggcaaaactgattgaggctggtgaggatggaggtcgacgccaagccagtcaaccaacgcatggagaagacggcgggtttgacttggattactttgttgatgaagatcaaaccgtgattggcaggctaccgcgcgtgtcgacagtcgaaatcgggttgcaacccacagaccagcccgccgaaccctctcctgcagttaatccccctgaaccaatgggtgtggaagtaccagccccaccaaccccagtagttgaagtccccactccgcctcctcggttggtggccccgaccatctctgaggtagacaaccaaacaaaggtgtggacgacttgcggcttgcaaattcctttcacatggtccagttgtcacccctattgtggctggtccgggctcacacaaatgggagatccaaatcaagtatttttaactgagcgagtcaccgtgcacacagaaccagaggccgctgatttaagctctcgacctctcgtctgggtggttggaccagaatttgaaggggactctgatgccatgtatgacgcttttgtgctctcttgcatgaccatatactatccgggaaccgtccggagttttgaaaatattgcttcggccggttacatcaggttttatcttgtagttgtgttagttgaaggtgtagtaatagaatctgtgttcttgactagatcgagatcattcgccccagggagacggatggtcgattgcgattcattaagatctgtgcaggattgtctgccatcgatggtggatttgctatatgtgcagaatgatgatggggaggagttcttgctggcttcggtgatttgtatgatcactcaagctaaccgtggtagaaaagctaggctgataatgagagaagaaccgaagcattcatgctccgttaatccctgcttctatccggtagcctccactttgcaaacacagattggttgtcaccccgcagcaatggagtggtacagaagtcctgacacggcaaaactaccaagagagccatccattatggagctcatatggttgagccacaatctaacctctgcgtctaaccctgagctgtcacccacttctctgataccatggctgcagcgatcaatcttagacctacacaagattaatccggcagacttgtggaccggtgtgactaaatcatctgacctttcatactgcgtcaaaggtttgcaaatggtagtgggtgactacaagggaagagtgttgagccttcaaaaccgagacgcggacacatgcctgctagaatcgatcacaaatcaattaggtgtgagtgtgtccttgtcagaaatgcgggacttctgcttggagcgaaataattgggcagaggatcatgtgatgtacttgtgctccctccttaatcggagttgtgtaatcaagctgcgaggtaggacgagttgtttcctacttgtggcagacacatcatcctcttcccctgtggtcaaaatagtgcacacaggacgggtggccgacgctttgggcagaccagtgaccgcgggccactggagtcccttggatggggagatgacactcagcaatctccatcttgcatatgatctgtcgtcccatggcctgccggctgtcggcttgagatggttagtgtggaaaatagctaaaaagatgattgagcgaggggatgcacttgtgcgagtgtcaagtttatgcttgaacattcctgatccagcgagtgtcagcgtgccttatggatccggttccatggctgtgggctctactttgccacctgatgattcagggcgtagattgcaggtggtcgcagcgattgctgccagattggtgggtgcacggccttcagggttagctcccagatctaccgcgccacgcgcttgctgccctatggcaacgtcagagacgttcgtgtggcctcaaacgaaagacaggactagtcatgtaattggtttctattatccggggagggactcaccaattgatactcgttgttgcgcacagtttctatccaacttctatttaaatctgaaggagtatcctcctttccaggtaaccttcccaaatcaggtgtcaggtacattcaccaatggggaggccgcgttccaggctaccaagtttaggtctttggtggatcagttttctaagatgacaccccagcaggcatttgaagccagaaatcgttatcgtcagttggctgacatgacttatagtggtttcaaaagtaactggaatgccatggttgccgtcttggatgcaaaattctcgggcgacccattgaatgatctgattttgaccggcaaccactttctgatagagcacaataataaagtaggtaaagattcattctggtcagacaatcatgatggttccggccagaataggctggggatggcattaatgatgaaaaggtataaaagcagccccagcacgagtgacgattggggtgagtggcttactgctatgattgatgcatccacaggtaagttcgtggatgctgcttgtgagcaggtgtggcaggagagcgtggcattagcttcagcaatctgtaggaggaagggcactccaggtgctggggtgcctcctcccggccctgggccatccggtgaccactctgaaagtggcgggaacaaggacgatggaaagggaaaaagcagtggatctgatggaggtgccacaggccccgatggcgacgaacagagtcagggtagcaagcctttagatgtgggcagtggttctccaatcctgcacgcagctacccatgatggtgcgggggaaggtagtgatacgggagatgatatgcccacgctagtaccggtcaatgggccggagccgccaggtaccccagctcaagagttctctaagcaggcccctacggttgccgctttgtcatccgatcatagtctaattgaggaggaggcaaatcggtccactgactcctctgaccaaattgcttctgatggggcggctgacagccaattacaaccggcagtctctgctgccgtcagacggttgctatctgctggatttgacttttctcagatttttggcatggccactgacaccatgagcccctcgtttggcgaggatttgatcatcggtgggggtcatcaagaggagtgtggaacgccagtagagggtgcagcccctggtcctggtgacctggcagaatctgggtgggcgcgccccggttcgccactggattgcggtcaaaccgcgtcgacgcggggaaggagagcactacagtcggccgggaacttgatgggtgcaatgtcaacgggattgtcgaactccataatggctgaccctggcgatgagcctcctcccgcatcttcaaatagcgatactaccctctctgaagttgagttggaggcattcgactcttgtgaggagacagttgttctggctcctggccacagcgaggcgaaccgaggtgccggttcagatgggcccttgctggtagctgatcaagctgggtcactagggttgccaagtggtgatgatggtgcatctcagctcagttcagacaaattggtcctcgccgctgctgaaggagagtcaggagcgacggaatctgattcaaccccaacaaaagaggttgaggtagttgacactacaccaaaattattggataaacaagacatcatctctgttagaacgcattccaatattttgctagctctcttcggcacacgaggtgatctgtattggtatactaagattcacaatcacttgtgtaatatggggcgagttgatcataaggttgttgcggtcaggactcactgtgatcattgtccttggctatatcatcatgcagaggttaaggtggtgtcgggggatttccgagagttgtttgaggtacaacacctggtcggagtgacccagatgtcactaactagatcaatacagacggacatgattaaggtgattatggggtggaacttagatttgagcacattgcttgtgttcagtcacatgggtttatttctcttgaatgagtacttgatgagtcatggagcgagattggtgatggtgcatgctggaattgtgttcaagcagaatgtttccccatctgcttggaatgacgcccactggtgcaatgcactagtgaacgagtcaaccagcaaatcagtgcaacagtcctccaaactgcaccttcagtccagcaatgtgttcggggattgtcaaaatcgttgggtgcctttggaaatgaattttatgtggccgtgcttgtcagtgcgaggagaaacctactatgacaaacctgtggaccacacaatagacgacgtttcaaaatttttaagaccagttaatgattggtgcgtgttagttgattgtggctcgcttaactctatcatgcttgagcactgcaaggcgatctgcaaatctttagccaacctcggttgcaagatagttgtcgtggatagcccgaaatctcatgtgctaataagtcacgatagcgtgactgactacaattcagttgatagtaaggaatttcaagtcctaattcatcatggaggggtgggcagctgcgccactgcttatagtaaaaattggttctcggtagtattgcccggtatgtttgatcagccatgttgggccgctttgttgttgacggcgggattgggcacctttttgttgccagatgagcggaacctaacggtggatgagataattgtcaagacgcaacagttcccttcacagaaaatgctagtggccgccgcagagggccggacaccctcgagaagttggcaggaggctctcctcaacctaaagtttgaggcggatattgccaaaaatcctcagtctttgccttccaatatgaatcaaatgtatttgacggttccggaactgatagatcctgagtttgaggatggtccagaggaagtgtgggttttccattatggctccgatggagatcgatattggatgaaccaggtagtcaacgagttggtcacgaaaactactgacaaaatcatactgtttgagtgtctggacgggaggaccagctggctgggcagtttaattgatcacccaaacctgaaggttgaacgcttaaactttcggcaagaggatttaacggatttatattttgacaaagaaacttcgaaattgtttgagtacattgatagcacattggacagggtcaagaccatcgcagatagaattaaaggccgtggacgaccaaaaaaagtttatctaactgcctttgatcattccatgcacgcactcatagagaggtgtggcgtccagtacgtgacagtctgcacgacatatgtgtccaagcgatgggggtacaccgtccctaatatggaccctgtgttgtcaatctacttagatggggccatctcaaccgccatgggggtgtacataaacgagattctgcattgtgccggcttcccacacgattcaaattgtgttgagatttgggttatgaatcataagaaagaagagatccgagtgaactcaagaaaagttgtggtcaaagactatcctgatctgctcatggggatgaaggttcccaccaccgattcactcaaaggggttgttgcggtggatgaccgggtcgcccagagaatgacagataaggcaaagagttggctttctactaacatcggtaaggtggtgaccataggtagagcagtaacgaatgaagatggtacggtaggttacagccccatagatcttcgcaattgtctgctgtacattcatcatggttcaaacgtggccctcaaggtttgtgatgtgctcgggataccaaatatcacgtttccaatcacggaagaacaacgtcacaacggcatcattgctgagaaacagaacaagagtgtactcatgaacagcaagtctaatatggatcaaattattgctaaagttttcaactgtccaatggagcccctacatcctggtcaagacttcgattctcaacgctttactttggacttacataatattcagtttctgccctcgttgtcctcatatggcctcaacctgccaggtctttttacaggggttgctctggttcatagctttgaggtgcaggaccattccacgggagacgatgactgtgtaccagccaatctgctatcacaggtggctgatgccactagatctgagctgctgagtctactgactcaggggggagaagtgaatggggacctcgttttggatgcatgcattgttgcagaaatcaatacagtgatggtgagactaaatgcgcggagagaaatggtggcctctattagtaaggtggagcccagcgactggttcgtggtgttccaggttttggataatagttccggtggatgtcatatcttgcgagtcacgtcagttgagttggataccgtgaagccgcggaaagttggtccaccgctgcacgcccctgagccccgaatcaattatgggattaatgaggacgggcagagagccaacattacttctagtgcttatagaatcccaaattggttgctggcaacaagggggagccccagttctctcccagagaagcagttgcagcaaatcagttctatggtaaattctggcagctatgtggccaggatgtccagaatattcaatcaagtttgcgaggtaactttagcaggccagaaagatgtgtacagagtgacaacagacaacgtgtctagccttgtttctggtgcaatttacgtggcattacacatcgatggccggaagagtgctgtattgtgcgtgtggatggatagtaggttctacctttttggagggatagacacatcgaaattcacaggaaagatccagcgcacaggagtaaatttcaagccgccaaaaatagtggatggtgtagaaatgcccctagataaggtatcatctgctctcacccctctcaactccgtaacgaagaaatacatgctaaatcatccgacctatcacacattagtgtctatcagacctactgcgagactcgtggtcagtcattttgacaatcggaaacaccacatgtatgatgaaatcaaattcttgcaaaggtaccctaatgatatggtcatgtattcgaaaggaataccgaaaggtttgcatgagagatgggaagaattcaggggcccctgtcggctgacgtataaccatggactgaaggtggtgatagaagcgtatggtaagttgtgggagtcgctcatagaatttcaatcttacacactgtgggactataagatgatcagaatcggtaacagcttgcaatcagctgatctaggggctgtggttgaaagagagggtctcgaatccttgaaaactaaaatcacagaggtgaactcatttttcgagccgagagatgaggtgacatggcaattgaagcctaaaccaaaatccagagtcaagaacgccactaccggagtgatagagctggttgacgcaaaaattccagaggaatttgtattagataaggtcaaaatgcatttgatgtacaaggagaaattgcacatagttttggataaggcattgaaaggaccctcattgatcaaccggaccaccaccgatgtttatgtagtcaacactggcaagacttatggatcttctcttgcctctaaacccatgggcttctggcaattgagtccgtctgagatcagggccgatagttattccacaactgctagtatggattggtgggaagtgaagatggatgggggccctaaattccatgtgtcccaatcgcagccccaatttgctcaagccggtaagaaagagatgtcatcgtcttcttgggcattgcttaaaaatgtagatgctattaatcccctgtccactgggagtacccagagcggtgcgttctttgacagtggttctcatcaattcaggcagtttggaacgtttacagcccctttgataacggagatagacaatatggaggacaggatagatgatgatttgatgctggaaaatattaactactggttcgagaatgaaatgtacgagaataagaaaacggccccagcttccagtcgaataatagaacagcctagaaagataattactcgttcagattacaagtacaccatgactgaattgcctctgtgggccaggcccgtggttcagaaaaagctgaatgcaacatttgacaccatcactagaagactttacactgtcaccaagtttagaaagtttgagttgaacatcaatgctgagtgggaagctttcaaggtgtatttcaggtccaattatggggagctgttggaaaacttcaaagccaatgctctaattctgagtgctgatgacattcgagagtgggtggaatcgagaccggattgcaacagaatagccaatgagatggagcagctgctgacagacgcattcgtcacgaagaaaatgaatttcgtaaatgtgcacgacaaggtggaatcactcctcaaagataaagtagatgttaatttctacgatcagatgatcagggctattgtatggcagcctaagggcatagcgggtttattcagccctttgttcaagaaggtcaaagaacgcttgaaatcgttgctcgggcccaagtttttctatgcagatggtttaacgcctgtggatgtcaaccaactgctcatgactgtggaaggaggggacaatgtcgtagagaatgacttagaaaagcaagacaggcagacagaccataacactctcaagtttgaaatgaaggtgtacaaagagttaggtgtgccaccggagctggtggacttctggtacacttctcatgtgcaatggcgttggaaatccgagaatctctcaggaacattggacgccatgcgattgacgggccaagccactactgctcttggcaacgtgattgtcaatttgttgtgtcatagacgattagtctctcaacattaccatagaatccaggttatgttcgtgcttggagatgacaatttaatgataacaaaaggaagactgaatttaagccatttatcccgtgacatgaaacactattgcaacatgaagtgtactgtcagccaaaaaccaaggactggtgtattcttacgatatctcgtctataaagacctggatggttggcatttgagtcctgattttattcgtttgaagaacaggtatgaatgcatgaatggggtcagccacgctgatgataaagtgatcaaagcaaggaccatgtcctactgtagcgcgctcggtggcaacagagtaacagatggaatatgggagtcttgtgggggtgacgggaaacttttaaggtggtacagccagtgggatgcaatagtggcctgcgcagaccactatgacatatcagttaatgaagtaatggctgactataatcgcttgcttcatatgatgtccaacaggactgtattcgctcataaattttcatatttcaccacactcagatctaatgaatcgggccatcatttggggaatcccatgatacgtggcagcatagctgccaagagtttgtaattaatttttccggaggtgatccc

SEQ ID NO: 854 - DNA, 4825 bp, Althepos endorna-like virus 1
  source 1..4825: mol_type = other DNA
gttaccgcccggccagccaggcgatgacgcccccgcggatggggacgacctcgaactgggggccgaggccgttgccgagagaggcggcgcacattgcgctacccctcactcggcgacggactgtggccaagaagacgccgctgactccaaagggcgctcggagccagactcggcgactgggacccagccgttggtcgcggcggcggggtccggcgatagttcggagccacctggcaaatgccaaacgcatccgggtgcggtacatctgccaagtcccgtgcagcttgccggcgactcaccgagtgaggcggcgacccctgccggggttgacaaaccgccggcattaatcctcggggccactgctgccaacgtgctgcaggtcaacaacccacaaggccggagtcctgacctcggcaaaagtggcgatacgccaacagccgctgcggatgatcaagaagacactgaggcagcctgcaagaaccccattgtcaacctccccaccgagggggccacgacctctcacgcgatgagccctgcgaccgacttgccagtcgtggacacccccggcacgcccattaacccgcaaggcgggcctgcgaatgaggcaagcacgtgcggtaaattatcagtggttgattgggtggttaggtaccaggaggccactggcagtcgggcctgggttgaggtgaacctgaacataccggtgagttatacaaagctgactagcactttacgagtcactgtaggcgcgtcagttgacagcgatttcctaatgatcaatggtcgtcgcgtgtcagaacgggactttgacagcgtggttgaagccaaactgtccgtgttcattgtataccattacaccctgtcgagtcagtttggccctacacttaagaacgagcgcttgcttgcactcgatccaaactgcaagattgacatcagggacgtcacaaccataacacgtgattgttcggcagccgtcaccttgaccgttcttcaatatgacggcaccaccatgcggttaagcgatggttcggtgcatcaagcacttccgctcataatgccctggggtgcagccagaggcaagtcagccaagaatatggacctattgtggctgaatgacccaagtgatcaattgggcgacttcaagttgaacggtttcgatgttacgcaaaagaagccggaagaggcgctagtgacggagatggacgtttatggcgccatcgtgtgcaacaaggttgatgcagtattcttgacgatagttggcctgggttacaacgccttactacatccagaagtggcgcacaagcactatggtggagatttgctggcaaggggtaatcacatagctaaccgaccgaatgttgaggcacttaactacgacataatggcgggcgtggcagcgtggtggtcaatattgagtgaaggtaatgaagacgtacccgacacaatagccgaacaaagattaacggtaatgccagaccctaaaagcagtgtttcctttgagtatgagtcaagggtcgtcagtgcctataatgaagtcgaggtgcccaaggacgcgctgtgcgttgagtggtcaatgaagtacgcgtacccggacattgacggggagttacttaagcggttagctaagccagggacagaaaaccaagtgtatgccaccattctaacggagaaaataccgtgcgttatcatcaatgaacgcggcgacgtaacttttgcattgacgcggggacagccagtgccgcatttcgtgctgaggatgaccgtagtaaggccaaacccgcaagccggcccaggggccagtctaaaggccacccaaatgcacttggcacctattgaggcggtgggttactcgaggcagcgatgcgtcaggagcgggcacccagaggagcttagcataagcgccggatgtgctttcatgcgacgtggtatgagctgggatgacattgcccacggtttacaggaccggaccctgccggacgtgtgggtgcatgggctgacctcggcagcagagtggagttcaacgtaccataaaatgacgcggcagaaaaacccaatacaaggggtgatactaagtgtgcagggtcaactaattaggttgtgcagtgacgtgacattcagggccgggtcagtggtttggtataacacaacagacggcttggaaatggggatagtcgtagtgactgagccaggggtcaaacacatcattcggtctggttacgctgccataacctgtactatattgtatagaacaggcagcgtggtgccaaactggtatccaccagccgccagcatggagcacaccaggggcgctttgaacaacggcacgttgggggtgtgtgcaacccaccacgttcccgggttaagggtaaccaacgagtgcactgagctggtggtgggactttatgacaacaggtctcacgacaagtacgatgattatgacatactaagctcattcaggttccacgaaataacctatgtgccgacggcattaaccgttgatgagcacgaattcatgcttgaccgcggcattttggcaatgatgtatgactcagggcctgcctatttcatcaacaccagtgattctgagttcaatgcattgggccgcaggcattccttggacctagatgttgccggcgtgatttttagatttgaatacggcaattatcgaacgcgtgatcgattgacttgctctcagagaataacaatcaccaggttgttgagcgctgggtttgtaagcatgggtaccggttacgtctggaagtcacagttcaacccgatcatagattacacaaggaatggtgtccggtaccaagactacagagggagcctgcgatccgtgctgggcacgattaaatggagttggctacttgctgatcatgacatggaggaaggcaggttatacacagtttctggaccgcgaatgcttattaagctgggcccaggcggcccttttattggtttgcgtgaggtccacgaacttgtcaaccctgttagcgaagagctgtatgcggccggattgggttttaaaaatgcagcgggcagcaatgacctgacggcgttccatgctgaggatttcaagcgtaaattacttgaagtgaaagatgtaagtattgaccgaacggaattgctcaagacggccagcagggccattggatggcatgacagcggcgtcgatgcacgtgaagtgtgtatctttgacaacgttggctctgagtacgatggtgactcggaaatgctggtacggtgtgacggcaacaggtgggagttgcaactacacagtgcgccccatcacaacgacctaacgtgggatgacatgtgcaaatggcttaatttgacgggcttggacatcaaccagtatggaccagctacttatgtagcgcccttaaaagtcagggaagccgtgccactgtgggacaaaacccacaaatactcaatggtgcggttcccaagttacagtgtgccagctatgacaactacaagcactggacttttcaatgcaatcactggcagattggccaacacccaagtcctgaggacagtggaaccggacacgcagtatgaggtggagcaattcttacgcgtgatttgccgggacgatgcattacccataacccaggcgtacagagccaatccgatatctttcacacctgaaaagattgccaattgggtgagcaaacgcaagggggcagcggggatagcacaggacctgaacaatttgttgattgatgggctgatgaccagaccaatgaactcaacggaacactttgccaagctcgaagcgctgactaaagagttggcgccggacaccgaccttgcgagcatggtggacgtacaaactagggcaatagtattccaaccaaaagcactgtgtgcgatgttttctgaaatatggatagaggccaaagcaagactgaagaagttattaaaggagaacatcgtttattgtgacggactgacccctggagaagtgcggcgattagtcaagcagtttaaggccagcaacgccgttgaaaatgacttttccaagtttgacaaaacacaagaccacaaatgtatagacttcgaaatggccatagctgaactgttgggcgttcatccaggggtaattggactgtggaggctgtgccacgaaaaatggaagaccaggtcagccaggataacaggctactttgacgcgatgagattaactggacaagctacgactgcactggggaacttgataatcaacctgtacgcatccagagagctgattgagcaatgcggaagcggtaccattttggtgttagtattgggggacgactctttgatcctgtgcaggcatgaactggagttggaagagtacgctaagcggtgcgccaagaagtacaacataattgcgaaacctaaacagtcgactcgagtaggcaacttcctaagatacctgttcctgctgactaaagatgggattgaaatggttcctgacgtggtgaggtatttttacaggtaccaactgacgaaaggcacagccgatgtgtcggatgataatttaaaggcccgcgtgatgtcatactgctgcctgctggggaagaactcgcagactgaagctatatgggcagcaacgggggcaacaagtgagctgccgagttggtgtgaccagtctttgattatggaggccgcaagcgcttaccatggactacctagggagactgtagcgtcaatgtaccaaggcctattggacatgttacagcacccaacgccttatgaacatattattgagcattggaagaatgccaaatggacgggctccgtgttaaaggcaagcaggtgagtcggggttggtggggtg

SEQ ID NO: 855 - DNA, 11683 bp, Arthrocladiella mougeotii alphaendornavirus
  source 1..11683: mol_type = other DNA
tgaaatgactgtcacgatggcaaagaagcaagcgaagcaacgacatcataaatttatacacagcggacactaccctaagggtagtgcccgcaatgaaattaaattacaaaccctcaacctataccattatgggctagagggggcaccatcaaatttcccaacgtttacgaagcgtcagtgccttaaaggggaaaatcaatacattgacacatatctatcagacatgaacgatgtggtcaataccaggaagttaggtataactggagtaatcgacatatatcacaataggaaaaagtacccagtagacacaccatacgacgcctggacatttaatggtaacacaagtcatttccgcaatggtaaatattggatcgacgattactatggtgacgtagaagacaagctgtcattcaccaactacagatgtgacctgttgaatgatatatacagctcaagtcatacgcacggtaccaaacgtaaatacgatctgataaattggttaacagacaagtcggtggcattcccttacggtaacatggcacaaaaacgtgacggtatgttagagttgctgcctgggtactatcttcggtgcagtcactgtgaatgcacaacatacttaccattgtcaaccatgttacctcacacattgactagacaacaaatcaccgatttcctacgtcaatttagggatgagaaggaatgttttatgcctgacgcagaaatttacggtgaaatggcaatgatgatacccatgtgtttcgcgacatcgagtggcgcatgcttcaattgtgacaacgacttgttttcagaggaactagaggtatgtgcagcactttactcggaatcagtggcgtattattctagaataagaggtactcagttggaagagatgctaaaattaaatatgttgcaaggtgcaccaccagatgacatgccgacagcagccaagcaatacaatgaattgcacaataggcaagcagcaaaagcgctcagcaaggtcaattcgttgtacattaattcattatacgccatgtcgcaaagacaacgcacagacatgatgatggagcgtagccatataagtatgtcgacagcatcaaggatcagcaacaccactctagaaccattcgaagcggaggaaatacttttggttgcagacctcgccagtatgtatgtggggcagttggtgcattaccctaccaacatcaacactcaagtatcacttagagatatatgtgccacaatatgtaatggtacttttttcaatgacttagaaatgcctataaaccctgccagaccacctgccacttatgtggaagttgtcaatggcacaatggatttagcaggtgttatagacaaaatgattgaaggcgcgtacttattaataccacgagaggtaaagagtgggttatacgagtatgtcgacaatgagtattattatagtgcaaccacgtgcagtaccgtgccagtccgatggactagggcaatattagacatgttccacgatttggcaacattagtgattgatggacaacactatcacgtgcacacggtaacaaacgggcagtacatgcaaattattaccatgaccccagcaagtgacccgtcacacataagaaccatgttgaattatgctgaatttgaagctttagtacctgtttatgacgtcgacaaccccttgtccacattaggtgtatttggaaccaaatgggaatacaaaacaataaatgtggaattgttgaggcggttagtcactttcgcaatcacagcagataagtcctcaagtgcaattgaagcgtacttcgcaggcataattagtacacattacacgataggtggaaaagttgttgacttgactaatacaccagtgactgaaggtttgccagagatactttatgccatgttgatactcagcaacaataaactagtaatgacatgggcatcaacgcttcacttgcacaactactctctacacagtggtgcaatcaacatcattgatttcttcataaatcgtatcgctaaatctttcatatctaaactagaggaaagcaatccatggttcgcaaaaatattgtcaagtcccactgagtttgccaggcaattgaaagatcacgcagagaagctgcaatttgacaccgtgttcaaaaacttaatgccgactatagcaatggataagcagcacacgttgggacacagtttgagctccaatgcaatagacaccccctcagcatgtacacatcactccctagaatgcacacacacaattggtcaactaaattgcgtgtgctgcggcatgcaatcacatacgccattgtgcgagtgctgtgcaaagagcagtgtatgcaggcatgcttgtagacacaaatgtactaataaggaacatttttgtgacaagtgcaaaagtaatgccaaatgctacaacagggcaatatgcaattgttgcggcgtgtatggatgcgtgccctgcacacattgccccgaggaacaacaaataataattaagggacctactaaagatattgcttccaaaatagtgcccattatcaccaacaatgcattgaaaataccgaagaaacatcaaatgcctgcgccaacaagttctacaataaaatttgagccatcaggcgttgatgcatgcatcaaaaagaccacaaatacctacacattcaagagtaagggtaagtcatacacattgttagcagatgctatgggtatcaaggacgtgaatgatattttgatatgtgttgacggctatttacacatcccaatgttagccttcacgggtatataccatgtgcccatagagttgactgacaaccctgtcagcgacccggtgcacaccacaaattattgtgcatacacttgtattgcaaatcagtcagagtacacaacggtgcaactgcaaaacatatttggtgaccgtccatctctggacaagattgagctaattgaactgctcaagagcttgcgcctcaattgtttgttgattaccaagaaagatgaagctgatataatacactatggtcagcaggcatctccttacatggtgatactacacggcagttgtgcacctggcgtcaatcacaaccactggtgtattggccacataccgaaattcactgagatgccgaccggttattattaccctcacagcttgggaccagcaccgcgggacttgggtaggtacaacatgtggaaggcaccagcagcagaagcagcggaactctcgaaactagtgcaagtaattagaaaacagaggcgaggcacagcacttgaatcgctgcttttgccaactgttatagacaggggtggcatatactggctgacaaactccaaggaacataacccgcgatttgggctcattaatattccactaccgccttccattgatcaggtgtttgtagatgcacttaatggtgtgtctgataagcaaattgacgcttcttatgccaacttcaccaatgaatggggcaatgtggaacaagatatcaataacgctattaagttacgctgtttagaaataaactatgcaatgagacaattggagcaaccaaccaacgatttgccattgtcaacggtggatataaaacatgacaacccaactatcgagctggttaacatgggacgcctaaagcccttggatgtggtaacactactacatgacgggaagaagagaaccgcagttgttttcggagaagcatcaaaccccatggtgcagaatcattttggaaagggtagtgtgctgcagatccataaagctagtctaagttctacatatagagctctgttgctggctataaaagcgttaggcaatttacccaatatctccagcatgaaagtagtacaggctgtagacggtattgcaggcagtggtaaatcaacaacgattcgcaatatggacaagaaaagtaacatggtactcgtgtgcaaaacgagatccgctataaatagtcactcaactgcaggtttccatgctagcataacatgtgaggcggcgggtatgattacggtgccaacattttctgtggttctggacgaggcttcgatgatcacaactgttgaacttgcggcacttattgatcaccctaatatgcaagtacatatgtttggcgattcaatgcaaatcggtgcaaaagatatgtcaccaataaaaggcatgcgtcaagagattagcttactgagccaattccaacacaagaaattgaaccacacccatcgctttggcaaccctcttgtatcgcacgtgcttaaaaactttaacaaagatataacttgtgacgatgacaaagtcacaacttatgaacaagtaagtgcaaacgactaccacactgttgcagaaatagcgcgcaaaaagaaagtagacgcaatatacactttcatgcatatagattacacaaatatggtgtcagaaattggtgatgaaataagtgtgaacaaagttcacagtgcgcaaggcaaagaatttgacactgtcatggtgttgcattggggtaacttcgcagcagaaggaacaatagttaaaagtgcaaactttatattcaccgccttaactcgcgcacgtaagcacgtagtttgggttttgccatcgagtgttcaactacgcttgaatgagatcgcagatataacttacgagggaagtggtggcacggataccaccttgagcgcgttcgacgtggagagttgtgcgcttactaggccattaacaaaagtggagatagagttattatcacgtgttatcacatccaacagaaattatgacccagcagtgtgtgtacaccacattacagccaactcaatacgtatacaagcacaattaaaatacttgggcgcaaaaatgaacgtagatttcaccgtggatcgtaagggtttccaccccaacaacacctgtaccacagctttcaagagcaccataaaagcaagaatagctcaggagtttgataccaactttaggcacataaacacaaacgttaacgaattgcaattagacaccaaggtgcccactttaaagaaatttaaactgacattcgctgaagcagcagcgacggacatgtacgagccgtcacgcatcaacgaagtgattgcccgcagtagggcaagtagtgtgcttagtgacaaggacgagtattacgacgcaatccagaatttcacacctgagtcgtactcccactccagtgttattaaatcactttacctgaataaggcaacgtggtcaaacattatagcgttggctgacgttgcattagcaacacaagcaactggtagtcggttacagaccatcatacgtaatgaaactgtatacatatcagtgtttggtggttgttcattgtattgcggtttcaagttcctattcccatccacttgcgttgttgttagctctgcgcacaacaccgaagggagggatgggtttctaaacacaattaactgtgccaacagacacatttgcggtattgaatacgatgttaatgctgtcttgcagtttatcaccaatagtaaaatatttgcagcagtgaatgattcattgtgtataaacagatggcaagagaggttcaataacatggttcagggcttatttgaatcatgcgatttcagcactgttggcacgcgacacaaagctagtaacttggaattggcacaaaactgtgccgattactgctcaagttgggttataccaactcaccaagcagtcagcatgtatttcgttaaagatcatgaccactacgctagccaaccaggtaataaaaaacttttcacgataggagaaatgatacaacacaacatgggaatacaaggtgatgctgcggttttcgacgttaacgcatcaaacaagaaaaagattgagaagatactaatccggcatatgaatgctgaagaaaagtttgacagaccaacatacgtgccccacatgatggttaagagtgcattgcactctgaatttgtacaacaagtgggaacaaatcatcttgtccctacggcagttggatgtgagacaacgtcaactttacacttagctatggttgtagcagctaacgtgttgaaacagatgcttgacgttgataaaatacaccacgttggtgttagcggccagttattctgcttgaatcatcacataggtgataccattagtcattatgcagataatgacacactgctgatcaaaaacatgatatcaggcaagttgaacgcactcatggaaaggcaagatgctcctattagccaggaggatcaagaatcgattaaaactaacatacaatactactctgatcccacaaatattatgtgtttcaacaaggatagcgtaagaatagtgcacccggcattaattagtgctaatatgctaggaaatgtgtacacttgtgtgccaatagcatgtgatgccactttgcatatggacagtaatggcacaatacatgaaattggcaagaacgggtcaacattcaaattggatatgggtcatatgcaagtggttgcgattattggtaactactacttgtgtaaggtagtatgcaaacctataaaagtgcaactagctggcattgatttacaattaaacaattttagggtgttcaaatcatcgctagacaataacaatacgataaaaatacctgacccgattttcagaagactcgttgcaagagcattcgcagagaaagatacttcgataaacgatatgatagcatacagcagatcattgctgaataccatgacgtataccagcaaaggatattcgtacaagtacacagataatccattggacttgttacagttctcaatagtggcactgaacttcgcgcagcgtaataggaaattgacatcattcatacaatcactacttggggctgaattgtctgaaggcagtggtaacaagatttcacagctattgtcaggagcgctcaagactatcggtctgaagctattgcaaggtcctatgaactccatcatcgaggctgtgcacgaaactattggagctataactaacaatgtgccaatagctaaggacatatactccatactaaaagatgtcaactacacagaaatacacccgaaaaagcaagtgatcattaagaaaacccataacgcacacgatgatcatgacggcgaaccatctgatgatgaaatgggtatagattggaatgatgcaggaaatcatatggagaaaggtggagtagatgagaaagcaaccccgagtgataatgaagttacacgagatcaaaaaggacaagaattgcagcgcgataagcagtctgctggccagcatggccagggcatggacaaaactgctgtagtgggaaagccggcggtcaacgcaaggaaatggcacgacatctttggtttaaacaagaactaccaaaatggtagtaagacaccagggaggcaagtgtgtttgctgtatgcaggtagtaggggggacaaccaaccattaaatgccattgcagaattgtgcgtaagtatgggtatgtcagtggtggcagtcgcacccaaggatatacatgaattggtcccaggagtggattatgagtactatattgacagttatgatgcattgacaattgcaggtgtgaaccagaaaatgccacaattatcaactatatctgagcacatgctagctgtttacagaacctggttcaagcatcacaaagcgcacgattacgtgttcagtatgttctttgcagatgaggcagacatggtgcacgccaacgttaaaaactttagggtaataccgcaattaagtgagacgtgggatcctaaagacaaaattgcgagcacaggcaagtggtctattgtgcgtaaaatgttgggaatacagaaaccgcttgtacagccggtttggtcagtgccatcagcatggcacatggatgatactaacctaggttacttattcactaagatgcaattgagcgtggacaaggcaacagatatggcattacgtttctgtgccaaccatgataacgatgtcacagtcgtgacactggggcccatggtgccagataattatcaggcaacaatcaagaatatgctagacacgactaacaacgctgtcatatttgtgactgcaaaactgcacgtattgcaaaatcaatttgaatttgaaggcaaacattacaggtactgtgattttgcaatgcaccaaagaattttgataataccaaagtgcaattatttattactaaagggcaagatcactcaagcaaaacatcacttcggcgctggtacttacgcaactttcagcttaattggtgtcaaacaagtagcatatccacaagcgtttgaccaaaaattcaacgctaagcattactccattcaccgggagtactatgactacagtccagtgaaagaatacaataggtcggcaaaaatattgtctaaattacttgatcaaaaaccaccaggaaccgatatagagatgttagactattccacactaacaatgccagttgcaccagtaaatacaactgatgaaataaccgctcaacaagtcatggtccgtgggctacggccaatagtgaacaattaccgcactaattgtgtatttaacgttctgtttgactgcctgacagataactcaaaattgtgcacaatggttgaaagttttatgacagtatggacctttcatacagttcaagatgttgtcgcactcctgatgataatacccacaaacgcaataatagtgggtcccgaattcagtgttaagttaagtagaaaaggagtgaatgacatggtttttatacagataaatacatcccttacccacgccaacacgtttgagatggacagtgttgaggcagtatcaatgcaagttggtgccagttaccatcacactatgctgtcaggagaggtagagacagataacgcattcctgctaacaaaactgtcggagtatgcagcagtggcattgcaaaacgacatcgacaacatggtcaagactacaatgaggaaatcaatgccaatccactcaatagaatctgtgaattatgcaggtggcagcaagatcaaagagagattggcagtgggatacaaatacctatgcattgggagtaaaggggcatattacgctatatctactagtgcggtcgatggatcggtgcatttggtacatttgcaacatgacacgtatgattgcgtcgtagcgataagactgataaaagaataccatgacacaatagcaacgtccaaaggtagaataaaaaatacaaagatagtggcaataaatcatgccacaaggaagaaattatacacacgaggtgtctgcgtaggcaatgtaggggttgttggtgcggataaattatacatatacgacacgtggtcaagattacatcaccatgaaatggaaaaacaagtaatagctgaggcaaaggagatacaattagtgccagaaagcaacgacgtgccaatggtcagattgcacaacatcaaatcaattttgcttagcgataaatacccggtgtgtgtaaataaaggcgctttatttttcagattggaaacggaaaatgatgctacatcaagggtgtgtggcgacttgatgcatgcgaggcaattgactaaggatttgttcatactgccttacaatggcaagcttgcacccttgatcggcaacgcattcatatacgacggtacaaaagttgcatacgctaacatcaaagatgtggaaatacctaaagatttgcacgctatgttgtcactaagtcaagtagatacaccgagcgtgtttagtttatgtgagcgcatggcactacagaatggttacatgagtctgagtgattgcccaatagagatgacaaggaaaaagcttacactggaggaattatcattaactcttaggcgcaagatgagtgtatttggtgacgtattcgttattagtgtgaactcatgggctttccaaattgtacgcaaaggaagtggattcatatatgctgatgaacaagtaacacttgacataccagattcaaaattcaacgtgtcaaaatataacactgtgtcagcggcggcacatacaaccggtatagcaaatgacatgtcatcgttgttaccattggacgtgccactacacgcacccccactagatgtagattgcatatcataccacgcaaaagagaaccaattgatactagtggccaacgtcgaggacctgtccacgccggtggatgtcatgcgatacgatgacatacctcaatctaacgtgatagattactgggaaaacaacgagttgttagacagcaatgtaatattgccaaccaacaaaaacttccgagtaactagtagaatacagccaataagagtcaaaaggaatttttatttaactatggaagactatcccaaatttgctcggccatccaggagtaaagcctatgcagaagaactaaatagtataaccaacagacatggtgcatataaggtgcacagaacggtaaatttggacaccaggcaggaagtagaaatgttttgcgcgaactactttagacaaggagctgggaccatattggaacaatataggtcagaacctgttgagttcaacgctgcaaggtgtcaagcatggatagacaagcacaacatgccaatgtctgtgaaaagggacattagagagatgctagagtttggttgggaacggaaaccaatcaatgcaatggaagtacacgggaagacggaacaaaccaccaagttcaaaacaactagatggttcaatgaagtagccacgcgtagtattgtagcagcaccctatgctgtgtcagcactgtttgcggaagtcttcatggaaatgaaacagaggtttaaatcagtgttgaggcatgaagtgttttactcagatggtagtacaccatcagaacttgccgctttaataagacaatgtggcgactttcaatactgtaccgaagacgacctgacacaacaggatggtcaaaccgacaaacaaataattgcaattgaaatggaaatttacaagatgttgggattgagtggtaatgtattggcattctacagacaatgtcatgacaactggaaatggaaaggtcatggtatatcaggcgtatgggatgccatgcgactaagtggtcaagtaacaacggcactcggtaatgccataactaatttgatagtccacaacagatttatgctacgcaacaaaaactcaatacgaaaagttttgttcttaggtgatgatattatatttttatccaatgtaaatcttaaagttgctaatcatggtacagagaccaaagaattgtataacatggtcagcaaggtgagtgctcgcccatacgtaggtggcttcatatctatgattgtgtacaacattagtggtaaatcagggatatgcccagattacaaacgcatgcgccacagatactcagtgtgcaattacacatacccagtggatgagaccaaaccaaaggtagcgagcaggacactgtcgtacctgttcatgttagggaaaaatgaatggacgcagcagctatcagagaagatgggctataatttgaccctgccacagtggtaccaccaggatacagcaatcgcagccaattgtgagtaccatggtgaaacagagtgggaaacaagggcacatatatcggccctcagaaacatgatggaaaagcaactagcacacagaaagcagataatgacttggagtgctatataatacaagtacaattgacacaatttaatttcattgcggggtcaaatcgtaagc

SEQ ID NO: 856 - DNA, 13254 bp, Bolbocoleon piliferum endorna-like virus
  source 1..13254: mol_type = other DNA
aaaatggcgaaacacaacaacaaaacaaggaaagatcctaaaataatcgaacaacgagccgaacgagaggcggctcgtaaagaagaatggatgtgtgataaaggctggaaaggcttaactaagctagaacaaccagaaatcacacataccaataaatcgaaacttaaactacttagcaataaagaagtaggaaagaaagtttctacgcatttggatggagaacagctctcgtgccagacattgcgtaacagattcaaatcaatagctaagaaacaaggccccactagtaaaaggcctaacattccactaaccaaaccgcagctggtaagagtgatgaatgaacgtatcaagtgtggaggagaatttaatcacattgtgcccatttacagggccttcataccgtttctgactgatgacatcaataacgctggttggattaacatcaatcagatccttatatacctgctgcacagcgtagcaggggtggccgatcgtaagttgacccccgaacaatacgttacagcaagggctaacctggattgcatggatttacgtgcagataggccagttataatggctgaaatgtctggatttagacctgaagctgacgtattttacggagaagggcatgaaaatggctgcaaatgggtgaacaaattgatcacagacctcatgaagcgtcatggtggcttttctaagctccacatgctctcgtgtgagcgtgctgctattgccaatccctgtttgatggtcagcaaaaaccctgagaaaggtacaggtgacacatttatgactagcgcttcgactggcaaattgttccaatgcagacattgtggtggcatcaaccacataatggaagcgttcattgacccaagtgccccgaacatggctgaggataagcactgtggattttgctatggatcaatcgcttacgcgcctgaacaattgatagatgccatgccaccgatgtttggtttgcctgatgtttattttatggatgagcacatgggttcactactccatgagttgggagtcatgggaaaccttgacgctatatcagatagaatggatataactccagaaatcataagcgccgatttggcaaccataatgttaatcaaaaataagaataaccctaagcaacgtttagcttatgccggtgctacaaattgcaatgccattttatcaaacaacgtacactactgcaaggctagtggtgtttgcaccgtggacgccaacatccatcaagagaaattggaaatcatggattatgttctcaacagtgaaaatatcacttgcgcctcaagaaacgactggtcgtctaagatggacagcctactcaaatgtggtaggggtgatgttagctacgtcaagcatgacgataattccccggtaggactggtgaccattgataatttaaaatcaactagccatgtgcaaggtttggaccacatatacgtagtcagcccgtacgaaagtaacaaattgcgtaaccaaatagactgtgtgcacacacataaaactgacaagtcattgatattcgcaactcacggctgcagtgagactgttattgtgcccaaaactttgatgtatgaattgaatgaacacgattttgtgtcaatagatgggaagtttatgagccaaaagacaattgcccagactgataattataaagtgtataaattgagcctacacacaggtgtcatcccaagcatagtgtttcaagtccacacgctgcgtgataattggtcactgccggtacctacaatagcgcgggagaactacatctctggagctatgatggtaatcaagatcaagcacgtagaaatagatgtggagtttttggagcaattgtacgcttacaatgcatttggagagtactcaccgaaagtggttttggagtacgccaacaatttgtccaaacaaaaatatagcgtcaaaggaaaagtggtctcgtataggaacttgtctgcggtcgatgtcgttcagcacgccatggtcgcttgcatactccagaaatggaggatgggcaacgttatgaactcagctgatagtatgaccaaatatcagaaaaaacgcatattggacaaatcgatttctacagctaaagacatgctgattactggcctccttaagaagctgcgccaaattatgagcagaccagagttgcttgctattttagctaactttaacgtggccatggagagagccatgaatagcgaagaatggtaccagttttccgagtactggtccaacgggcgtgggaaaaggacatgtgttgccaacaccacttcattcgtgtggcctggtgttgtgctgactgatgatgaccaacttgatcccgagccccagatgacgcacggcttaccagaagacatagaatacaaattcaaagaatttaaggctgcacaacgtggcaggcccaaagctacgccatcgccaccgacagccgggccgaacaaagagtcaaccactctggccaccaagcatgctaaggccgtcaatttgactgacacgacgactgtagacccaacgagcccagacattgtcgacgtcagttatgcagctgccgtccgcgctgaggcgggttccgttaacacgactgttgcatttggccccatgtacgatacgatcctgtcatgcacactacctgagtacaggcaggttagtatgccgtctgaatccacaaaccacacactacgattggtgcagagttgtaagcaaaccgtcggtttaaacgctgacaaatatgaaatcaacgcaaccagggtagacataacaacaatcaattgtgggttccaatgtattatgtttaacaccatcaggacctacaacatatatacgttaatgcaagccactagcaaaacccatgattttgcgctcgacgatatgattaacctgtgcatcaacgttaacctaaactgctttatagaggttgacggcacggctatactggtgactgcagatgaattttcggctgagtaccattgcattcggtttgtgatgcatgaagacgaaggccactgggccccttgtgacgtcacattgaccgacggggtcacgtccatcccattccacaattcacaacacaactcagagtacaaattagccttcctgcgatccaacaacgtcatgaacagcacagcctattggaacctcgacaaagacagcaggcgtaagttggaggtggaaatgatgttgtgtgcacgcactgtgacccctgacgttagtgatgcgattttgaaggtcaaaacaacaaggcacaacggcaaagtgtggatgtttatgggcaaaacatttgacactgctacacataaatgccttgtcgatgacaaccggttaatggaattggcctggtttgacaaatcgttggctgagttggaggtactcggcgttacggatgtctataacaagaagaaactgaacgcctataacgctggcaacgaaatatttaactacggtaagttcatgttgtaccaaatggctttgtggagggatagtgcaacgactggcgtcatccacgatgtgttaaaccacaaggtgttctcatgcacgttaaacaaaattgcagacaaactgtacattatcccgccgcaatacaaaatcaaaactggggacatcctttcgatagaacacaagcatacatggctatgtaaagtggccaagccgaggggccgcacaacagtgattcatttagagtgtgacacggcatctgtcaaggtgagattgaagttaggtcaatcatatagcagcttggccatcgccgcgatgagcgcctttagccacattgcaccgccagggtccatggttaaagccatggacggatcccgtggtgtgattgcgccccctggttggggaaagacgacagacattatcagcaattatgaccccgctaatacaactatagtagtcaagaaccacgcggcccgtgacgccctgagtaaggcgctgaataaacccgtattgagtgtagagcgagcaacaatatcaaaaatcaccacgcccacattgatcattgacgaagcttccttagtgtccgacatagaattgtatactatgctgaccactgacgtgacggagatcatcatgtatggtgattcttaccaaatcaagcacagtgacatgtcaaccatgcctggagtcaggcacgtagacaatgctctcaaccaatgtagtaatgttaccagacacaaaggcacaagacgcattggtgcacctctgatcaacgaattacaaagggcagatgataggatgtacatgttggaagacggcaaccccgttacagattacgacgtggtcttctcacagtcgataaacaaccttcacgtaatccagacgattaaagacaaaaacatcaattttttgatggctgtgtatgcccagaccatcaccattgtttcacacatgttggacgaagccaaactgccgtactcaagagttagctccgacacactgtacataggcacagtccatgcaaatcaaggattgcaattcgagaatgtcatggtcatacaacatggtcccatgacgtcgtcacggctgcacatggataagagttattgcatggttgccgcaaccaggggtaaatcctatttgcattggtacgccattgacatgccaggttgcgaatcgctaagtgattgtctgactaacactgcctccgccaagggtaatgttagtagccccccccatgtaccagtggtggattgggcgagagacatgtgtaaatcattacctttttcatctgtcaacacattgcaagccgagtcagcatcaataaaacaaccgaaggaatgggacactttgggtataagcactgcaggtattaaagtgtccaacggccacatggtgctaaatcccgaccaactggcgacactttctaaatgccattattacttaaagcgttctgtgtgcaaaaccgccatcataaaggctatgctgtcggcacatggaggtcgtgttcatgaagacgatcattgggttacatgcaagtttggcgttatgatgtttggctgcaaaataatgatccacaaaaccttatggacaatgcatgtttccggaatgtttcaaaaacaggtaagaaacgacattgcagccataacgattcaaatcgacaaaccaacaactaaagagtatgaattgaataatattgcctttttagacctgcatgagttaaatcacgagttggtggctgttttagggttggtggcggacaatgaaggtctgtgtttcaacgagtgtgcattggcggctggaatgcccgtaatggtcgatgaaacccttgtacatgtcaagaaaacgcgcggatgttcagtgtgtgctgggttcactgtagcattgggcaaatcagtgatcctggaagtcgacgcaggttacaaatcttggtacggtagatgggttgcttacgattgccataacagtaggagtctttggatttacaactgcttaactagccggcagcccatgatgaggaccccagccaacatgcaaaatattctgctcatggaacgattgtttgccgcatatagttccacatggttggcggggagccctggcatcataaacttatgcccattcgaaagcctgaacaatgtctggcgtgacagactgttattgacaaacaacatacaggttgatcgggtgagattgaacaacaaccatgtacaaattgggtcaaggatattcacaggaaccaaggacggtgttagacacgtgttctactgcaacaacgacgatgtgatgatgcaggcggaaatagcgaacacagaccagattttatggcttgtggacagaatgacaatggaccagaattacaagaagataactagcatactagatccatccaacctacccttaggtggttttgcgggcacgattgtgcctctggacaagcacatagaaaacaacaccgccgttgctcgagtattgttggaagaaaagcgcaaaatagacaacatttccattcagtcgcgacatgtcatcaccgttccaaacgctgattacgagttctacaaatcgttcatatcacaatactttggtaacgcgaacgttgtcccaggcatgtcaaatggtcgaatcggttttgtgggtgtggtggattgcattaacctgcagacgtacatggatgctcaaacagtgcaagttgtaagtcaaaccccacttttgcctgttgtgcttaacgcttgggacgtgtttgcaacgtgcttgcccatgcacatgtcggcaactgactggcgttcgcaacacgatgcattgagccaaatttgctccagtacgttactaccaatatatcagacacaattagcacaaagccaggcagccaaccgttcgactgaaacaatcaacggtataaagtctgtgctggacaagataagcaagcacgttgattctgggcattattggagcagtgcagacggattgaggatgatctctaaacctggcataatctatgcatcagtatacatgttgtcaacaccgatactagatacgctcgccaaaacttacccaacaagggatataatgggctgggtggtagacccaactaatttggaatctggattgagttacgcaagcccaacctcaattgcgttccacggcggggactcattccaatggtcaaaagaacatttagaagatatattggagaatagacccatcattctgaatggtaacgtgtaccgcccgttagtgcaaagccgggtggggccaattgccaacatctgtctaaagcaccttggtaaagtcacattgcaaccgtacattagtgcggattcgcgatacatggaaagtcaatgtgtagctgtacgcttccccaacattaacagtgattggtacacaatgtttaacaacggtaaaattgacatccaagaatacctgctggacagtaaaatatttaacatgttgacaaaacgtgctctgatgtcggataccaccatatatgaattaatcaactacatacgccaaagccatttggcgtacttctacacatcacgtggcagtaacaagaagttaaaaaccacatggcacacacttgtagtgactgcaatggccgcactcatccatgcgaatcagcttaaaatgaattacacgaccatgctcggcatgattactgacgctgatgggcgttcctcctccaaccacgcgcgcatgatgtttggcttccttaactacctggcaaaaagcacacccactaacgcagacgactttttgaacaacctgcccaccaatgtggtcagctttttattacccgaggagaagatgacgcaattgattatggagcgattcgattacatgatgaacgccatgaaattcgagataaaatcaaaccccataaagctgatcaaacataatggcaaaactagctcggtgctccaactagcagaccctggtaaccaagggaggaaccaagccatcgcattaggcaggggcctgcgcacggttgttggtgctgtgcgatttagtgtgacccacaccagtgctcctggatacattgaacctcacataggtactactactgtgccgccacacgcccagcattcaaccgcaaaaccaagcgataaggtcccgttagccgaaacagccgattcaagaatggtgcccctcaacgagatcgacacgatcccgaagcattggatttctgaacctgttgccaccattgaaggaccaaaaatattgtatgctataacagccatgacgccatcttatgcctgcccacaaccgagttccagagcttattacaatgctaagcggaacataaagctggtgacggatttggtggatacagagttagggcaaacgcgcattgatttgcaatctgctgaagattggagtgtgcactcaacaatgctgaacggcctatctagcacgcttcaaacagtgtctagagctagaacttttgggtgtccttgccacatcgagcgtttaccatttgaagggtttaaggctggcaatgggatgtgctccatgttcggccccggcggagcattacggactgatgcaacaccatatgatatgaccatgttggtgatcatgatgggctcaaggggcgatgccgaagcgtggtacagacttgccaatttgacgcctggtgtcaattaccactttgtagttgataaacattatgttggacccaccctgagcaacgtccaatacgtgcaagtggactcctcacaatcgcatgcagagtatacagctgtcagaagcccattggagctgattaatcaggcgggcttaactcacatagggaaatcgatggaaaaaatgggagcgtacatcatggcagtgctagacttaataagtgacggttcaggcaaattcgactgggtattttcgtcagaagctttccctttcttggaagaggtggcccaccggttggatgccaaggcaggggcttatgttgctacagcaaatgtagagagtgacggattaccttgttgtttcatataccaagataattatcctatgtctgtgactccagtatcccacaccaattcccacaagctgttcagacagttggtgtcgtctgctagtgaacacttgtcatccgcgttaggagtgcagacatgtgacccattgagtgtggccagtgttattattgacatgtcggcacttggaccttaccctggttctatttacaatggaaaaatgactaggttgggctcactagattgtgacactactccggagactgaagcgttgagccgatttatcactgcaattaaggaggacatacttataatcgccttaggggcattattattgcgtgaccattttacagtgatcaagaggctgattgacaagtattcgcaaggtgggttcaaagtcgtggtcattaatgtggaagtctggaagacgaaaccctccactgtcggcatgcaaataccgagttgggtgtatgacatcaggccatgggatgaaacccgcgcggacgacatcgtctcattcaaaaacatacggtacgagaaaatcaaaggagaccctaagtgtgtgtttgtgtgtcatggtggtagtggcagtcttgcttcatgcgtcgctaataattgcgtgccactagtagtcccacaacttgcagaccaaccatttaatgcaattcagttgcggcactgcttgttaacggaacacgatccagtgcctaaccacactcaattgctagctctccaggccttattgctgcatagcctgcgattttcgccgactaggcaagccatggtggacaacttgttgcgcttattgcagggcgtttcatttaaaatgtacaacgtgaccgaatgccttgctggcattaaaccgcacatgtcgattaccgatttcgacgcgatggtagctaattacgagagggggttagaaccaaccatgttgcacaccgagggcggttcaacgagtgacgatgatgaatcagatgccccagtatacattgcacgtacacctgaaccaagtgttgacgatggtagcgaatctgacggtgaaagcagcaacagcgaaattgatgaaaatatagcctccacatcagcactaacaaccgcggaggtcgctagaagggaaagacaacgccaaaaagacaaaaaatgggcattatccagtcacgcaataatgtttaccccgaaaccacaaagcaccggggacctagttggcatctcagctgacgggacagcagacgaagtggtggaaaggcccctaattaacgatggtttgctaccacacaatgtggccattgacttaccagaggtcttatgcaatttaaagcgcaggccagcattggtgagaggaacatgtgttgacccaactgtaatgtacaacgagtatacaaatcgatggtgcgtgaagaaagctctcgcgcagcatgtgaacggtttgagtgacaacacgaggcttaagaggatgatcgaatgcattgatgcgccgctgctcaccagcaaggagtgcataaacatcagttggatgttgggcctgaatatcaacgtgcaagttggtgacgaactatacggcacatcggatgtgaacgaaactattttgaccaagttcaaacagggttccacgattggacatgccatgcttggtacgtcttcgatggttggcgacaagcagccttacatgtccataccctaccaaatgaacgttgagcctaggagcacgacgattaaagggaaggttattgactacaaaggtgccaaacatagctttggaaagttgatagccgacctgggcgggcgtacccacgtgtcgtttaaagatgtgttagcaagatgcacagaaccaaacctcgccgccatggcggacagagcacagcttaaatacatcccgataacgccaattagaatgcaacactatgggtatgtgtggcagtctataggcgagccgactatatatcaatgcttgttggcagtaggtgaagcaacatacagtgttgtggtgtacgacgatggagcgtacagctggcccttaaactttgatctattacccacgtgcatgtgtgttatcttgactaggaaatcgatttttatggcagaaaaacgcaccataataactgatgatgtcaaacatttgtgtttaaacaaggcaacctatttgcatttagttgcaaaagaacccgcaatcaactgggcttacctgcacgatcatactaatgagttgggcttggttcatgtgtggttctttgacaacagatcacatcacatgttcgatgaacgtaacaccttaagcaggttggtgcaagcgaacagagtgaggtttgtacctactgccacttctgaacaggtggatttactattaagaccacaatcaacagcctgtaaagtgtactggcacggtggattaaaaatggccccgttatgccctttgaagttattgacgagcattaaatcaagcgatgtggaactaaccccgagcggtgcttcatacgtgatgcaacaggcggtacaagtagaaaaattcttcaatgttgtaggtggggtttggaaacaaaagtcttggaaacttccggaagctaccgatgccataacggaagagtgggaccctacgtattatcttgattttcatgttgccgattttccgtgcattacagataaaaccatgctggagactattctgtatgacgtcgccggcggcaaagtggaagatgagttttatataagtttggtagaccaattttatgaaaaaatagaaggccatcatttaacttaccgcctagttgacgacgacagtattgactcagtgtgggtgggacggttgcaaacaaggctccacgtggaggacgatgagttctgggtgatgaatgctaaggtgatttttatgatagcaaaagctgtagtaggcaatgtgcgagattacggttcccgcaacacacagatgactagtgtcaaatttgacccaacaaagccacctggaccctctgatgaaagaaacgtcacttaccaattaggaaatgctgtcttctctgcaactacggagccaggcacgaccatggataagttccaggtggtgcgcgcgacgcagataagcactttggaatctttatccatgcggccctacgacatcgaagccatttgttgtttttctgatgttggttatggcaatgagttggttgtcactgaaaaggaaacgttggaaataaacgacaatgacaaaactgttaccctaaatatggagtgcatggacaaagatgtgaggccagactctttggcgtatttttcaggatgtgaagtggagacggctgtgcggtacgggccaacagccaacgttagtatggaatcaagtgaactctatggaatgcctggagtcatctcaaagccattgatggcaaaaatgccaaataggggtaggcctgtgatgcctgaaatggccaaccaagagtttaactcggtatcgcagaggcagggagacgtcaagcactacaggaagaaaaaccttgacaagcgcaaagtatggaacaccatgtgccaagcatactttaggcctgattggagggaacacatccagcactacgccgataaccctataggaatcagtgataatgcaactaaggaatggttggccaaacggcgtgacggcttggccgtcgagaaggaattgagagctacattgcaggaggggatgtccatgcatcccatgaattcaatcaatgttcacgagaagcaggaggccctagtcaagcctgatccaataagttcattagcagagcaaaaaactaggtcaatattgtggcaagacaaaggcatatgttccataatttcaccaataatgatggaagccaagcaaaggcttaaaaacctgctcggtgcacatgtgatatacacggacggcatgaccccccaggaaatcaacgactggttgctagccaaaggagttccagacaatgaagactgtcttttggagaacgacgccacaaggcaagatgctcaaaccgaccacgaaatacttgacttcgaattcttggtgtatgaaatgttgggcgttgatccaagcgtattaagtttatggcgcgaaacacacaactgttggaagtttaaaggcaactggtgccgcggcattatggacggcatgcgattgacggggcaagctacgacagcattgggtaacgtgatagtcaacttggcaatgaattcagcgctggtgaggcgtcatttagcatcactcagatttgtgatggttttaggggacgacaacgtgatatgtttgaaggcacgtatagatgttgaagcagtcaaaaattatagcatgtgctactggaacatggtaaccaaacccaaatttaacaggttagcctgtgaatactgtggcatgtgcgtgtacatcggggacaataactatggactttgccccaactacgaaaggatcttatgcaaattagaggttcctaatggcgttggcagaataacggatgagaaggtcaccaccaggattctgagttatttgcatttagtgggtagtgttcctcaagctcaagttatagcaaacaatattgttgatataaacataccaaaatggtacgattatcaagcatcgctgtggtgcaatgcagagttacataaaacatctcaagtggaggtgttgtcgaccgtgcacagaatattggaaatggcttccaaaccaaagctgtacacatttaaagtgtcagtgccaaagaaatgggatccgaggtggaggagcccacatggagtatacccagacaacataaaaatagctatgtagctattacacatggaattttgatactcatatatgcccaactcacgaaagttgtgaataaaccattcttct

SEQ ID NO: 857 - DNA, 13581 bp, Botrytis cinerea endornavirus 2
  source 1..13581: mol_type = other DNA
cattactaccatgtctaactacaccaaatccaacgccaacaccatgaaccaatcaccacgaaacaaaataacaaacatcattgattctgttgctctcgaggctaacaacagaatcatgactctcgaaaaagcctcgaaaaacaaacaaaaacaacaaacaaaatcacaaggaactgatgaaatggaggtcagctctcttggtaatagatctttaacccataccactggccacttgacaccacgagcctctaactccaacagcatcgacagtaacagcgtcaaccacaaccgctacaaggggccttttgctactttagctatggatgaaccactgccaagtgaccgggtagagcgtgagacagcaaccgatttcgctgacatcggattgtcgtcgggtaattctgacaaagcaaatgctctgcagattcaaattcccagcagcaagagcgagttcaatgaagcacccaccactttcacagagatgggtttcccaaatcaagatactactgaaccttggtatgtcaagatgctatccacattccgctccagtgacacaaatgctgaccactacaagtcattacacggggtatcgcccgcaagtcagactgttgtgccatggaagagaacagacgtgccaaaacctattgaagatgtccttgataacagtaaaacccctgacacacccactcttaattctgcgcgcaaatcatgtctgtgggtagccatgcacacgcttaaccctaggggtatggaacaaataccaatcaacataagcaatcttaagtacttagactaccaaaaatacaaagtctggcgagcaggtgtgacaaaaggttggttagctatagagataagacgtgaccactccaagaaccatctgcactgcctttccggcaatcacaaggaacaactattatcaggtgatggtaaattaacgggtgtgatccactggacaaagatgtttactgagattaacaatgaatctcagctgtcatggggccaattaaactggagcaacccagatgcaggtctgattaacttttaccataccttatttcgtagcacaaatccctcaatatcaactagtctgtacatacattgtgagaaatccactatgcgagaactcatagactaccagtatcctgggtttaagcaacttggtaagacatttgcattgcctgaatccttcccgacccccatgccactaggtgtcctaattgagcacttcaaactcaagattaatctgaagaaaggcttacaactcacatctatattgcgtaatgccaaacaccattacacacttaccctgattgaccagagcaacattgagctacgcaaggtacctgcaacgtttgatgactcttcccatctaagtttcagggcactcgaaactatactgtcaacaatttactctatgtctcaagataggcagttagctatgaacaatcacaagcatcaaaaaatcttgcctaaacctatggtaggtggtaaaggagactgctggcaacaaattaccatgttttacgcttacacagaattatggtttggacgcacagatcgcagcgatgctatgcccatggaagaactttatgagataatcaagaagaaagcacttgtcgagtaccccatgttcaggtttacacatgagggagacaacatgtatcacgtagagtatgttggtttggataggacccataaaccatcctataaagaaatgtggacagaagaagaatatgcagaaatcatggctgaagtaaaagtcaaatacgcagggtgttacagattaccagatttggccattgaatttaagcgaataattgaccaaaaacaggctgaacacatgtcggttgaaattgacctagcttttgagtgtacagcttatatcgacaaaatgtatgatctctttgtacgtgatgattatataactactgaagaaattgatagtgatgtagacaatttcttcaatgcagttgaagctgtattgacgcaatatgagggtgacaacgtattattggttggtgcaaaggccactgtactagaaaagctagcgcatgatctgaacgtgcctctaagcatgcttgatagtggagcagtacgagcacaactagcatctactatagcttcaatgtctgatatagcagtgaaaccacgtgacacaagagtagagcaattacctaatgacacgagtgacctagttatcgaccagttaagccgagactatggtaactttaagtttattcggggctcgagcggcagtcacccgcatccataccacaacgccgccaggcatgtcatcacccggtacatagtctctctttttcccaagtcagatctgttatatgacataggtggcaacatgttatatcatgtacaaaacggcgattggcatgttcactctgtgtttaaagctgaatcttacgaagataaatcacgttacttaacctacactactgctgtcgtgaaacatattagtgtaagaaaatcacagactaatattactggggctactaactcagtcacccaaagcatgttgtcaaaggtgttaacagctgataacaaattatggtgtaacagcgcgtggggtgattgtcaacatgggaccaaaaatcacgcaactttcgccatgtccgttgacacacttttcaacattgagccatctgagctgttgaaaggttatattgcccacaaagtaattatggcaaaacacgctttgactgtgcccaaagcatggcatatggctgactctggaacgctaatgttcgatgaaggatactggtcaaaatcagacggcaaccttaatgtggtattcccaggtgagtcaatgacctaccaaaatagcattagtttaattgatacgtatataaagcgcccattaatcatgggagatagtcatgctatctattgcagagttaatggatataaagggccacacctaatgatagaccattttgtgttaccacgtactctagtcattgaacaattcatgaaacacactatctggtcaaaccctgacacaaacaccatcgtagtagttgtacctgttattgacatacatgcaccagtcactctattaaagcaacagccgtttaccatggaagccatggtgttgaacatacctttttatgaaaaattgatgaatagactgttacaaccacacacatgggaggggctcactcaatatgcagctggcttagttggccgaacttatggatcagccagtggcttcacacgccaatttgatattactaacagggatgttaagaatcattgtttagtagcctattggtctaataaccgttcacttgaatcaattcgccccttggtcaagcgagctgaggttgacgtacatcagccatctttcttacaacaactttggtcatcacttaaaactttcctaactgagttggggcgtcaatttgaccctacagagtctgattttatcaaaaaactagttagtgataattcagaagactcaatgcatctcggcttattactagacagtgcatttaaagctatagacagtgttaatgctagtactaggttggatgtgtcacattacataactaatggcatgatgtatgaaactggtgtcactgcaacatcaaagtgtgttaatattgatacgtggcgtcaaaaccatgttgaggtatcacacagtactgtgtacaccttgataaccggcaaggacgatatagcacctgtcacaattgtatcgtgcaaagtcgctactacatgtcagcataaccacaaagtagcccatgaacatgtggttggcaactcaattgatcaacgcgttgggatgtgcaactgctgtggcatacttagcactctaacagaccaaaatctatgtgcattgtgtggaagcacccgattgtgccatggcaaaagccatctgtgcaaacatgaacacacagtaattaacgatgagtgctgtggcaaactagcgtgcacttgtaagaagaattataaatgctcgtgttgccaaatgcctagctctttgccagtatgtgaaatgtgtcgtaatgccccaccacccaaaacagctgtgtgggacgcgggcattatcaagcaacctggcacgcaagcagaaaccaatacaactgaaccaacgcctgcttcaaatataaaccatccagacgtaacggacgatattagtgatagccactgtgatgatgaagcagtaaataatgtgccggttgggatgttaagtgacgcttccagacgctcgagcatagtaagtgctgttgtcgccaacgcgccgcgccacatgaattttggtgatcacccatcgataattccgttaaacaccaatataacagacagagcacaagtccaagagagcgccaactcaccagtagactatgatgatttcgtcaatgaaggctcaaaccactctgtaattagttttgagatacctgatgatacgtctactattaacgatagggttagttcagagcgacaattagatgaactgcgtaaattagtacccgtcaataatcagccaataaatgagtatggattcgcgggcttagaggctttgagtacggtgtacaatgccattcgcttcactgagagtgcttccactaaaccagttaccaaattggtactaccaccaaatttggttgccagacaaacaaccgttagtgctgtcgttatagcatacggtgaggcacgaggcgatggactatgtggcgcacatgccctcagccagctatgtgatagtgatgtagatactgtaaccacaattttggagagagtaactggcaaccatgactggtggtcagatgttgaacttgctaaggcagcagcagtcttacgtgttaacatactaatagcaacaccagctggatctattttatatatcaatgactctagcgtgcgccaatatgtcagtatttgcactttagttagcttgactggacaacgtcactgggtaccatgttcaagtatggttgaccagctgtacacgagcgacctacggaaccaatattacaattacatttttttagcgacctatgcaagcatgagccaagactcaactaagacagttgctgatgtactagaagcagtagaccgttttgagccgatcaacattgactcggctagtgttgtgtcttatcatgttgatcatgaatggtctaacataattgctaattacccaaacggtgttttcaccacgctaggctatgaacacacatctaagagcttttatggccaaccaatttcaaactatgttaccgagggcgagaatgggctagtaatggtatcagccccaacagggtttggtaaaactacgcgcatagcagagtttaatgatccgaagaaaaaccatgtagtaatatctccgagccgtgctacagtaatcagcgccacgacttactgtaatgatgtgcttaacatagcatcacaaggtcgcgctgactcaacctggcacccaaaaaacaaaaatgactcaacactcagtagtgcgaaagtagtttacctgacggtagactctgcttacatggcattatgtagtggcaaacctaatgctacttggttaaaaatgttgtctggacggtgcatttggcttgacgaggtacatgatttaacaccaaaatatgtctgtttagctaaggcattaggttcgcttgttaccggtgtgttgtctgcgacactgcctaatgtgccacctgttacagacacgctacatcctatacgaactatattcgctgctcctgaccaactagacaatgacttcaatgattttattgagcgcgggccagagaaagggtcattttgggtggttccaagttccacacaaacagctgtaatgccggctgaacgcgtcacccaagcagccagtagtggtgtaaagtttgccagcgttacatccaagacattagctaatctagaactagcgactataaattcggccatatgtacaaactgtatcactactggatctacgctaccaggcttagagaacatgcatgacttaggatatagaattacgcccgaactcatattcccaccatacaaagccgaaatcaagggggttagcaagatgcgattgtttaactataagcgactacagtatgatatgacacagttgacacaatcaagaggccgcgcaggtagaacgagtgtggggtacgcggccatgtcgctgccagctgcggcaaacactccagctatacacgttgaactactatatagcttgatggtcggcatcccagcaaacacaagatgtaaagacctgtacgacaacttgaaaacaaacaaggtggattttgaagccattaagcgtgagcgcgatatcgcagtgcaacgaggttatgatttccagaatgaacaatgggatgtgttagattcatggatagaaactgtgagtgaattgtatctgcacttaaaaaacaagatagctttcaccgatggaatagttgacaacaatacaatatcagctgcattcatgtctgcactcaacactgacagcaaactacacattgataaagctgtcaaacgacgaatccagactaatatgcacaacaaactaattcactatcctaaattacataactgtgactgtgggttgttaacggtcttaggaaaacatggatgtggcaaccaactggtgttacccaaacctgaggccgagtggtttaatatgacaatggagcagtcgtatgctaatgggagtttcagccaccccaagtcaatcctcgcgattgacacgtctccttcagctcgtagtgtaaacttatcaactaagttgtcacaacagtttatgtctctgtacttcaagatgctgaacaccatactacattcagctaaacatgcaacaagcagtaacgtcccaactaacataacccatggtgtcttgtttgaaagtattactagcaacaaacacgccaatatttctgaattgaaacatccacataaattgaacaatggctcagtgttaggagtgtttgacaacaacacaagagaactgcgcttagagtgcgtggttggcacgaccatcgactgctcagtcacatcaccccaagccatagtaatcttaccagtacatacagcaaactatgcgttaggtatggcactagctagcttgaccatgaatatcacactcaacacagcaatagcagttgccacgcgctcaacaatcattgttggcccgcctggctctggtaagactcgtgaattgcataggttgttcgatagtgacaaacacactaaaaggatagtatcaaaacagactggacaaatatctgaattcaaaaacttaaccgtgccgccaacagctgctatatttgcagataatgttgaaacactatacgttgatgagtttggtttaatgacagcgtctgacattttactgttgtctaccaagtgcaatgtgatggtattatcgggcgacataaaccagaaagtagctgacgatactgacctagacacgtcaaccacactagacctgtcttggtttaggaacaatgtgggatctacgaccgtgttcaatgagtcttggcgcttcgggtctcgaacggcttctgttctgaattactttggcacgcttggcccatgtcacaacgagaatgacaaaggtattggtatggtgcagtttaattggcttacaaagaagaacatcaacaccataataattgaacatgacatacaattaatcataactcattctaatgctttagtaatgcagataaagcaaatattaggcacaaatagtaacattaactgcatgacaactggtcgtgcacagggcagccaagaaaagcgcgtattatatgtagcttatggtaactcaagcgaaacgtacacagcggctgaattgtatgtagctctctcacggcacagtgaacactgtataatagcggcagactatacatttgaagccacagctaaaacatatgggtttaacaagcatatgcaagatgtagaatcaatgcgttatggagccatcactgggccaaaaattcgcgacttgagcgtgagttacatcatggaagcgtggtctaacatacgctttaattaccataagtttgctgagccaaagtataacaaggcatttgataattatcttggatactacaatgctttgtcacactgtgctgaatacttaaccagcgacgtgtctgataccaatggcttggatattagcatatctgcgtgcgtgatctacaacaagttgtaccgcggtgttgatgacagcgagttcacacaacctttatcaccacaacaccttgaggtctacaacggtatgacaaacatattcaacacgtttggtccaggggtcacagtgcctgtagagagaacggctaaagtacttagtgaatatttgaggcctatcgccagtgtgagacagtattacattataccattctcaaccaatgtgaaactggtaggtaatgctaataacttcacttcatatgcgctttgcaatgtgctaacgggtgagattgtgatgacacaaactaacaatctgacattccaattgcctactgctaactctctccgggcgtttgttgagtccatgaaaaacaatgtcaactgggataaagatatgtgtgtgcagatgtcagtaagtgaaatactcttccagcgcttgaagaagagtattgttaagtcatatcaggatatggcaaacacatctgagtctgtgcataattacacgatcagtaacataccaacactctactcactgtcatgtcgtaaaatgtctaacttgcccaaatcgctaacattgtttgaaactatagctgatagtctacagaataactcaccatcgcccaatcaaatgataacaaaagtctacttggacgccgttaatcaactggtagaaggtgacacacctagaggctcaagtctaggctacacaacgttatcagaagagctcatatatgatgccctggtcggcgtacttcgtgagttctacgctcatgataatatagatttgtttatctcacaagtgtgtgacattactgcctcaagtttcgaggtcagcgaacctacaaataacacacatgtgctaactctaccaataaaacgtctacatcaaacagtcgagcatctccataagcacatccacaatgtagtaattatcgatgtgaaacagcggaagataatcgcaactcttgatataccacctagtactgagcactattggcatattgatgacttgtataaaaggacacacgcactattagtattggggctactggatgaccaaatcaacacctacaataactataagctaaacgatgttctctcaaacatcaagaaaacagcgactaaagcatttacggcccaggaacagtttttttctaagttgctcaagtatattaaaaatattatcaactcactaggaataaaggtacgcaaagggaaagaaatgttgaacatatgtggtttacagcagttgtttgcagcacggatgaaacaaccacacgaatacacgcaaagtgcagcgaaagcgttgtatgattcatattcattagcaaccaacacactgaaaaatcacgctatcaagggtttacaacacctagtgttaggccacgtctccaataattatgaaattgatatcaacaggcaattgcagagaacagtagcttccgcagtgagaatgacacatgacaatcgcgcaggtgatgatatctcaacatcttcattattacggttatattacagcttgaagttctatgcgcagggctatgagtcgggtgctgctaatatcatgtgttacgacgtgtttaatataggcaacgtgaaagtgactattaatgaatcattgccagtaatgttattgcgacggcttaatgatgatgcgcgtaatagtttaatgggagaggcaaatcgcaaacaatcagttaagtcaaagcgcacacaagccagcagttccaataagtgggatggacaaagcgttggcttgtccataaagcagatgtttgctgtagatagcagcaatgcgctagatgacgcgcctttcgatgaccttttgtacgaattaaagaccactctgtcggacagtgtatcggtcaccacattggaaaatgctaacagacatggaatggttaaacttaactcacttaagatggtccttgctatgtaccctagaataacaactaccatgttgactgtcaccaaagcttactatgaattatataaccatgtgtttacaccagtgctagaagtactacaaaacacaataggtacgggcctagttaaagtaaaaaacagtatcatacggttcctagagtatgatgctacaatggctgatgctaaattggaaatacaagatctacgtgactcattggatagtgtgcgtcaaagcccagtgcttacatcacttgatccgacgccaatcaacgacgatagtagcgaagctgagtcgtctatgtacgaagatgcaaatgatggaatcagtaacaagatagagccgtcaagcacagacaaaatacatgagaactcagtgttagccgaatatgtcaaacaacaactcatgtcaggtaatggttcaatagatgggtcactctttactacttgtgggagtgacgtcaaaaccaaaatggtatatagtcagagaaagaagtacaaatcgagtatgtttgtcaaatgggaacatcaagaaaattattcaacagtacacgccagacctttgccgaaaataaccatgggcacaatagatggtgtaatttatatggtagttgataaagttgccctcaagttagtacccacctatgaaggttataaaatatggtggaacgatgcgaatgcactcaaaaatgaaaataaactatgcattggtctgaatctgttaacacgaattgctggcgatagtgcaggcgacataattatagcattgattacaaagatgttcacagatgttatcaattggtgtcgactcaccaaagatgaattagtctggaaaacaaagtatttggctggcggcgtatgtcgttcgaaatacaactattcgttttccacaatttcattgtaccacattctacaagatagtaaacagtttaggcgcctgatgtgtcatgacacaaggtcaagatttattatggtcggtgacaaaatacacataacgagaaggacggaagcattggtgcttgattgccacacctatgccgtagcgagcaacactgctacagggtgttgtctaactatatacagtgcattacagagccgtattgatataatggtgcgagctattgaagcaaacatggttgctggtttatgtgattataccgatagagctggtaagtctggattagatggattgcgcaagcttggtataaatattgattcgaacacattaagtgacattgatttcgctaaatggaaggtgattttgcgagatgctcttgaaaacaatcctcttagcgcaatatttgatatgggcctcgacgatactttcacatctttcaagcaattgatggaaagtgagaaagcaatgttagatatagaaagcagggtagatactactgtaagtctgctaaaatcaaaagtcgctatctgcatgccaagtgggcatggcaagacaactcttaaggggacgttactgagaaaatacccatctattgatgtgtatgatgccgatgattacatcaccgatactgatgccttaggatggtccaatttcgatcgtatgatgatgcaatacaagttgcgcttgtctgatgctgttggaaactcaggaaatagcaagcctaagttggtattgtgccaccacccagatgcagctccagatggatttagcatagttttgtttatgaataaagaaacaccctacacgcccgaacgtctatggaaacgcactaatgaagaacgtttattattagcacaagataagtacccactgtacacggtgtcgttcgctgatatggaacaccaaactatgctgtttatgctacgctcaggtgccacacctagtatcaagttgcatgcaaagagtgagctggttgatccgatgccatacagtgaggctgagcaatttttccaatcgcctggaccggataatttgtggcacatgccaatacaagggaggctgggtgtcaatgatcacaggctagggacggcgcaacaagtgatttataagcaagggccacacgtaggattgtgcagaccaacagtgcagatgttgtgttctagcactttcaatgctgtatcatcacgcctgcgcggcatagagcatctacgtaaagtcaatttcagtagggaggagtatatgacaaagatgagctattggtttaaaccaaactggcgtgatatattattggattaccagaatgaggtagtaatgccaagtgtttcagcatcactcgagtgggctatcaacaaagggcataaagtagaactaatacgcgatatggctgaggctgtcttaaattacgaacgcgccactgaatatacgaatatacaagcacatttcaaggtagagaatctcatgaaggaaaacgtggatgagcttgagcaccagcttgggcgtattatcgtttggaacaaccaaaatgttaacatgatactctgcccgattgtcaatgaatgcaaagcacgattcaagaatttgttcaatgacaatttactaacatacacagatggcatggacatggtaacactaaacaagcatctcagcaaaaattcacgttcaaagtatatgatcgaactagatctcagcaaacaagacagacagacagataaacaaataatagattttgaacaatggttgttaactgagcttggactcgacggtagagtcgtacattatatgaatggtatactagatgggtttagtttaaagacaccagacaatgtgacgggtttcatgccaacaatgcacctatctggtggtgctatgacatcactagggaatgagatgcgtaacttgttactcctgtcagacatatgtaaagataaagccgtgaaccatgtgtacacactaggtgacgatagcctcatactcacggatgatgattttgacggtaaatacgtggcaatagtggctgctaataaccacaatgttaaatgtaccttcacaacgtcagaagattctggtgttttccttcaactaatagtgatgtggatcaatggtaggtacatagccgtacacaattttatgaggctaaaagataagttagcttattcaccatataacgcggatagtgacgaattcaagtcgaaaacagcgtcgtacttattgatgattggaaaccattatttaacatgtaagcgactgcttgagctaggattcaatggcactgtaccgttaggaacaacgatggaagatagactagaggcaaatgcgttgcataataattgtgatgttgctgatattctaaatgttatacatgatattgtagtagtttcatatggtaaacacgaaagtaaaatcacaattactggtgtaggtgtgctgagttaccgacatctcaaaagcggtatacatatgacgaaagggcgacagagtgacacttccttactagcatcgttccaatcagcagtgcaacaagagttggatagcaactaagtcaaacagtacgcaggtagcaagcataagagagtcgaaggtagataaccttttttaaccccccc

SEQ ID NO: 858 - DNA, 13582 bp, Botrytis cinerea endornavirus 3
  source 1..13582: mol_type = other DNA
accactacaaccatgtccaactacaccaaaaccaacaccaacaccatgaaccaatcaccacgaaataaaataacaaacattattgattctgttgctctcgaggctaacaacagaatcatgactctcgaaaaagcctcgaaaaacaaacaaaaacaacaaacaaaaaatcaattaattgatgaaactaaggtcgatacacttgacagtcgatctttaacccataccactaatcatttgacacaaccgctttctgtcttcggtggtgttgacggtaacagcgtcaaccacaaccgctacaaagggccgttggccactttagctatggacgaaacaccgccacaagaccgcgtggagcgtaacgcagcgactgatttcgctgatattgaattatcatccagtacacctgataagtcaaatgctctacaaattcaaattcctagcaacaagagcgagttcaacgaggcgccaacgacatttactgagatgggtttccctaagcatgacaccactgagccatggtatgtcaagatgctatctactttccggtccagtgacactaatgctgaccactacaagtcattacatggagtatcacctgcaagtcaaaccgtaataccatggaagaaaattgatgtgcccaaactgattgaagatgtcctggacaatagtaaaacccctgatacgccaacccttaattcagcacgcaaatcgtgtttgtgggtagccatgcacacacttaatcccaggggtatggagcagatacctatcaacataagcaatctaaaatacttagactaccagaaatacaaggtctggcgggcaggtgtgacaaaaggttggttagctattgagattaggcgtgatcattctaaaaaccatttgcactgcctttctggcaaccacaaagagcaattgttatcaggtgatggtaaactgaccggcgttatacactggaaaaaaatgtttacggaaattaacaatgaatcacagttgtcttggggacaactaaactggagcaaccctgatgcagggttgatcaacttttaccacacactgttccgcagcacaaatgcctcaatttcaactagtctatacatacattgcgagaaatctactatgcgagagctcatagactaccaatacccggggttcaagcaacttggtaagacattcgctttgcctgaaccatttccgactcctatgccactgggcctcttaattgagcatttcaagctcaagattaatctgaaaaaaggcttacaactaacatctatactgcgtaatgccaaacaccattatacacttactttaatggatcagagcaacattgagttacgtaaggtaccagcaacattcgatgactcttcacatttaagtttccgagcacttgaaaccatattgtcaacaatttacaccatgtcacaagataggcaattagcaatgaataaccataagcatcaaaagattttgcctaaacctatggtaggtggcaaaggcgactgctggcaacaaatcactatgttttacgcctacacagaattgtggtttggacgtacagatcgcagtgatgctatgcccatggaagaactttatgaaataattaagaagaaagcactcgttgagtacccaatgtttaggtttacacatgagggtgacaacatgtaccatgttgaatatgttggtttagatagaacacacaaaccatcctacaaagaaatgtggacagaagaggaatacgctgaaataatggctgaagttaaagttaaatatgctgggtgctatagactacctgatctggccattgaatttaagcgaataatagatcagaagcaggccgagcacatgtcagttgaaattgacctagcctttgagtgtacggcttatattgataaaatgtatgatttattcgtacgcgatgattacataaccacagaagaaattgacagcgacgttgacaatttcttcaatgcggttgaagctgtgttaacgcaatatgaaggtgacaatgtactactggttggtgctaaggctacagtgctagaaaaacttgctcatgatctaaacgtaccactaagcatgcttgatagtggtgctgtacgagcacaactagcatctaccattgcttcaatgtctgatatagcagtaaaacctcgagacacaagagttgagcaattacctaatgacacgagtgacttagttatcgaccagttaagtcgcgactatggtaactttaagtttattcgcggctcaagtggtagtcacccacatccataccataatgccgctagacacgtcattacccgctacatagtttcactcttccccaagtctgatttgctatatgacattggtggcaatatgttgtaccacgtgcagaatggtgattggcatgtacattcagtgtttaaggctgagtcttatgaagataaatctcggtatctaacctacaccacagctgttgtgaaacacattagtgtgagaaagtcacagaccaacattacgggggcgaccaattcaatcacccaaagcatgttgtcaaaagtgttaacagcagataataaactatggtgcaacagtgcgtggggcgattgtcaacacgggacgaaaaatcatgcgacttttgcaatgtccgttgacacactattcaacatcgagccatctgagttgttgaaaggttatattgcacataaagtaattatggcaaaacatgctttaactgtgcctaaagcgtggcatatggctgattcaggaactctgatgtttgatgagggttactggtcgaaatctgatggcaaccttaacgtggtgttcccgggtgaatcaatgacctaccaaaacagtatcagcttgattgacacttatataaagcgcccactaattatgggtgacagccatgcggtttattgtagagtgaatggatataaagggccacatttaatgatagatcacttcgtcttaccacgcactctagtcattgaacagtttatgaaacatactatctggtctaaccccgacacaaacactattgtagttgtggtacctgtgattgatatacacgctccggttactttattaaaacaacaaccatttaccatggaagccatggtgttgaatatacctttttatgagaaattgatgaatagactactacaaccacacacgtgggaaggattaacccagtatgcggcaggcctagttggccgaacctatggatcagccagtggttttacgcgccagtttgatatcacaaacagggatgttaagaatcattgcttagtggcctattggtcaaataatcgttcacttgaatccattcgtcccttggtaaagcgagctgaagttgacgtgcaccaaccatctttcttgcaacaactttggtcatcacttaaaactttcctaactgagctggggcgtcaatttgaccctactgagtccgatttcattaagaaactagttagtgacaattctgaagactcaatgcatctaggtctgttattagacagtgcatttaaagccatagacagtgttaacgccagtactagactagatgtatcacattacataacaaatggcatgatgtacgaaacgggagtcacagccacatcaaaatgtgttgacattgatacgtggcgacaaaaccatgttgagatgtcacatagcactgtgtacacgctaatcactggtaaggatgatatagctcctgtcacaattgaattgtgcaaggcttctagcacgtgtcaacataatcataaggtagcccatgaacatgtggttggtaactcaattgaccagcgcgtaggaatgtgcaactgttgtggtatactcagcaccctgactgaccaaaatctgtgtgcgttgtgcggaagcacacgtttgtgtcatggcaagagccatttgtgtaaacatgaacacacagtaatcaacgatgagtgttgtggcaaacaagcgtgtgtatgtaagaagaactataagtgttcatgttgtcaaatgcctagcaccttgccggtgtgtgaaatgtgccgtaacgccccaccaccaaaaaccgccgtgtgggacgcaggcattatcaagcagcctaacacgcaatcagaagaaaaagcaccagaaccaaaacctgctgaaaatgacgatcatccggaccctgctgatgatattacaggggactacagtgaaggggatggtgtaatcaataagccagctgggatgttaagtgatgtctctagacgctcgagcatagcaagcgctgttgctgctagtgctccaccgcacatgaattttggtgaccatccatcgcgcataccgttaaacaccaacataatagatagagcacaggctcaagaggctacaagctcaccagttgattatgatgactttatcaacgaaggttcgaatcactctgtagttagtttcgaaatacctgatgatacgtctactattaacgacagagtcagttcagaacgacaattggatgaattacgtaaactagtgcctatcaataatcagccaacaaatgaatatggatttgcgggcttagaggctttaagtacggtgtacaatgccatacgcttcactgagagtgctcctaccaaaccagttaccaaattgacactaccaccaaatttggtagctaggcagacaactgtcagcgcagttgttatagcttatggtgaagcacggggtgatggtttgtgtggtgcacatgccctcagccaactatgtgattgtgatgtggatactgtgaccacaatacttaagcgagtaactggtaaccatgactggtggtctgacgttgaactcgccaaggcagcagcagttttgcgcattaacatactgatagccacaccagctggttccattttgtatatcaatgactcaagcatacgccaatatgtcagtatttgtactcttgttagtttgactggacaacgccactgggtaccatgttcgagtatggttgaccagctatacacaagcgatctgcggaatcaatattacaattacatattcctagcgacttatgcaagcatgagccaagactctaccaaaacagttgctgatgtgcgcgaggcagtggatcgttttgagccgatcaacgttgactcggctagtattgtatcgtaccatgttgatcacgactggtcaagcatcattgctaattacccaaacggtgtatttactacgttagggtatgaacatacatctaagagcttctatggacaaccaatttcaaattatgttaccgagggtgaaaatgggttggtgatggtgtcagctccaacaggatttggcaaaactacacgcattgcagagtttaacgaccaaaagaaaaatcatgtagtaatatcacccagccgcgccacagtaataagcgccacagcttactgtaatgatgtgcttaatatagcatcacaaggtcgcgcagactcaacctggcatcccaaaaataaaaatgactcgaccctgagtagtgcaaaagtagtttacttaacggttgactcagcttacatggcattgtgtagcagcaagcctaacgccacatggttgaaaatgttgtcagggcggtgtatatggcttgatgaagtacatgatttaacgccacgatacgtttgcttagctcaagcattaggctcactcgtaaccggtgtgttgtctgccacactacctaatgtaccacccgtcacagacacgttgcatccaatacgaactatctttgcggccccagatcaacttgacaatgacttcagtgacttcattgaacgtggtcctgagaaagggtcattttgggttgttcccagttccacacagacagccattatgccggctgaacgcgtcacgcaggcagcaggtggtggtgtgaagtttgctagcatcacgtcaaagacgctagcgaatcttgaactaacgactataaactcagccatatgtactaattgtatcactactggatcaaccctaccaggcttagaaaacatacatgatctaggatatagaattacacctgaactgattttcccaccttatagagctgagattaagggagttagtaagatgagattgttcaactacaagcgtcaacagtatgatataacacaattaacgcaatcgaggggacgcgcaggcaggacgagtgtagggtacgcagccatgtcactacctggtgcagctaacacccccccagcacacgtcgaactgctatatagcttaatggttggtatcccagcaaacacaaggtgtaaagatctatatgataatttaaagacaaataaggtgaattttgacaccattaaacgcgagcgtgacgttgcagtgcaacgtggttatgacttccaaaatgaacaatgggatgtactagactcttggatagagacagtgagtgagttgtatctgcacttaaaaaataagatagcttttactgacgcaattgttgacaacaacactatatcagctgcttttatgtctgcgctcaatactgatagcaagttacatattgacaaatctgttaaacgacgaatacaaactaacatgcacaataaacttgttcactatcctaaactacataattgtgactgtgggcttctaacaatcatgggaaaacacggatgcggcaaccaattaatactgcccaaacctgaagccgagtggttcaatacaacaatggagcagtcttatgccaacggtagttttagtcacccgaagtcaatccttgcgattgacacgtcatcttcagctcgtgacgtgaacttatcaaccaaattgtcacaacagttcatgtctctctattttaagatgctcaatactatactacacgcggctaaacatgctacaaccagcaatgttccaacaaacataacccatggtgttctgtttgaaaatgttaccagcaataagcatgcaagtgtctctgagttaaagcatccacataaattgaacaatggctcggtactaggtgtctttgatactaacacgagagaactacgcctagaatgcgtagttggtgccactatagattgctctgtcacgtcaccccaggccatagtaatttcacctgtacacacagctaactatgcgttaggtatggcactagctagcttaactagaaatgtcacactcaactctgctatagcagttgctacacgctccacaattatcgtcggtccacccgggtctggtaagacgcgtgaattgcacagaatgtttgacagtgaccaacacaccaagagaatagtatccaaacagactggacagatatctgaattcaaaaacttgactgtgccaccaactgctgccatattcgcggacaatgtagagaccatatatgtggatgagtttggcttaatgacagcatcagatatattgctgttgtctactaaatgtaatatgatggtgatgtcaggcgatgtaaaccagaaagtagctgatgataccgacttagacacgtcaactactcttgatctttcttggtttagggacaatgtggggtctacgacggtgttcaatgagtcttggcgcttcggtgctaaaaccgcatctgtgttgagttacttcggtacacttggcccatgccacaatgacgatgacaaaggtattggcatgatacaatttaactggctaacaaagaaaaacatcaacactataataatcgaccatgatatacagttaattataactcattctaatgctttagcaatgcagataaaacagatattaggtgcaaacagtagtatcaactgcatgacaacgggccgtgcacaaggcagccaagagaagcgcgtgttatacgttgcttatggtaacgctagtgagacatatacagcagcagagctgtatgtagctctctcacgacatagcgaacactgtgtaatagcagcagactatacgtttgaggctacagctaaaacgtatgggtttaacaaacacatgcaaaatgttgattcaatgcgatatggtgcaaccacgatgccgaaaattcatgatttgagcatgagttacattatggaagcgtggtcaaacatacgcttcaattatcacaaattcgcagagccgaaatacaacaaagcgttcgacaattaccttggttactataatgcactatcgcactgtactgaatacttaaccagtgatgtgtcagacaccaatggtttagatatcagcatatctgcgtgcgtaatctacaacaaattataccgtggtgttgatgacagcgtgttcacacggcctctatcaccacaacacttggagctctataacgggatgacaaatatactcaacacgttcggtcccgggatcacagtacctgtagagaggactgctgaagtaatgagtgagtacttaaggcccattgttagtgtacgacagtactacattataccattttccactaatgtaaaactagttggcaacgctaataacttcacttcatatgcactttgtaatgtgctcactggtgaaatcatgatgacacaaactaacaatttgacattccaactacctactgccaactcactgcgggtgttcgtagaatccatgaaaaacagtgtcaactgggataaagatatgtgcgtacagatgtcaataagcgaaatacttttccagcgcatgaagaaaagcattgcaaagtcatatcaagagatgactaacacgtctgagtctgtgcacaattacataatcagtaatgtaccaacactttactcattgtcatgttgtaaagctactaacttgcccaaatcacaaacgctgttcgaaacaataaccaatagtttaaagactgacacaccatcacccaacaacatgataaccaaagtctacctggatgcggtcaatcaactagttgaaggagatacaccaagaggatcaagcctaggctatgccacactatcagaagaacttatatatgatgcactagtcaacacactgcgtgagttctacatgcatgataatataaacctgtttatttctcaagtgtgtgatattactgcttctagtttcgacgtcagcgaaccaacgagtagcacacatgtgctaactctcccgataaaacgtctacatcaaacagtagaacatatccataaacatatccataacgtagtaattgttgatgtgaaaaagaggaaaataatcgcaaccctcgatataccgcccaccactgaacactattggcatattgatgatctatataagaggacgcaagcactgttattattgggattattagatgaccaaattaacacttacaacaattataaattgagcgatgtcatcttgaacatcaagaaaacagctactaaagcagtcacagcccaggaacagttcttcgctaagttgctcaagtacataaaaaatatcatcaactcgctaggtgttaaagttcgcaaagggaaagaaatgttaaacttgtgtggtatacagcaactgttcgcagcacgaatgaggcaatcagataaatttgcacagagtacagcgaaggtatgctcagactcatactcattagctaccaacacactaaagaatagtgccatcaaaggtttacaacacctagtactaggtcacatttccaacaactacgatattgatatcaataggcaattacagaaaacagttgcttcggcagtgaggatgacacatgacaatcgcgcgggagatgacgtctcaacatcctcactgttacgtttatattatagtttgaagttctacgcgcagggctatgagacgggtgctgctgatattatgggttatgatgtgtttaatataggtaacgtcaaagtgactatcaatgaatcattgccggtgatgttattacgacgactcaatgaagatgcccgcgattgtctgatgggagaaacaagtcgcaagcaaacagtcaaggttatgcgtacacatgctaacaactctaacaaatgggatggacaaagcgttggcttgtcgttaaagcggatgtttgcggctgacagtggtaacacatctgatgatgtaccttttgatgatcttttgtacgaattgaagaccactctatcagacagtgtgtcagcaaccacattggaaaacgcaaaccgacatggaatggttaaactcaactcacttaagattgtgcttgccatgtatcctaaattaacaaccaccatgctgacagtcactaaagcctattacgaattatataatcatgtgtttacgccaacgttggcactattacagaacacaatatgtaaaggagtaatcaaggtcaagaatagcataatacggtttttagagtatgatgctaccctggctgatgctaaattagagatacaagatttacgcgaatcgttggatagtgcacgtcaaagccccacgctcacaccgcttgaaccaaagccaatcaatgacgatggaagcgaatcagagtcatcaatgtacgaagatgcaactgatgggatcaacaacaaaatggaaccatcaagtacagataaaatacacgaaaactcagtgttagcagaatacgttaaacagcagctcatgtcaggcagtggttcaatagatggttcattgtttaccacctgtggaagtgatgtcaaaaccaaaatggtatatagtcagagaaagaagtacaaatcgagtatgtttgttaaatgggaacaccaagaaaattattcaacggtgcacgctagaccgttgccaaaaataactatgggtacgttagacggcgtcatttatatggtagttgacaaagttgctttaaaattggtacccacatatgaaggttacaaaatatggtggaatgatgcaaatgcactcaaaaatgagaataaactctgcattggtctgaatttgttaacacgaatagctggtgacggcgcaggtgacatgattttagcactgatcacaaaaatgttcacagatgttattaattggtgtaagctcaccaaagatgagttggtctggaaaacgaagtatttggctggcggtgtgtgtcgctcaaagtataactattcattttcaacaacttcgttatatcacatcctacaggacagtaagccgtttaggcgcctaatgtgccatgacacaagatcaagattcatcatggtgggtgataagatacacataacaaggagaacggaagcgttggtacttgattgtcatacttatgctgtagcaagcaacactgcttcaggctgttgtttaaccatatacagtgccttacagagccgtattgacataatggtgcgggctattgaagcaaatatggttgctggtttgtgtgattataccgatagggctggtaagtcagggctggatggattacgcaaacttggtattaatattgattctaacacattgagtgatattgactttgccaagtggaaagtgattttgcgtgatgcacttgaaaacaatccacttagtgctatttttgatatgggcctcgatgacactttcacatcgttcaagcaattaatggaaagtgagaaagcgatgttagatatagaaaatagggtagacagtacagtcggtttactaaaatcaaaggtcgctatatgcatgccaagcgggcatggtaagacaactcttaaaggcacactgcagagaaaatacacatctattgatgtgtacgatgcagatgattacatcaccgatattgatgccttaggttggtcaaatttcgatcgtatgatggcacaatataagttgcgcctgtctgaggctattggtaattcaggcaataataagccaaagttaatcttgtgccaccacccagacgcagttcccgatggattcagtatagttttatttatgaataaagagacgccctatacgcccgagcgtttgtggaagcgcaccaatgaagaacgtctattgttagcacaagataaatacccactgtacacagtatcatttgcagacatggaacatcaagctatgttattcatgttacgatccggtgctacacctagtatcaagttgcatgcaaagagtgaacttgttgatccaatgccatacagtgaagcagagcaatttttccagtcgcctggaccagacaatttatggcacatgccaatacaagggaggctgggtgtcaacgatcataggctaggtaccgctcaacaagtggtttataaacaagggccacatgttggattgtgtaggccaacggtccaaatgctgtgctcgagtactttcaatgctgtgtcgtcacgcttgcgtggtatcgagcatctgcgtaaagttgatttcagtagagaagaatacatgacgaagatgagtcattggtttaaaccaaactggcgcgatatactattagactaccaaaacgaagtaataatgccgagtgtttccgcatcacttgaatgggctatcaacaaggggcacaaagttgaactcatacgcgatatggctgaagctgtcttaaattatgagcgcgccacagaatatacaaatatacaagcacatttcaaggtggagaacctcatgaaggaaaacgtggatgaactagaacaccaactcgggcgtatcatcgtttggaacaatcaaaacgttaacatgatattgtgccctattgttaatgaatgcaaagcgcgatttaaaaatctattcaatgacaatttaataacttacacagatggcatggacatggtaacgctaaacaagcatctcagtaaaaattcacgctcaaaatatatgattgaactagatctcagcaaacaagacaggcagacagataagcaaataattgattttgaacagtggttgttaacggagctagggcttgatggcagggtcgtacactatatgaatggtatactagatgggtttagtctcaagacaccagataatgtgacaggtttcatgccgacgatgcacttatctggtggtgctatgacgtcattagggaatgagatgcgcaatttgttactcttatctgacatatgtaaaggcaaagcagtaaaccatgtgtacacactgggtgatgatagcttaatactcactgacgatgattttgatggcaaatatgtggcaatagtagcggctaataaccacaatgtcaaatgtactttcacaacctcggaagattcaggtgttttcctacaactgatagtaatgtggatcaatggtagatacatcgcagtacataattttgtgcggcttaaggataagttagcatattcaccatataacgctgatagtgacgagttcaaatcaaaaacggcatcgtacctattgatgattggtaatcactatttaacgagcaaacggctccttgaactaggatttaatggcactgtcccattagggactaccatggaggataggctagaagcaaatgcattgcataacaattgtgatgtatcagatgtgctaaacataatacacgatatagtagtggtttcatatggtaaacatgaaagtaaaatcactatcaccggagtaggtgtactaagttaccgccatctcaaaagcggtatacacatgaccaagggacgacagagtgacacttctttactagcatcgttccaatcggcagtgcagcaggaattagacagtaactaagttacctagtatacgggcagcaggctgaagagagtcgaaggtagataaccttttttaacccccc

SEQ ID NO: 859 - DNA, 13765 bp, Botrytis cinerea endornavirus 4
  source 1..13765: mol_type = other DNA
accattactaccatgccccgctacgtcaacagcaacaataccagtaaccatggccaaccaacaacaaccaagcaaacaaattcaacaaacaacaaacaaccacactgctccagaggcaggcagtgcggttgtgacactcgaagatgcctctacaatattaacaaaacaacaacaacaagaaaacaacacaaatagtgctacgaatgataattatgatagcaattttaagcctaaacacgtcacccaggctaatacatattctgagctgtcatctagcaacacaattgttggtaacaaacgacacgaccaagttacgcgtaatttggtgccaacgcaccaggctatcggatttggtaaggatggcctgggcatctatactacagcaactggtttcaagggaccatgtgcaacgcttgtgaacaacaacagtacaaaaacgttagatgataccatgtcagcaagaccgcagacgccagctaaaaaaccgagtggtagcaccaaagtgccaacaaacttttcagacatagatttgagtagtagtggcgacaacctgcgaacaggacagttacaactgcaaatacctgaaaacacaagtgctaatgaaccatctccttcaacattcactgagatggggcaccctaatgccagcgtgcagatgccatggtacaagaaattaatgactaattactatgtaaccaataccagtgacaagcactacaaattaaaacatggtgtgtcacccgccagcaacactatccaaccatgggttgctacagaagttagccttgatgtcagtgaagtacttgacaatagtatgacaccggatacaccaacgctgtcaacactcaccaaatcatgtctctggaaaactatgtttgcgttaaacgcagatggtatggaaaatataccacaaaacattagcaacttgaaatatttagattatcaaaaatataaatattggcgtgcaggcgtcaaagatggttgggttgctctggaagttcaaagagaccacactaaaaaccacatgcacatcgcctttggtcagcacacagaacaacttttctctggcaatggcaaactaacaggcgttattcattggactaaaatattcacgccagttaatagccacacacaactgtcttggggtcagttaaattggagcgacccatcgcgagacttagtggagcattacacgacgctgttcaacgttgcacacagcaccaagccacgtggcataaccctacactgcaccaacgacttgcttcatgatttgttgcaatacttgtatcccggcatgccatctttgggtatagccatgacaacgttgcccaatataacagcacccatacgccttgaggattacttggcacacacaagctgtaaacctaagttgaagacttatgctttgcagcaattcgctttacagcaaagcacttatcactatgccattgagttgattgataattacaatattgaaatacgacaagtgttggccgatttcagtgataatactctatactcatatagagctatgacagcaacattatcgatgatttccctgttgtatgaagagcagaaatcgcgctacaactaccatttaattaagatggctgacagccaacctgttgttggcggtacatctgactgctggatggacttaatgatgttttatccatgtgcagacttaccgagcgacacacgcaaaccaatacctatgcgccagctaatagaaatcacgagtaagcctacatatacaaatcaacctaggtttaccttttcccaacttgacaacatgtactaccatattgaatatgttggtatgtgtggaccagcaccaggtatggcagacgaagacaattatgacaactgtggttttggtggtgaagatgaatttgaaggcaccctgacaatagaagaacttagagagaaaatgattagtgttattgcaagctcaacaaattcaaaagtaggagatgatgacacagcaaatttgaccagtgtcaacaaccccacaatactagacttggctacaatactttataatgtggcatgctacccatttgacttagaaggtgacaaactaggaaaataccaagacattattgaggagttagtctacgcattacaagtcggtggcccttttgtgggggctaacaaaactatattagagagaattgctgcagatatgcaagtcccattgagtatgttagacagtggagctgtccgtgctgaattatcaaacactattagtaagatggcagatctggccatcaaacccagggacacaagaacagaacaattaccgaatgacaccagtgatgaagtggttgatagattgaccagagattatggtaattttaagtttatcagaggttctggtgggtctcatccccacccataccacaacgcatcgcggcacgtaataacccgtcatattgtatcacagtttccaaagtcggatttaatttacgacattggtggaaatatgctatatcacacacaaaacggcgactggcacgtgcactcagttttcaaatcatcagcacctgaggacgcagctagatacgttaaatataccaaagctgttgttaaacacgcagtcactaaattagccagtgctaacatcgtagggggtgatgtatcggtgagtgtagagatgctgcagtctgtgttgacaaaagacaacaagctgtggtgtaatgccagctggggtgattgcaatcatgggacagacaaccatgccacttttgctatgagcgttgacacactttttaatattgatcctgatgagcttgtcgctgggtacatcaaacacaaagtcataacggccacacatgccataacagtacctaaggcatggcaccaagctaatagtggcacgttgatgtttgatgaaggctactggagtaaatcagatgggtacttaaatgtcgcttttccaggagagtctttagtataccggaataagattgagctaattgagacctacattaacaagccactattggtcactaataatcatgcagtttactgtagagtgaatggctatattgggccacacttaatgatcgagcattacgtcattccacgcaccaaagtcatggaagcaatcatgaggcatgccatttggacaaatcctgatactaacaccataattgtcgcagtaccagttattgacatctacgcaccagttagcgtattaaggaaagagccatttgtcatggaagcaatgtgtttaaatttacagttctatgagaagctaatgaacaggttgttgcagccacacacgtgggaaggtctcacacaatacgcagctggtttggttggcagaacatatgggtcagcgtcgggattcacacgccaatttgatattagcaattctgatgtgaagaagcattgtttgatagcatactggtcaaacaataggtcacttgagtcattgagaccactagtcaagcgctctgaagagacagtgcatcaacctagtttcctacagcaagtatgggcgtctctgaaaacctttctcatcgaattgggtaggcagtttgatccaacagaaaccgacttagtaaagaaattggttgctgacaatgcagaagacagtatgcatattagtttgcttatggataaggctttcaaggcaattgacagtatcaatgctagcacgagacttaatgtttcgcaccttataacagaaggccagttagtcaacttgaatgtaacatcttcagcagaagttgttgatatagacatatggcgggaagagcacgatagcatgcgcaccagcaccgttaaagacatgattaagactaatcagggcctaaagaaaatagaacatttagagtgttctataggccccaattgctctcataaccacaaggtttcacacacgcatttgattggcaatggggttgatgcaggagttggaccctgcatttgttgcaacgttctaagtacgcttactaatcaaatgagatgtgctctgtgtgctgagacacacttgtgtagtggcaaaagtgcactttgcaaacataaacatacagtgataaatgatgagtgttgtggcaagcccagttgtgcatgcaaaaaaatatacaattgcgactgttgtcagatgaagtcaatacaacctgtatgcatgatgtgtattgggttcgtcaagtcaggtgacagtgctgcaaaggttgttgccacagataaaccggtgtatacagatattacagtgaacaatgatgttgaaatggctgggcatgaggttgcgctcaatgaagacaatgtgctgtggcgggataacaggccgcaagacaacgaaccacaagaacaacaaaatgtggaggatgatatgggtacggcgtaccaccacccaactgccgtcagcatcagtgaagatgctgatgacgccttagaacgggacatgttgttcacgatgaaccaagccggtacgatgcagactgctaatcccattgacccagaacataacaatttagatgttcctcacagtgaatcaagcgatgtccaaactattatcagtggtagtgtgagcccaattagcgaagtccacagcattgaattgcctgatgatgtgagcaatcttaaaccattagttgatgggctcgaagcaagacatatcgacaacctacggcagctaaccggtaaagacagctcacaagtggacagttatggctttaacgatggagaagctctatcattaatctataactcaataatgttcgcgccggaagccagctcaaaacagtggggtgctgctaaactaccacccaatatgggcgcccgccaaaccacggttagtgtcttaattgtagcatacggacaagctattggtggtggaatatgtggtgctgatgcgctcagacagttagctggtgtgacgctcgaagacacaatcatgactcttaaggcggtcacacataaccatgagtggtggtcaggtgaagaattagcaaaggttggtgctatacttaatttgaatgtgttaattgcaacaccagacgggtcagtcttatacattaataacactagccaagattactattacagtatatgtactttagttagtgaaacgggtgagcagcactgggtgccatgtactgcaataataaatcaattatatagtagtgatacttacaattcttactataatttcttgttcttagctacttatgccactatgtctggctcgaaggaagtaacgtatgatgaagttattaggaaagtaagtgagtgtgagttaattagcactgaagctgcatccactattagcaatcatatagatactgattggagtacagtgattaagactttccctggcggtagattcacttccaactcatatgagcacttgtctaaatcatttgccggcaaagatattcaagattatactgagaccagcgaaaatgggctgttcttgattactgcaccgacaggtttcggcaaaaccacaagagtggcacaatttggtgggctgaaatctaaacatgtagtaatcagcccatctcgttcaacgataatcaacgcagtcgactactgcaatactgtacttgggatcagtgcagctggtagagcaaatagagaatggcatcccaagggcaccaaattagaagctttgtctgacaagcaagtgatatacttaactgtcaatgcggcacatgatgctttgtgtggtaagaaccccaaccaacaatggctacaaatgttacaaggacgcaagatatggttagatgaaatacatgacttaacaccccaatatctaaaattagcaagcacattgtcatctcttgtgacaggagttatgacggcaacaccagtatcacgaccacccaaccttgatacacaatatccggtgcttaccaagataactcataatgatgttattgatatggaattcacagagcgctgtgaggttggaccagttgatggtgaattttgggtggtaccatccagtgagatgacgactcgaatgaaccatgacgaagtaaccaaatatagtgcaagcgggcgcaactttgctagcataacagcaaaaactttacctgaagtaaacatgaattcaattgactcagggatttgtactaattgtgttacaactggcacaacaataaccaagctaagcactattaatgacttgggtctaagagtcattagtgaactgatttatcctcccattgacgagaatgtgactaataaacgtaaactaaagctatttagctaccccagacaaaaatatactatggcacagctcgtgcaggcacgtggcagggctggtagaaaccgtgatggcgttgcacgtatggcactcccgggtggtgaagaacagttaccactacacactgaattattgtatggtttaatgaacggcataccagtgaacactaggtgtaagactttatatgatgctttacgcacgaaaaaatttgagaaagatgatttacttaaacgtagagatgaagcaatgactcggaactataactttagtactgaacaatgggacaatcttgacgtttggatagacacagtagaggagttattgaaatatgtgtcacgtcctatatctttcacagacagcatagtgacagatacaacgattaaagaagcattcatgtcgagtcttaacaagaaaagcacgctacatataagccgtgtttctaataggaatatacaaactaatttgtttgataaaacaattagatatccattatttagagtttgtgattgtgggctattgactgttactgggaaaagtgggtgtggaaacaaccaccaactaccagctatactagctactagttttaataacatgatgacagcctcatacgtaaacaacacatttgagcacctatctggtatacaagctatcgacacatcaccaagtgctcgggacattgatgtgcgttataagatttcacagcaatatttttccatttatacgaaaatgttaaataccattctgcatgctgctcgccttggtatgtcatctaatttacctctaaccagcaaaaatggggtgtacttaataactgccaagccagacacagcctatgatgtgtcaacaataccacatgcacacaaagtcagcaataactctgtagtaggtgtattagacttgaacacacgtgagctacgtttagagactgttttaggtggacggattaacgcgtttacgacatcggcggcgtgcacccttatcatacctgtgcatactgctaattatgcattaaatatgtgcgtaaattcgttgatcaatgaagtaacactaaattcatctattcaggtagcttgtaaatcgaccttaatcaagggccctcctgggtcaggcaagactaaaatgctatgtgacctttttgaggctgatactggccgcaaggttatgatctcgaaacagatggacatgttaactgacaacacaatactagcgctgccaccaactgcagtatttaataatggcttgtcatacgacaccatatatatagatgaggttagcttgatgacatcaagtgacctacttttactcagctcattggctccgcggtttgtaatggcgggtgatatgaatcagaaaatagcagatgacactgatttagagacctctacaacacttgatttatcatggttcaatgacaacatcagtgatgtcaagcagctggatgactcgtaccgtttcggcgacaaaacgggagcggtattgggttattttggtaccataggccagtgtcataatgaccatgatatgggtattggttttgagtatctcacttggatgacaaacacagccatcaatgacttagtgattaaacatgatatacaactaatcatagcacattccaatgcgtcggtagcacagataaaacaattccttgggcccgacagcccaattaagtgcatgacaacaggccgcagtcagggcagccaacagaaacgtgtcatgtatgtagcatacaacaaccctagcactgtttataccaatgctgagttttacacagctttgtcaaggcatacggaatactgtattatagcaggtgattacaatgtgggtgcaaaacttaagcaacacggagtatttaaacattttactgacacaggcttaatgaggtatgggtcaccaacagccaatgagcaagtgactatgacacctatacaaatagctagacgtttaaagaaagactcggtaagacattcggctattaaatttaaagacacacagcttaacatgctacttgcttatgcttcaaaagttaaagcatattactcaagctttatagatgatgtcttaaacaagaatgtcaccaatactggaacagggttctctgtaatgttatgtcacgtttacaatcaagtggtgaacggtgtgcgcgacgtgggttacatatcaacactgaatgcagctaatttgtctacttacacagcgttatcatctgcgttgtcagttctgagtgaatcacgtaatgttaacccaaatctggcaatacaagcagtctgtgacatcctaaaaccacaatgccatgtgggacaatatgtggtcatgccttacatgtcaccagtagtggagagtggctcgggtaaacattatgcagacttttatctattagatataaatgagtgtgctacggtatatctagaggaaacacagttgaccacgacagaaccaactgttgataacatattggcagcctgtcaaacggtcagagacagtgataaatgggaccatactatgtgcaagaaatttggggtcatgcacaagacctacttagccgcaaggtctgaaatagcgcaccaatgtagctggtatcaaacaataaatttgccgcttggtgtcaagaaactagccaactcttatccgctgtcgataatgagtgcctgtgctccaacacgtgatttagcacccattaaactctaccaagcgctggagaagatgattatggggagacttgatggtacaaagacagctagtgtaagcagtgaacgaataaccaggctatatatgatggcacttaaggacacttcacggaaggtgaacaaatactcaccgtttgaagacgcaatggacaacattacatatgacaggctcacattgctgttgagcaagaacactattgcccatgatgtagataaattcatttcagaccttagtgatatagtatccccacttataagtgatactaactacgtgatcttgcctctgtcatttgggatctcaattagaggagcgacaaatgagcgtgagatagatgctgcatttatagacattggcagaaagaaaattatagctagagtaaacatacataattttgggaatgatgagtgggataacaatgaagtttggcatagaatggaggtattattgaaaataggggcgcttgacgatcaaatttgtgaacactcatggtttaatcttttgcaataccttaagattggcaagaaagtaaggaagataatgtcaaccggaaccaagcatctgtttggtaaactgtatgctggcataagtagcataatgctcactctcaacccaacatcggataagttgccatcagtactaaacatttttgaactgcttatggctactattgacaatgctcacagaacattagggaacttagcaactagcgttaaaactaatgttaataaagtccagtctacttacacgcgtctggcgcaatcaatcgtggcattttacaatggtgaaataaaatctgacgtgttgtctgctattgacacgcggattttgatgactgatggattcacagtagaacatgttattgtaaaagtagtagatgagatagcaaaagagcacacacggcgatctgggcaattggctgcctataatgtgccccaattattgagagcgcgtgagagtgtttattgttacttggctggcctgggcgattgcgcctctttgctaatcaacaaagctacatacactatcagaacattacagatgtatatcaataacctcttaccgactaggttggtacttgatctaaacaagcaagctagtgaaactcagaaaacaaaattggctaataaatctgtcgttgaaccaattagcatgagctttgaatggaatggcgccaatgcagcaaagtacataaagtcaggttttattagtgaggcaggcagcagagaatctgaaatgctcttcgactatgactcatatgaattacagaaaactagctctgatgctccaagtgatgtaacacgtgctggcatgcaaaacctacgagttttggacaatctattaagaagccacccactgctcaccacgtcattgttcagtttagctagggcttactcagcggtattaacagcagtttttgaaccactcaaatcattatggcacaggtgcattgtgagcccaatgcgacgagtacaggatagcattataagattcctagaatatgatgctattttgttagatgcagaaaacactataagcgatttgacagcacaattgtcagctgaagaatcagacagtgccataagcgtactaaacttgggtggcaatgtgatgtcaggtgatagtgacgaagagtctgtgtatgaagatgctgttgatgcagtgaaatcaatgaccgaacacaaaccatcgccaagtgacaaatcacacgagaattcaactcttgctgcacatgtgttgtcacgcatacaccttaaccaaggtacaattgatgataggctattcagtgtacaaggcaagttagccaagtgcactttgtcatttgacaagagaagacagtacaagtctggcctcatgataacttggaaccactatgaaaattactcgactgtgaagcctaggattggcccaatgtgcactttaggtgaagtggcaggtgtactgtatgcagtcatagaccgtgtggcgattaaattagtaccagtttcaactggttaccaattgtggtggaatgataaaaatgctgtagcaaatgagtctaatttgcaattggccttaaccctactatcaaagactagtggtgatactggccctaacccggttttggcattactgatcagtatattcacagacatgctggcatggtgtaggcttatgaaagatgagcttgtgtggaaaaccaaatatttggcaaatggagtgcaacgaacaaagagaagctatgatatgtctacaaaaaatctgtaccataatttacaagacaacgtcgtttttaagaggctgatgacgtgtgacacacggtcaaggtgccatatggttggcaacacgttacatatatcacgtcgtaccagagctttaactttagattgtcacacatttgctgtcgcacgcgacgatgaaaatggcatggcagtgttaacaatttatagtgctaaacaaattaggattgacttgatgctcagagcaatagagcataagatttgtcgtgaattcatatcagatgatacgagagctggtaaagcaggtctagatgggcttaggaagctaggcatcaacattgatgcacgtgatgtttcagacgccgactttgagaaatggaaattaatcttgcgtgacgcactagcaaacaaccctttgagtgcaatgttcgatatgaacttagatgacacttttacatcattcaagactatgttggatgctgagcagtcattgatggacatcacataccaagttgaccaaactatgtccatgctacaagctaaggtagctgtttgcataccatcaggacatggcaagaccacgttaaaatcaactttgttgcgcaaatacccatcaattaacacacttgacgccgatgattatataacagacttagacgcccttaactggggcaattttgatgtaatgatgcagcaatataatgtgcggctaactgaggctgtgcgggcgattaaaaatagcaaacccacattgatcttatgccaccaccccctagcagtgcctgaaggattttcggttgtgttaatgatgaatacacaaacacctgacacaccagagaggttgtggaaggaaactaatgaaaaacgcctcttggctgagcgagacaactatccactgtactatgtcacgtttgaaaccatggaacatcaagtggtattgttcatgctgcgcaatggcacaaccccatcaataaagttgcatgctaatagcgagctggtagaccccatgccgtatagtgaagctgagcaattctttcagtcacctgggccagataatttatggcacatgccggctgctggtaaactcaggcacaatgaccacaaatttggtacaagtcagcaggtaatatataaacagggaccacatgtcggattgtgcaggcccacggtacagatgttgtgcagcagcactttcaacgcagtatcctcaaggctacggggtgttgagcatttaaggaagcataattttgacaatgagcaatatctatctaaaatgcagtattggtttaaagatggatgggagcaagagttgaaaagttttggtgcagacattataatgccaagcattgatggctcacttagatgggcgatcaacaagggccacaaagttgaattaatacgtgatatggctcaagcagttctagactttgaaagagctacagaatacacaaatattcaagcacattacaaagttgaaaacttgttaaaagagaatgttgatgagcttgaacaccagcttgggcgcattattgtgtggaacaatcaaaacgtcaatatgatattgtgtccaatcatcaatgagtgcaaaactaggttcaagttgttgtttaatgataagttggttacatataccgatggactagatatggtcacactgaataagcatttgaaaaataatgtgagatccaagtatatggtagaactagatttgagtaaacaagacaggcagactgataaacagatcatccggtttgagcagtggttcttaggaaaactaggtctcgatgcaagagttgtgcgctatatgaatggaattcttgatgggtttagccttaaaacgcctgataatgtgtctggttatatgcccacaatgcatatgtctggtggagctatgacctcactgggcaatgaaatgagaaatctgttgcttctttctgacatctgcaaaggaaaagcggttaaccatgtgtataccttaggtgatgatagtttaatattgacagatgatgattttgacggcaaatatgttgctatagtagcagctgagcaacataatgtgcggtgcactttttctaccagtacgacacatggcatatttttacagttgataattacgtgggtagatggcagatacatagctgcacacaatatattgcgcctacgtgaaaaactagcttactcaccttataattccaaatcagatgaatacaaatcaaaggtagcgtcatacttactcatgataggcgataattatttaacatccaagcgtttgctagaactagggttcaatggtttcatacccctaggtacaacaatgactgatagacttgaagcgaatgcagcgtacaataattgtgatgtgtctgaaattttaaatgccatcaatgatattgtcattttatcttatgggaaacacgaagaaaaaatgactctgacaggagttggtgtgctgtcatataagcatatgaaaacaggcatacatatatctggtggtcgaaattcagataaatcactactgaatgagtttcaaaccgctgtcgaaaatgcattagataatcagtagatgtatactgactacaactgagaagtgttatgcgagcaaagagtgtcagggcaaatagccttattaacccccccc

SEQ ID NO: 860 - DNA, 1749 bp, Botrytis endornavirus 1
  source 1..1749: mol_type = other DNA
agctttaatcaaactgataatgcatgtactaaagcagattatcaattggtgtcagttacacaaggatgaactagtatggagagctaagtacttgtctggagccatcaaacgagaagagaaaaatttacctatcaccactgttgatctctggcatgcgttacaaagtaacaccaacttcatgcgtgttatatcttcaaaccgtggtaagagatcacgaatggtaatggtcggcaatgttctacatattacacgtagaacaccagccgtgttgcttgattgtcatacttttgctacatgcagggatactaaaactgggtgccgagttactatctactcagcaacacagaacagaattgatatcatgtttaaactaatgggtttgcatggagtgaatgtggatcatttggaagatgccagggcgggcaaatcaggattggatggcttaagaaggcttggtattaatattgactcaacaagcataagtgacgatgactttgttaagtggaaagacatattacagcgctcactcaactccaatccgctaagtgctttgtttgatatgtcgcttgatgacgtctacaccagctataagaaactgatgagcaatgaagaagacttatttgctatccacaagaaagttgatagtatggctgaagccattggtgcaaatctggcggtgtgcataccgtcaggtcatggtaaaacaacgactgtcaatttgttgcgtagaaaatatagcgggtttaatgtagttgatgcagatgaattggtaaaagataccactgttatactgagttacaactacgagttagtaatgcaggggtacaaacgtgatattgaagattcattgccaaacaataacaagccaaccattttgttttgccatgacccagtgtgtgtaccatcaggttataacactattatagtgtttaacacacagacgccgtacacacctgagcggttatggaaaagccaaaatgaagagtcgttaaaaaaacaaagcatctattatccaacttacaatttaacttttgaccaaattgaagacgttgttttgcatgctatgattaccaagaaaacacctaagttggttcaacttagcaacagcgagttaattgacccgatcccatcgtctgaagcggcacagttttttacagacccaggcaatgatttgttgtaccatatgcccaaagaagggatggtttcgttcaaagatcaaaaccatggtatatcgcagcaaaaaatctataaacaaggtccacacgtcggcttgtgcagaccaacggtgcagatgttagcaaactcaaccttcaatgcagttagcacgcgtataaaaggagttcaacatctacgtgtcaacgacttcaataatgaacagtatatgtctaaaatgtcacattggtttcgaccaggatgggaagacaaactaaaagagtatcaggaagaattaattatacctagtgtcagtgcagcgcttgagtggtccattaacaaagggcataagattgagctaattagagatatggtgcaagccgtcatggactatgagcaagcggtggaatatactaatgtgcaggcacattacaaagttgaaaacttgctcaaagaaaatgtagatgaactagagcatcagattgggcgtattattgtctggcataatcaaaatttgaacatgataatgtgcccaatgataaacgaatgcaagaaaagattggttttattgctcgatgataagaaaattacctactc

SEQ ID NO: 861 - DNA, 10827 bp, Brachiomonas submarina endorna-like virus
  source 1..10827: mol_type = other DNA
tgcaaagcgccaccgcaacactgggtgttggtggtgckgsgaagagcactgaaatcgcacaactaatggataaccaaacagtagtcgttgctcgaaccacaccggctcaacaatcaatcagagacaaattaggaagcaagttaaatcagcttcgtgacaatgtgatgtcattagagaaggccagcattatcaaaccagactgtaaacatttaattgttgatgaagccacccaaataacttggattgaactattatgcatgttgggtccaaacaccgagagtttgtcctgctacggtgggttaactcaagtggcaatagtcgacatggacgaacaacgaggtgtcaggactctgaaaccaataaccgactacatgaagcgaaaggaattatgggagactcacaggtacggcagcacactggcgaatagtttaagaccggtcttcccaaagctacgtagtgtttccaagcacgacacctcagtcacaataataaactggaacgaattcatgagccaatccctagcgggattgatttccgtccacaaaccaacaataattttgacgtttaccatatcggcagaaaatgtcgtacgcaagtcacaaaaattagcgtccactaacatcccaatggcacgagtccactcgtaccaaggttacgaatccagccgagtgatggtcttccaatactcgccaaccgatcctttaagtgggaagcatttagacaaattttactgctgctcagcagctgagcgtgccaaagatgcactgatatgggtgagagttggcatgaaacccacagccacactgtcagaatgcattgacccaacaatcaattacactggcggatttgaattacccaaacatgacgtgagaaccaacttcttggccctactgcaaccactcatatccagaccatctgaccacacttacaagctgtgcaagcgcgcaattgacgaggaaaatttcattggtcactctaacaatggcgcatgcccaatgcattcaataataacaacaggggacaacattttcagcgatgtcacatctgaaccaaaccaccaagtcacactaccacgcacgctggatataccagagaacctaacatcagaattatccaaacatcaccttaaattggagcacatagaacttaaagaccatttgcttagttgcaaaattagccacaagaaccctttattaaacatggtgatgggaaccttaggcgatttgagatgcgacatcagaaccggcatagtggaacccaaggaagccattgacaaggtcgaccagcaaacaagatcaatgatcgttgagtggctaggcagcttgaacacgggccaaccccaacagaaagacctcgtggagcacgccaccgacgaaaccattaagccaaccctcaaagcccaccccatcaacgtaccacaagcatgggactaccacggcgatccgccagagtacactagcatgagcaacaacaacttcaccagtgcacaagaacaattccctgcggaccacttgcaagggttagcactagaagaacaatgcacttgttgcaacaaggtagcagaagcgtttgagccaacgagccatgccaccattacaaccagagacacagtcgccatacgttacagcagtctcatatgcagcactgtgaaccgagggcaaatgttattcaaccccacgatggaccaaaagctgggggtccgatcatatggtggttgtgacctatgcgccggactcaagttctacataaatgggagagttaagctggtaattggttgccagtatcaagacctgcgaacgaggaagatatgggacacaacaacaacagatgaagataggtcctcgatagcttccgggctagaggttttatcactacacacgatcaaaggccaccttggttggggaacaaataaccactaccccaccattgtcaaccctgacgagagaacattgaacatggcaatgcacttggaaagactgcgccacactggttacttcttaaaaaatactatattcaaattgaacttaaccaaccccgacgcttgcaagtttaacactgctgcaaatggggcctggttggctaaattcaatgggcacataactagtttgggattcgaccctctaccaactagcattataacccactcccactacaacgacctagcaatctacaaattaacaaaaaacaacgaactagtcggcttaatgtctggtgacatgaaaagagcctgcccactcacaaacaactgcccttacttggccgccacaatcctaagcccaacgcaactgttaagagaaattatagatttaaaaatcagccgaatgcaatttttgatttgtaaacccaaacctatagggacaaccttatttgcgggtgacggctacaacttgccattggaagaccaccacaaaatgaaaaacaccgccgtttggcgcgagttttgtcgcagacaggccatgttgtcaacaatcaacatcatacagccacaccatgccgtgtacctacccgaaccgtgcatcaagaagtattccaaagcaatccaatcctactctggcacattacctgtagttggccacaactaccccgtctcaaagcaaggatttgacactgtggtagactgttttgcatttaagttagtgtcaaccaaacatagaactggtgtgataattaacaccagtgacaagccctggttgggaattgcagcatcatcctggaacacagtggccatacccaccgaccacaatgctagagtagactacgaccaggggtgtagtgaagcaaccgccatgctatgccaccacaaggagattcaagaacgcagggttgctagctcaacacctgacagtatgggcggagactcaaattcagacaacgttcgagagttgctgttaacgataaacactcagttagcgagtgacactgacgggccactactatatgacagcaaatggaaagaccaactatcattggttaaaacttcaaaaatcaaagtggggttcgctggcatatttggatgccaaatggaattgtgggatattgcagacactctacacaatcataacctaaactccctttacaccgtgcaaccaccgctcaacacaactacacacaacgaattcactgtggaaggtaaattaggcacaatgaaagtgatgtaccatgactgcaatcggtctgttagaccatctgtctcagcctacacccactcaatatctggcagcccttacccatacgttgaaggtctgtccctggttggggtaggcgatggcataattatgggacacacagtcacttgttggaaattagtgagcagcaccatgactgccagcctttatcacagcccaatgggccaccatgacccaagccaatatgtaacaatctgtttgccatcagcccaatcaatcgctggagccatcactactggcaaaccatccacaccaagttaccactccgtcccgtcaaaattagttcggatggttgaactcagaactctaagggattacagtttcgatgatctcctggtgtacgtgaggcaacttatgcatgctgccttttatgggaaaactgggaccactagccagtacaaaactgacatcgatgacgcaatggctgtttgtgcatatgtgcatgtcacacaaacgttgatatccagacaattcgattgggtgaaacgaattaactctaaggggccaccccaattggtagcctcagccgtcaaagatatactgttgcttttcaaaccattgctacaattgattcctgaacagctagatcttgaaaccatatatcataaactagtaacacaattggccccattaactttacagcgtacacttaaagagtggatcagtgaggccgtcaacaatcaccccagattgtatgcattcaagcggcagctatttgggccacaccacaaaacacaacaaagtctcaaccacccattaaattacgagtcgcaacccaccatgcaactagcaggagaaactgtatccggccccggcctaaccaagcgatccattgaactgctagggaaaacccctaggaacctaataatcaaccactacttcaacaccacagaacaatcaccatacgacggtgaccactggactaaagggttgttatcccggtcagaatgtgcagatatgagtatgaatggtgcatacacacaaactcacaccccaacaataataaccaaccctggcagcacaatgccaccagcagactcagatcaatctgatgtcgtcaatgggtcgactggaccagctcaaccggaatcacacaaaaccaatgaacatgccaactcaagcaatcaaagtgagccaatggtagaacatcctagcacatcaagccaaagtgaagagccatggcaggccgagccgccacaattggaagcccaacccacaccactgaatcacaatgacccacccatcaagaaagaacccattccccacccagccagtgcgagtttggtcccatttacagctaccaaccctatgcctatggggcagccacaaccacccagccaccagcctatgaccttccaagaagtgctacttgcaattggaatcgacccaagtgtcatggaaggccacaaacatccgttggattgcataccatatgaaactctacgaactaaacttgccgattcggaaagctttagaaagttcgtagaaactgatactcgacactcgacctacgtggtggcggaagtgatgggtcggttgatgttacccaccacggccgaaatggacacaccagcaaccccttggggccctagaaaggatggctccgacttcgtccacaccgcatacttgaataaatggcacgtggccatgtacctcagtttaactggaaacttctcaataggggcaatgatgacgaatgacaccaaagcttacgtaccattagatgtttgtaaaacagtaatcaccgtgaatatcggcagcttcagagcagaatacaaatctgtgcaaggtcgcagagtggtaacgttattcgagcgtggcaaggaaaaacctcgagtggacgggccgtcggattacgaatacaatcgcatgcaaccatcagcttacataagaccaccaatgccagcattgcaagaatccgatgccgaatttacagcattgcaacacgtgccagaacgctttagacacttgaagagactatcactgtccaagtccagagcccagtctgaaccacattccaacaggggacgcaataacaggaagtatttgatagttatgtggggcacatggggcgaccttgagtacctactaaacctaatcagcgccgacctaagttctgggagccaatgcttagtgataacctccgagagacatgcagacaggtgtaaatccaaaggttgccaagtgtacccactgccaatcgacgacgctgcgtggctagaagtcagcatgaaagctgaatctgacaggcgaaagtcgatatggaattggagaacagtagccgaattagaccaacaccaaactaagcacaaagaaatattagagcgagagacagataagtttgtccatttaattaaagatgttacccacaccttattcacaccgtacaaactcgaagctagttacttgggtgagttggtgggagcaactcaagtattggtatgctcttatccatgggacctacatttaggccaacacatagacggcagccccatcaatgcctcactggtgggtgcagctttaccaatggctcatgctgggcgagggcgatacccaaaatatttagagaagttcggaccaatgctgagttgcggaacatggccccatgtaatcagtagttaccccagggtatacgtaattcctagaatgctatgcgcaaacccaggccccgaaggcagcttgtacttgtgccaacccagacccaccgacgggccactagatacccaagtggaagtcgaattagggaagaacacactgccaatctgtctatttagtttatccagcatggttgatccgcaaatagaagctttgtgccaaataaccgttgaggaatgtcgatctctaggctactacccaatacttacaatccacccagacaacgcgaagcacccaaaaacaaaatactgcaagcttgctaaacacggcatcgcaaagagtacggacgggacattgatatgttacggtatgaacttcaccccactattccaacgggcaatcgttgcaataacccacggggcaactggcactttcacccaagcagtagccaacggttgtgcgcaactcgtgctccccttcgcctacgaccaaccatacttcgggaagatggctgcaagtctgaacttgggcgccacgttaactggaccacatgacttgtcattcagagagaaattacgatcgattctgaagtgcccagaacagtttatggaaaaggctgctttgttgtggccaactgtgacaatacacccctctgttgaattctctgattgggtaacttacaacaaagaagaattggacgaaaaatacacccagctgcgaacatcagagcacatgagcaccagcaaagattaccacaccgtgaacaacgcgctattaaacagtatcaagtcatttatacgcggattgccagaggacaactccagcatcaaatccaaagtaactggctcacaccgccgacacacactacattgtagcggctgtatggacaaatcttggaggtccccaagattatcaatggttggaaccacaccaacaatcggccacatcaattgcaactggaataccagcaccaacgtgttgcaacatgaaactagtgaggccacgttgcccctcgatcatgtgcatggcaacctacacacagcagggccagccacagcgttaatttgtgatgtggacattgcatgcatgatcgaattatccacagccgacttcctagtaagtcaattattttcaattgggtcagttcgattcctacaatgcttaaaaactagagacagtctgtacggtgcagttaaaaatttgtcccacataacccagtcattgagtcaaaatggactagacagtgtcatagactcactcacgttcactctcgatcaaccaacacccggaaactatctgatgttgcaggtgtcccccacatctcattgtgacaagttgtcagaattactaaaattacctaaattggacgtaagcaaatcaaataccgactccgcaatggccgacctactgtataaacctacacccaactgcacggtaattatcgacgagaatgcagtggaggcaatggtagacagcagatcccggaacccggacgcaccaaaagcaacagcactacccaccgcatcgttagaggacagtttatcatccacagcacacaaatttttgagatgcggccgcgtggctaggccgactcccaatgatttaacagttcagtacaatcccacaaatgtagctggctgcgttgaagcgtgcatactacaaagtaactcacccagtccctccacattaagggccagattacgggcctccaaaacgctgataccactcaactcgtcaaccccccttatcaacatgatagccacattgaacctactcgctgaggattacgtggtgatcgattccacaactgacatagtgcactacaagatatctgatagagggccgccaacaatgtacctactcaaagcaattgagaaaaatcaagggcactgcgtgatcatcaaccactcagaaactgtgtggttgcatgtaataaatgaggaagtgcaaccgctaactgacacatctaatgtaccactgcacttgtgcccaacccacaaacaatatatgttcggcatgcctggaaacatgtgctacgacactcaaccccattttgcctctgcagctgaggcattagaactagtgcaccagctatcccagcccatagtaactggttcaacaatcaagagactagcagagttaacgaggtccgatgagaaggacctatttgctaaactcctgtacaacaacgagtaccatgtgataaataggaaaagaacccctttcatattgtcagagtttggacagtcatccatgagaaccacgtcagtgtactcaagaattgctgctgagcccactgtggtaagaacactcacaacacaggggtggatcttggccctatgcatacctaccggtgaaaacacatctgtactgctgcacgccccattacaccatcaatcattctgtgggttaacctacgtgagcagaataccatggtgccggaaaggccctgcatcgttggttcgaccagatgacctaaaatcatgcacctgccttaacgaggtaacctacaggcacatattacaacatagtccaaccgtggccaagttaatgggtatcaaacaaccttccttagtgacctacatccatgaatttgacaataggacccatcataagagtgacgatgtcagttggttccgaaaggaacaattaagtttacgattaacgcactcagaagcaacaccagagctcatgcagaccatcaatgcaacgaccgacctaccagtgagagcaaccatacatgaggggaaaccttcaaccaccgttgacaccgaaaccctcacagcccaacttgtcacactcagcatgcaaaaatcatacagaactaacaacacggtgatcatcgagctcgattacaacacatttgtaaaggcagcaaagggaccatcgttggggtaccaactagtcaacggccaattacgatgccaggttagagaagaggagttctgcgtgaatatgacatatgaccaactagctagactactagaactcccagtgggcacatctggggctgagttcgcaacttgcctgggattcaaccccgtcgtgccagatcaaaaaggcaagttcttaatcggaaggcccgacgaacgggtcataccaatgggcaaccctatcacatttgcggcctactcagcaacaaccaccccactcgggctgataaccactagaccattgacgtggtgcagacctgtagtggtgggaggggcagatgagtatcaaacaccatggaaagagccgggcagactcaacgacccattgcctgatgtaacttggtacacaggagaatcgtccttaccttttggagaggcagcagcactccaaaccaagccgaaagacgacagtagtggtagcaaattaccaccacacattgatgattacattaggaaccaattagaacccgcttcaatgttgatggccacctctagaccatttagagaatacattcacacctccgatgttgacaacgaccatcggaaaactttaatggcaggttggacgcctgactactgggctagtccaggggagtcattggtcctacaggaagacatcccaattgaaacaattgacttttggtcagacactgacttgacagacaatttgatacgttatggtcctttcagcaccagggttaagagtagtgccgtacctggtaaggttgtaactagtaagcgtgtaaccatggtgccgttgcctgtgtggtctagaccagtgctgactcgccaacacttgcaggaattcaatgccctcaccactaggctggggggggtagtgcaatatgcaaaagggaaacttaacatcacagctgaagttagaaaaattgctgatgcctacttcgtcaccggttggcagtccatggccaatgagtacaccagtaatccaataacttacgattggctggccatcagagattggctcgcccaacgcaaggacaaaatagccgtggcaaaggagataatggaaatattggacatgggtctaagcaccagaccatttaatagaatgcacgtcaacgcaaaactcgaatcattgctaaaagaagtggtgattgacagcatgaggaaccaaaccgccagactaatcgttttccaaccgaaaggattagctgcgctgttttcatctatatttatcgaagccaaaacaagactcaagtcattactaaggcctgaggtggtgtacgctgatggacttaaaccacaagacatcacccgtaggctgaacaacatagttgggaatgacctgatgtttgtggaagatgacctcaccaaacaagataggcaaaccaatcacgacatcctcaatgtggaacacgaaatttacaagttgctgggtgtgtccactggtgtattgtcattgtggcgatccgctcacgacaactggtcatacaaaggcaaagagataagagggaatctcgatgccatgagactcaccggccaagccacaacctcacttggaaacctaattaccaacttgctggttcacgctgacatggttatttcattaaaatccagcatcaaattaatattgatgttgggtgatgacaacctaatgctaacctcagtggcccccaaagaattggaacaacgtagccgcacaaaagcccagtacaacatggtctcttcgttaagtgtttacaaggaccacggcaccttctgtagccttctggcataccgaaacccggatggcacctacggtataggtccggactttgtgcgactacaacgtagatttgaggtacccaacagttcaggtactcaagatgtggaagtcaataaatctagagtcatgtcgtattgcgcaacgttggggccactaccgggtgtgaagaagctgattgatatgcatgacctgcctattaagccggagccctggtacaactactacggggcactaaccgcatgtgctgataagtataagatctctagggacacagtggaacagcacttagccaccctactaaacaccatgagactggagcaagtcacaacccatgaatttcttcatttcactacaacaaggtaatttgcacagggaacacagaccccaa

SEQ ID NO: 862 - DNA, 13293 bp, Bremia lactucae associated endornavirus 1
  source 1..13293: mol_type = other DNA
aaatctgttaaacacaaaaatggttgtcacatgatagtggatcctttaagtttattagattgtgtgaaatcaccgtcacaaccatttcaagtagaaacgagtagtcatctgattgatatggaaagatggatatcaatcgagcacatcgtgctttttaatccaaacataaatgaattaaggaaagtagttgattgcgtgaataaaacaacaaatgttaccatatgccaattaaaacctaccgtggaaactacacaagacgagtgggattcgaaaaatgatgaacataatacatggtggtctccgatttattccaacgaagtcataaaacaagaaactgaaataatcaatttagtgtctagtgatcattataccatactatcaagtgaaaaagtgcttattaacacagtagttaaagagactaatactatgataatatctaacattaaaatcacacaaggcgtgccaaatagcctaattaagaaattgatttcttttaccactgatttaaataagtactttaagattccggtagttaacacagaatccttaattggtaaattcggtgtacctataattaaggaagaacaaatcgagttggacagaatttttatgcgatacttattaaacaaaaacatgctgggcaatcaaacttaccaacagttaatggattatgccattagtttatgtcattccagatatgtgttggatggtagagagcaaaattttaaaagaatttcagctgaacaatgtagattacatacatatgttgcagtaatgattggtcaactaaatcacacagagatagatactgtagttaaattggttggtccagatcaccccattaaacaaatggttggggttttaggattgggatctatgcaaggtttatggagtgtgggtttggaatacgccttaaataatctacctgttccaatttcagatgcaatcagtgctacaatagaatggttatctgataaatcactaatgaattaccatcacatagatgtgtgggaaaggataagagtttgggtgtttgagatgaacggacaaagtaacaaatattatgttaacagtacgtggaactctactgaaaatcacagcaattgtgatcatcatgacttgcaatgtgaagaacgtcatgaattgactgagaaaattgaagagaaaacctgtctttgttgtcaagtttataaagctcaagaagatctaactttatgtaagtgttgccaacacagcaataagtgccaccacgtctgtgaacatgactgcactagtcccttagaccatgtttgtgggaaaaaatgcaaacattcaaaacatatatgtaagtgttgcaaagtagccacctgttatgacgtctgtccagtatgtaatgagtcattaaattggatacctttgatagagtctagtagtagacagtctttcacatcaaataagaagagaggtttgaaaaattccaaacaacttgaagatcgtattgtaaccggcaaacaagtagaagttgagaaacatgaaaccttagaaaattctttcacatgctgtggagtaactttaggagttagaggttgtcacttacaaacaataaaagataataaagaaataatcaaaaacgttttgagaaccaaaaaaccagaagatctagagatgtttactcaagatgctttatcagaaatagggttaaatttgttgttggatgatgagttaacacaaaaacctatattaccagaaaaacacactattgcagagataatagaatctacagtccggaataccaatccacagttagttctagatgagtcgattaacacaacagacaatcaaaatgagttgattgaggaatctggtaccattttacctaacgatcaattagttaatgcatggttatcagatttaccccagatagtcagaaatagttgtattacaggtttggaacgtaactggcaatctatcaaaaactcctatgcctctagtgatgacctaccaagaggcgggggtcacatagtttgttgtcctgaaggcatctcatttattggatctagtaattggatatctatagtgaaagaatacgacaacaatgaagatgatgcgctttgtggttggagagctttaaacaattattctcatgaagtatcactaagtgacctgcgaagtagcagtgagagggaagattggtttactcatagagatttagcaaagtattgtagagaaataagcgtgaacttgatgataatgaaaggtaatgacatcatccttcacaaccatgaaccatatgaatcaaagtgttgtttattgatccactcaggaccagaagatagtggacattggacatcagtaagttttgtacaaactagtccttgtcccactatgccagactgggtggggtatacaagtcaagaattcatgaacatgtggttacagtcaaatcagattagagaagattgcaaatttgatgagttgtctgttgaacaaagaataaggtactcgcatttgttatttgtgcaagaagaagaaaacaatagtcaaattttgaaaggtttaattgcagttgaaagaattgataatgattataaactgatcaccaatgaagggaaagagttaaatgatccaaggaagggttttgtaaatgtaaggatacctgaacaatttgtgaatcaagtgggtttgatcaatttggattatgatcaagctttattaaattatgagtacaaccaacctcattcatttgatgagaaaattccagttaattgtagtcaaagattgaaacaagagattagagaaataagcaaacaatgcattgatttaggaatttgtttgaataaacagttgtatagcaaaccagaaggttattatcccattgaaaataaagcaacggttaaaagtataagtgaaggagtttgcagaacaatttgtataaaggacaatttaaaaacaggtgacacgatatgcatcaaacagagagacaaaacttttgtgataagaagggtcaaaagacacaagaaatggatgctcatcaattacaatatgccgggcaaagggggaccactgaggtattatttacccagacaatcactaacctccttaatattgcaactgaatagtttgttaattactaaggaagacaccctaacaactataaaattgttaagtaaagctaacaccattttggcagtccctggttggggaaagtcaacacaaattgcagctaatttcacacctgatacaacagtggtttgcgtcactagtgaagcagttaaaaatttgataaacatggggataccaagaggaaatgtaaagtcagtagaacgtgcaacagaggacagaataactactaaacgattaatagtagatgagtgtacacaagttgactggatgagaatacatgaaatggttactgatagagtacaagaaattgagttattcggtgatagcttccagataggtacagtagatttttcaggctccagtggtgagaggactattacatcatgcaatatgtactctgataacgtaaaacaatttaacagcaccagaagattcggagaaccattatgttccgaattaaagactttaaacccaaacatagataccattacaagtcatgaaacgacgtataatgtagaaaatttgtcagaattgaacacagagagaattgctgaactaattaacaaacatcacataggtgtggtactaactttccatcaattaactaaaaatatattacaaaaatctttgggaaagacaaataaagttaatttaaatgttactgacttttgtacagtgcacagtttccaaggtaatcaaaaatctagagttatggtcatccaacattttttgacacctagtggagtgcacactgataaaagatatttgatgtcagctgcctctaggtgtactaaccacctaacttgggtaaccatagactcacctgtaacttccttaattctaaaagatcacttaaagaatactattctgattggaggtaagggtgacaatgtattggatacagtcacatcaatgattaggaaaaaatataataacataagcattctaggagttttaagaacttgtattcaaagattgcttggagaatatgaacaaaacagagggaacgctgtcatgtttaaggtactgtcactgaggggtcctagagtgagtgacatagctaggggttatttaaggttgagtaacttgacagatgaagaaattagttactacaatttaatacaattagaaatccaagatgaagtaggtttacatgggaaattatttgaaatagagataaaggaagaaaagttggagaatcatctccaatattttgatgatgagaaaccaattgattattacaagaaaacagtaacttattttggtaacaaattaaaatttaactctatgttattaccaggaaaaatagaattcagattttttacatgcactttcagaaatgatggagatgatattaaaattatcataaccactaagtttaaatcatttactattggttatgataacagaataggtggttttaagttgacaaaaatcaccatcccaatttttaatgttttggaaaaatttggaattttgggaaaaataaagcacatcaacccattctttaaaggagcgcagctgtttacagtggaagaaaacaatgaagaattcaatgaaagcttgtttgagagaaatgttaagcaaggaattaaagaatacaaattattaactatgcagagtgctagtaaattaaacaaacacaatgaattcagtgaggtcattaaaccagaagttacaattgaaaaaattagaggaggaaaaatgattagtaaaactgtacagccaatagtaaaaacgaatattagcaaacagagaaagtttttctcttacaaaattggtatcaatttggaacaatacagtagattgaccatagtagcagattcttctaggagattttttagtggtgcttaccccgttatttatattacaccatatggatggatagaatacttaatgcaagatggttgtagtccatgtgctggtttatttgtgagaagggatgaagcttggtggttaatagacaatgattatttgaaacttggttcacggcggatacagttcaatgaagaatgtttaacatgcaaaccaattatatattttgttaaaacattaaacttggagagttgttttacggaagcatatgattacgaactaaaagataatccactggtgacagtaaacactaatggtattgaaccttgggagcaaaggaacaatgtattagatttcattgatgtgttacaagaaagattatgtaatatggatcgaagcactttaactacaaaacaagtagtatgcaaagagatggtagaatataatgaaatttggttgttagacagaaaaatagcagccgcagatgatggaatagaactagtcttagagtttgaccccgataaattgagtgtgttggattacacaatcatgttggggaggctgggcaaacaaggaatttatgtaataatggaaactgataataagtttttctgtcctactgaagaaacagggagcattagtttagattcaaatccaaattggactagagttaaaaatttaaatgaactaataagaatgggtattaaattagcagggaaaaatagagcaagtaaattgacaaacttgctaagacacgtgaacaatggtttgtttggatcaaatgatttagaagatggattaattctagatttagatcaacataaatttaataaaactgcagtatataatcatttatgtcaaagattgggggaattgaaattaagtcaaagtagcatgatcagaagacccttttatcatgggaaaatatcagattcacgtctattgaaccagcttaaaaacgttttaagatgtggtgttatcatggagtgtcctacaactatgggtacctccacaggttcagaactagttatgttggtgttagcacacatggaagtcaagcagtgtacattagttttaaaaaaccctggtttgttgttaagcaacagtctatggcatcatgaagttctttctttgactgagattctagtagagcaagacataccttcagaaagaaaaatttttcaagatcactgtgggcatattattagcaaagtgagtaactcaatgcagagttatacaagtgcaggaaatgataacaaaaccaaccaattaaagtcaacgttagttaaactccatgatgccataatgaatacaaatggcgttgaaggttctagattatttccaaaagtcaaaattaaacaaaattttaggaatctaatagtgaaccattttatactcatggaaccagagaagttaaagaatatatggctagacgatgataatgaaatcacgattatcattccaagttgcggtacaaataatagtttctggtatggaatgtctacaagtgaagataaaaattttgaagtgcatgaaactaatggaaacatttcagctgtaatctctcagaagaagttgagggagttaaaaaatttagataaactgaagttatttggccattataggccaattttcattgccggaagtttatttgattatataattgtcaaaacacagatagaaagtaatacattaagtaaaaaatattggaggacacacccattaacagaaacaatacaagtgccattattaacaactgacttggaatgggccattgaaaataagaccgtaatgaaatggaaaacttttacatgtgataaagctgtattacgtagattagaaattagagccaatagagagggcacgaactttaaagatttatgtgaatttggtagaaccttgttacactcaagagattattcaagagttggaagttgggattcggtggaagttgacgcttttactatgcttacacattgtcaatatgcttattataaatcaattactgggcaacaatcagtgaagcagatgattaacttgttgtccattatagatgataaacctggaaacagctcaatttttaaatggcttaagaaaataggatttgagaaagtatttgctattggatataataaatacaaagaattgattcaaaccataggatttgatttgaccttacaggatagcatgatagagttttgtggatttttggattctttagttaacaataaaaactggactgacaattttaaaaactctgtgacagaatacttaccaaaacagaatttgaggagttgcaccttcttatacaaagaaaactttgatagagatgaatcaaatgtgggaaaaatgcttggaggaattcttaaagaatttgtttggcaacccttaaataagggagatttcaatttaaaagacattatgcttaaaggtttaggaatagcacccaatgttacaaaaaccaataatgaacagcaaaatttaaaaaattcagaagaaacatttaatttgaactttgaaggattggaaggactattgacaccaatagaattacaagttattggcagacaacctacattggaaccttgtattaaggggaaaagaaatttattgattgttagtcaagggacaaggggtgatgtagaacccttaaaaccattgatagatgagtggagtgaattattcataacaatttacgtttgtatcaaccaaggcaacgaagagagtgtaaaatggaatgataaagttaaagttgtatatattaatatggatgggtcagatttgagcaacattgcaacgatggaagttgatcaattatcatctactaaattgcacatgttaaagcaattaactacgggtttaagttcatcgttcaaagatttgttaaagttggataacataggattagtgatatccactagtcatactgtattaggacagttggtagcaaatgcaagacgagtaaaacatgtcaatttgcaattatttccttgggcagttaagcccaccgacaagtatatgaagttggttctagagtgtgtttcaagagtgttaaatagaactgttgacaccgggtgtgaaagtatagcagagctaactagggaaacaaatttaaatttaattctttacccgccatctattttgaacaccattcctcacggtattgggacgaacataaaattattgacgagaaatttttcggaaaagaaatgtcgattgacgacaaccaatgaattgatcattacaatgggttctattgttggcaaggaagctttatctagatataaaaatggattattgtgggcatcagtaaacaaaatgagaaaggtttacttgataggagctcaattttcagagagacgtggtgtggaaaccaaggagtgtattgggaaaattaaacgtaaattaaagagaaacggggtaggaataatcacagccacctatttagatttttcagagatatcaagtaaacacacaatagtgattcatcatggtggtgcaggtactagcaattacttttccaggttaggcattaagcaaataattttaccaatttttaatgatcaatggttatgggctaactacctccaaaaagaaggattttgcataagtagcacaccatttgggttaagaaatttgaatttgaatacactgatcatgaacactaacccaagtaaatgggcaagattaaaccagatttcagaacctacatattatttaaataacattgacttgttggactgggtgaatgaatgtgatgataacacaaacttcatcaatttgtggccatacattatagagtcaataaaaacaataagtaacaacatatccgacaaaatacttagtttaccacccttgaaattaatgttagaagttgcaacttgcataacaaatgtcaccaaatcacaaaccctggaaacggatggagcaatcgatgtcatagaatgtgtggacacattcgatgatgtcatagaaataccagataagtcacataacgaagaagaacacatcacccacccaaccattaacttaccaactcatatatttaaacttgtaaatgatgagtttggtgttgatgcctggaactctggaattaaaccagttgactcattaaacttgagtgatcaatctattgatgaattagaaagaatcactgttagtggtggaagtgatttcgccaggtttaaacaaaattatattgaagctggatcgggcataattgagacaattggaactgaggcagtgcacagtggaaatggaggtttaggaaaatttgaagaattagagaatgaatcaaaaatcaatgaagttaaattaggtgaagtagacattagtgagaaaacttacatacccataaaagaagtaataatcaaggaaaataaagaagaaattactgacacaggaaggtttgaagtaataggtgaaactgactataagtatagcgtaaatgaaatactggaaagtcaaagattagcatacagaggaaaatcagatgaaggatttagaaaggttaaaaataaagatgaaacagtaattgtaagaaaaccagagaataaatctgacagcataaatttagaattggctgaatttaagtctgaagatgctgatgaccaattagtttacgcaaaagggggttatactgtttctaatgaagttgaacaggtgaacattaacgaatcacttttgttagaaagcgaattaggagaaggtgtcataattgggttttgcaaaccaccattgagtttgaactctgtgatggactggcaacaactattaaacatagaggaaagcaatttaatacaaaacccctactgttgtaacccagaacattctactattgatgggagtgatttaataggtcaaaggttgcagaacacaaatacattgtacaacccattaagtgatggaacatgtacttatgattgcttatattggatattcaatggagatggaaatggtatcttaaagacttggggtgcaatattccatagcagaacatgggcaacaatagctgacatcagagggttttcttatttgagtggaatctcaatcattgtgcaaacagacaatgaatgtttattcttgaatcccaaatgtttacctctttttgcattgtctatggaaactaaagatggtttaggtcacacttctgtcattgggtttgatgtagatgaatttaaagagaaacaatggattagattagagaaaccacttaaaaatgcaaatttagatttggggcctacttgtaagttgagatcaatgcgttatttaggtacaagtaattgtaaaaatcattgccatatcactaaacaaaatttaggtattattggtaaaagtttgaattttaattcaagcaaagaggacattgtaagatggttgaaaatagctagtttaataagtgggaaaacaattaaagatatagcttctaggttgaatggcagaaactggtcaaaattgcttaataggagaaaaacccaatttgtaaaattggtcgatcaccagtatagcaatggttgttcttgggatttgtataattgtggtttcaaaccaggtgatgtattgtgtgcaataaatggaagtaatatatcagttggcgtgttaataaatagaactaatgatttgtttctatccacttcctctcaagttacccctgtgcaattagttatgagtttgagcatgaatttatcgcctactccttataaaattccgaaacgtataaattacgttggtgaagttaagagtttcttcttaaacagatcttctatgaattattgtcattcaataggtattaagacagatgtcgacaaaattgctgagttagacattagcatcgatgaacttttaataagtgagtatgataacagacaacatcatttaatgaacgacaaagaaatagtcaaacaagtagaagaaagtaaaatagttgtaataggacacgcagagagaatgttaagctgtaaatggattaaaacagatagtaaaatcagacctgtgacaatacatggaaaacagtacatagagtgtgacacagaatgccaactaattttattttgtttagataaaactggagagagaaaaaatttacagccttcaggatacagatggattatcaatcaagagactttaattagtttcagaatctgtgacaccttaggggaattaaatagacaattacagtacactgatgataacaaagtcgttttaacgcgggttaaattcaacatggctggtaatttggtaaaacaattaaagacatatttgattaagaatgggttttccgaagaaggagaaaattacataatggaattagaatcagttatgatgagcccacaaagtacttgggatgtgtatatagacacacataacattaagtattggttggaatcattaaatgaaaaaattgattataaaatggataaattgtattttgtaaccaatcaaggtttctttagtttaataggaccaatggtcatcacaaagaagaaactattgaaagatattccggaattggtaggtggttattcacaaatcaaacaactaggtagccaaacttgggatcacagtatgcaagatttaatgaagacaacttcacatgtaaagcatgggttcaagtttaacttcaataatgaaaagaagattcaatcgagattgacgcaattaagtaatcacaatagtcaacaaagattacacaatgtcatggatttaatagataacaatttgcaaacaaaggataacattcaacccatcaacattaccaactgggagaatttagctatacaagaaggatttgatagcattattcccaaacaaataattgacactaaattgaatagaaacataacaaatgacagtattcaggaggtccctatccacgtcaggaatatgtgggatgatacagaactattaggttggaatacagcttacgcccccactaatgatttaaaattgaaagctcacataccagtaggcaaacgtagaactgaaaggaaaataaccatgtgtaaataccctatcgagtctagggtagttttaacaaaagtggccaatcaagagtttaatgctattacaggtagggttggaaatgctagtaagattagaaaatatgatttaaacattgaatatgagattaaaaatttttgtgaggcttatttcaaagaaggttggattgacatagttagaggttaccaagcaaaccctatttatccaactggagaatcaattttaaaatggctattggagaaacctgactgcatggacattgattccgagttgaaaatgtacatggaggatgggtttttgacccatcctatatcagatgtaaacgttcatttaaaattagaatcattgttaaaagacgagccagtcacagtgaatgaagcattgaaagctcgtgttattatatggcaagccaaaggtatttgtgctatgtacagtagttcttttatagaaataaagaagcggttgaagaatttgttgaggccagaaattatttatacagatggtatgcaaccacatgaaataggaaataatatgaacagtacaggagaatttgaatggttcttagaagacgatttaacaagacaagattcccaaactgatggacaaactattaatgttgaattcgggttatatgatttattaggtttgcatagaggtatagctagttcttggagaagagtacatgaaaactggagatttaaaggtaaagatgtgagaggaatttggaaggaaatgagattaacaggacaggctacaacagctttaggaaatgccttggttaatctaaccgtgcattggagggtagtgaaacaactaggtagaaaccttaaaaagatgttgattttaggtgatgattctttattcatgaacaccacaacgacagactacacttcactaagaagaaatatagctgactactataacatgaaatctaaagcttttcagtacaaaaatcatggaacattttgtagtatgatagcctacagaaataatgacaattcatgcggtatagggcctgattatgtcagattaaaaaggagatttgaaatacccagtggtgctagtgacggaagtttacacaatattattgctagaaaaatgagttatgctatgatgttgggtgatttgcaaccagtaagagagatagtagagacaatgaagtggcctatagagctagagagttggtatgattatggttcattagtggatgcttgttctagtaagtatgatataagcacaacagaagtagaagcttatttaaaaactctaatagattatttaaaacaagactttatgtttgaggttgaatttgatgttattagtcaaaggtaagtataattttaattataagcctcaaaagaatagcgacgccccccc

SEQ ID NO: 863 - DNA, 13603 bp, Brown algae endornavirus 1
  source 1..13603: mol_type = other DNA
gtctcaagatgagtcacacagtagcacatagacacaaaaacacaacccaagggtcccttagggaccctaaaggaactaaaaagataagatataaacaaggtctttcaaacgacactactttattgatcgggaagcaacaatctttacaactgagcaaatatggtgacaaactattcaaggatgatataattgctcaaccaaagggtaaagtacaaaagaaattaacaagtttacgagaagttttcaaaattaacaagaagcatggtttgtacggcagaagcaatctagattcaaatacagttatgtgccccacagctatatctttaaaatcttttgaaacaatgaactacagtgagcaggactggtcagaagggttcacagtcacgcaattagttgcgtggcaattcatgatagatagcaacaaatcaccatgggctgtaaccgatcaagagcgtgacagattcatgcaagaaatgtgtttggcaacaggtaatttgaaacttgtggctagtgcaaaggcagccgaacaaatgcgtatacggcgaactcaaccaaagttgttaccagcatttgacatcgattatttatgcatagatccacaaatggatgaagaaacctacatgcccgtggaaaatgttaactgccctaatgctgcattaattgttaaacaagcattcaaactaattgattacaacgtcctaaggtctttgtacatagaatgggactcgtgcgcttctaaattcacagaagtgaacaaatttaacatcaatggtgtcacaagttaccattgttgtgaagatgaagcaattttttaccagtgtaaaaattgtaatgtggtaaacagggctatagataaatcttgtacatcggctaaatacaatcctggactatgtggagtgtgcttccatcatttggagtttgattgtgatgcaactgtaatcatcaatgatgtagtcaaaagcttacaacaggtagctacatggagtgtgggggcgagttcgaagttgcatgacttaaccctggctggatatttagatggatctcaattaccaaataaatcgttggaagaacacatggctagacacgacgaacgattgtttaaccaagtgcgaacgaagtggtggttcgaaatagctgaaattccagctcatacttccaatgattgcaaaaaacacttgggaagaagattcccgagtattttgctgaagcaagttaacaaaggatcagcatacaacgctgacgatgctgcggagtttttcgtgctatctaaaatcatgcgtggactgaaatctagtaacactaaagctattgtggaaaaaactattgatcgcaattggttagtagaaaatttggacaaattgaacaaacgtgaaaatttactgttgttagtacataaaaaaatgttaaacttaggagaaggagttaaaacgtatgagtgtgatgctgtttatcctggaccggaacatgctgaagtaatgcgtcttaatttggatgttattagggcattgaattgtcaatatgtaaccttaaacaaaacgacataccgcattcaaactgtaactgagtcagagcactggaacttgatatcaatcagtatacacaatggaacgcgtaacaaatatgtcatcaaaaagaccgacaatttggtaaaaacagcgagaataccgtatgtagctgtaaaattattagacatgctacccattagtccgatacattcagaagaattcaccatcgaacacaacttgttaagaaaattgatggtaaggaatatgacaggattaatggatatgactgaattaataaattatggtcgtgctttggctcaaaccagaatcacatctggaaattttgtcagccagccttataaatacacaccgaaacaaataatagaacattcatacattgcatcaactataatgaagaggttgcacagtcagcgttaccatttgacaaatgatgaattgctcaaccatttggttgcctcgggaatgcaaatagcaagtaatttaatagacaacaaattaccaaagttcaatgaagttagggaagttttaaccagattgggatccaaatttagattaagtataatgaaggatgtttaccaaaacccggtttgggacgatttatcgaattgggcatacgaagtgggtcttgaaaatgcaaagatttatgatcttggtaaaccatcaaaattgagtcaacctgcttcttgtaatcatcacacaactaattgtgaacacgcacaagtaagtgacatgtattgcaggtgttgcaagactcacgcccctgagaagcattcatactactgccattgttgcatgccggatcaatgttcacataatgacagttgcaatcacaaatgtgaagggcagtttgagcatgttggtgacaagatttgcaagtgctgcggaaaaccggcgcctgtcgaactgtgttcaatgtgcaatgacaaatctacatttaacgaagaaatgtcttttgtacctgatgttgaattcactgtaaagcataaagttaagaaaactgtgttcaaaaagtttactactaacacatctaaaaagcaacaaccaaagcctattaaaacgcgagttcaatttactaaatcggaagatccagtaaacagtgaagacaagaagcctgtgtcattagtagaaaatgcagtggagaccacggtggatgaaccctggtctttggtcggcccatcagttgatgaccaatctttaaagcatattttaaacagtgatgaatcaacatttattgctaacattcaatcgttattagatgaggatgaaattgtagcatgcaacaggtgggatggtgaatgggaaaatgccataaacgaaataccgttggcatctggaatttcgcatttagtaagaatgaagccaggaatgtcacaactgaatcaaggaaagtgggaatctataaatgaaaaagaggccgaagttacaaacacaggcgacatttgcggttactgttgtatgaagactatgaataaggacgtaagtttgaaacaattgcaatctgtagctaactgtagtggcaatttctcggcattggacatgttaaaattgtgtgaaattaacaattggaacatggccatagatgtggggcactcattgctagtaggctgttacaaccctgggcatgataaatttatgaccatcaagcatattaatgaaaatcactgggtattatgccaaattttgcagttggggtacagcacagttggtccacactttgatgaattagacgacaacgaattatctaaattaagcaaatcagttttagatttaaggtcggacacaatggagggtgtctcaacagtagcgaaagctctcggaattgcacggtggtacttaaaattatcaacctcaccgctatacaaatcccttggcaagttagaagtggtcaggcaacaagataagtgctttttgacaaacaataacgaacacaagcatgaccaatacacaggtttgatcaatttagaggtgccaatgtcagattggcctacattgagtttactaaatgatctgcagaacccggacaacttaaaagaagccgttttatcagcttaccatgatgtacctagtaaacctaccaacaatttaaaaccgttacgcacaactgaacttagttctgcggtaagggatttgttacaatacataataaatttggactcagacaacggagaaaagttaatttacaaaaaacaaatgttaagagctcacccaagaaccaatacagttaaaatctccagtgtgaatgacaaaaccaaaccaaatgacataatcgtaataaaatatgctggtaaaacttatctaaggttcttgttcaaatcaggtggacactgggtaattatgccaggcgagtttgcaaacagaaaagtgtccatagcccaaacaaagctaagtgtcggaagcatgttactaagaataacttccgtaataaacatgcaattaagtgatgtggaagggctgatagaatcagctattgtttattacggtgaccctggaaccgggaaatcaaccaaattgattgctatagccaatgaggccaggtcttatacggctgtgactctgactaggccagctagagatagattggtatcagctggactcaactcgaacaatgtaatgactctagaaaaagcatcgataaccaaaatcaacacagaaatattgttgatagacgaggccacacaagtaacgtggtttgatatcgcaaaattaatcacaactaaagtggtgcaattgtatatgtttggagatacagcgcaaataactaagaaagactttagcacaacccctggtacgagaacaattgaacccgctatcaatcttacaaacaacaaacacaaattaaccatcaatcataggttcggtggtgacttgtatgaggaattaaagccattgctaaatagtactccatcagacaaagcaccccacacggaagtaattaagtacagtagtgaggaatttgaccgcagtaaattcacaaccatattggaaaatgatttaccagacgttattattacatttactcaacgcactgcatccattttacgatcagaattgtcaactttgatggaacccaatgatcaaccagaagttgttaccgcacactcataccaagcaaatgatgcaaacaatgtgctggtaattcaatgggaatcttctggcaactcactaacaggtgtcacaaacatgcccgaatacaacttttcggcagcaacacgcgcaaaaatgaagttaatttggtggtcaatttctgggcacacacaagacgtatcacttgcagcacggattaatgacgacttcaggggctcagggttgcaccagctgttaccagatctgatgttagctctaacagactttagccaaaaaatgcatttaccagaaataggcacagaagttttaaaccttatgcctgagaggttagaaaagttgcaaaatctttgcgaaacagataaaccagatttgaccacacacgatgaaaacatattaagatttgatgtaatggctaacgaagataagttttctgattcagagtctgatggtgacgatgaccccgtcgcacaacctgttatgattcaaaaacttaacgttcaagtagccaaacagcacgcccaaaagcttgtaaacaagtatggggcaacattaaaattttcggaaagtgaatcgcaaatagatgtccaaataattgacaccaaattcaatagcgggttggtgatgcatgctagatgcgggaaaaattacccgtttactgttgaattggtacacatagccatgatagtaccactctctcgagggaaaattaaacgtatgtttactgacataatagccatgagcttgcaagatgagttgatacggccaggagacccagaatttaatgactttaaggacggatcacatgtcagaattataccaaaacaagaacctttatgtgaatacgatgtcatgcttccttgggcagtgggcatcaaatttagggcactagcccacttgaggtttttgttgccagaaaatcaaacgttggaagttagaattgacaaccaattgtttgttgtggagaaaactatgggttgttcacagtactgtggactcaaattttacaaagataaagttttgaaattcatcattggagggtcccacaaggcaaatttgcgaagaaatgtgaaactatttgattgggatagcacacaccctagcaatgagttgctaaataacagcaacagctttgactgtgagttgaactacaatttatatgatgtgaagctggacttctgcttagcactcgagcgcatattagcttttgcaaatgctggaaaatccatgttgttgaacaagcttgtaggtaataccaaacaaccatggtcaattatgactacttcaaacaaaaatataaatgacaggctagaaaaagctgtaggaacaaaacatatgccaggtgaaatcaacaactacataggcaactgtattatggagtacagtggaaagttgctaagactacaagacccccacgatcaaagatcaactaatatatctcatctaaaccaattgttacaaaagtcccaataccatgagaagcaaagaccatggttcaatataatacaagaaatacttggtttaaataagattggagccctgacaattaaaggcttgtacttgagtgaagaaaggcacaaggagttgagaactcctggataccatttattaatggataaattatctaacgccttaaaacaaatctatgacacagacgataccccactgtggttaagtgttgaacaaatcaacacatacggccaaactttgcgcgaagagttcccaaacatgcctttgtgtcctcacgcctatatggaaaattccagtgctgaaagattaattgaatctgtcatttacttcaggggcaagcaaaatggtttcagtcaatttgcgttgagccacttttccattccgatgatgaatagtgatttggacagtacagccgtgacaatattggctgcgccaggaaatgaaatcaataaccacctaaacttggcgaaagaaaccatcaaagttttggaaggtaaaattcagcaaagaactgagagcaaattggagagtgaccaattgcaactaaagttaagtaaattgcagaactacacttcgggaaataaaacatccttattaacagattacccgtacgaaaaaccaatcgttctaggattaaaatgcatgcataactcattagaagacttccataagctgctggctaaaacaagacagctagaattgtggttacccaatataaccaatgtcaccggaccttacaaccattcagtcaaagatggattagatataatttattatgacaattctgaagacccgattcaaatgtcaaaattgtgcaataccattacaaccgaaactcaactaattcacacaacgtcagatggtaaatacatattcttcaagccaacagacaatataatgggtcataatgtttacacagttgaatatactgtcaaacctcaactatactgtagtgttaatgccacagtgccaacgaattccattaagctgaccctgccaatagtgtcaaatgtgtcagaactaactagaactggaaaactaatcagaatcaaaacatttaacttcaataagaatttttacgaaaaactaatgtacaagatgttgcaaaaagatataacatttaaagagttaatttattatgcaaggggtttaactcattcctacatgtacagtgcgactggttacaaacctcagtacaatgtaaatcctgtgtctgtggtggacgcttgttgtgtagcttacataaaagccaactacttaattcaaccttttaaatcgtacgattcaacggattacttagctatgctaaagaatgcaacccaaaaattacacagttggttgtcaacggacggtacggacatgctaaatgacaatctaaccactttagcaatcgataatgataagttagccaccattattgacagttgggtgaagacatcaactaatgaggttaaaccacataacagaacagtttacttggcaaaattggatggaaccaatgccaatttggtagacatgcataaagttggcagttggtcctgggttgctaaggagtttagtcgacaaagaaaattaatcaaccctgtccttaagaaaaagttgttaggctttgctaagacacagttcgatcacaaagttaaccaattactttccgtaaaacgaatcttgattccaggcaaaccagaaccggtcaaaacaacaacgatagaaccttcatcaacaaaactgcagattaacgacaccggattccttgtaacacattgcggtatgggtaagaccacactggccaatatgtcaaatgctatagatgctgaccaaatcctggagtctggaaaaactaatgaccctgcatacttagctgcttactggcagcgtttgtacgaattgagtaactcaaatttagtcatgattaattcattgggtctattcgaaacaataaaattgtacaataaaaccaaattgagatgcattgcaattctgccaagatatgaggtgcagaaagatttagaatctcaaaaacagtacgaaagaatagattacctgaacactcattataactccctctcctcaacaaaacaattcttcaccaacgtgacgtcagaaagattaatagccaatggtaatttgaacattaagtcccaccccaaattaaaatcaaagttactcaaatacatgattgaagtggtatgtgatatgaacccgcagcaatcacaagtgcccagttgtacacataacatgttagaacttaacaacaagaatcacattgttaaaatgcaatacaagccaactactgatgatgaacacaacaaatcaattatttctataatggcaaatgagttgagcattgatgatactttaaattgtacattgtggaatttaatgaataaaatgtatggatgcaaaaactttaagtcaaatactctagtgttgggacgtaagggtcttgttttggctagcgacaatttgcaagaattaaacgtgttgcgagcatacatcatgacttcacttgcacatgcatttgatgaaacagaatttaacgataatgacaaagttattccgggggttaatgatgaatctccggaagaatcgaattcgagtgacggtgagtcacataccagcaatgacgaaataattgaggcagtgaccaatttatctgacaaagtcaaatccacaacatacggagccgtgagacaacacttcccatcagaccatacattaatcttaagaaagaagagaattttgtttgtagcttttggctctagaggcgatttagaccctgtcatattgttagctagtgccatgcaacaagttggtgctcacattacaattgttagtcattccatatataaatctgaactcgaaagcttgcattttgaagtaattgaaataccaacagacccgagacaatcactgcgcatattaagtctggccttcgacggtgatcttcacctcttaaaagatattttaaaagaacacatagggtcactaggtgcggcaataccaactttagagtccatggcatttgacctcattttggactgtccatttgcaatgttgggttgtgcggccgggtatgcacacaacaccccggttatgtttttgtgcccgttcttgtttgaattgtgggacactccagaaggaataaggttgcactcaatgttaaacaaacttggtatggtttcaaatatttgcaaattgatggaagctcatgataaaaattttgtgtacgaagaactggctgactttatagaatcgaacaataacatcatgtacatgtgctcagaatatctagtagaccctaaccgtttacctgccgggcatttaatcacagggccgtgttacaacaacaggccaaatgcatcaattcctatcattgagagcatgtttaaagaaaataaaaaaattatagccatttgttggggttcactcacccccactaacaccgataaaatagcagatgtaataaaagtggtcgtgtctatgtgggatttggtggttgttacaggtgacacgacggcgactgatgcgtgggataataacaatattattgaacaacacttaagtggtcagtctgtaatagacaacttattaattataggatcaatagggtacgattatttgttcccacgatgtgacactgttttgtgtcatggtggagcaggtaccattcaccgtgccctggcccacaaggttaaattattgatcactccgttcatgggtgatcaattttactgggctaatatggtggaagaactgggcctaggttgttgctcaatggacttgaattcaacaaacatcaaggcagcttgtcaaaggcttaaacaaattgatatgactaatttttcagatgatctcgtggaaagttgtaaaggagatgtcaacaataacttaaatagtatcgtcaattttttcaataataagagaaattcaacattaacatatgaaggaccattgggattctgtaaaatagaatcaacaataccactgccaagactttattctttgggacattggatttggagtggtgaccatcaagaaatatacaacccggacgtagctgggttttgtttcaaggaatgttttgaagattggttaaagcatggttcagtgcgtgttaatgattatcaaagtttatcacaggtaatcaaattagaaaaatatgtagaagtaactgatataataggcctgagcatgttgtgcaaatttaacttgattttaataaatgacgtaacacagcagaaacacatgtttatcacaaacccgctaggacctacgattgggttaaaaataatgcgccaaggtttattatcccactgtgtaagagttaactttaataccaaaaatgcagatcaaattatagacgtcccaagacgggcacccacttcaatacctgaaaccataagattttcagatcataatgtaaactctaacataaccatgtcaataaatgaactcaaagacacagtaatcaatgtatctaaacttcaagctatacccgctgaatcggatttagctaaagtgctcgctaaaccaattaatattttaaatgcggaatttaaatttaaaaatttgtaccacacaatgaacaggcaagccaaacctgtaacattttacaacactttctcaactcgatacgggtatgtcataagcaaggtggtaccgcatctcattaaccggtttgtaatagttagtgacgttgaagctagacgagttatgttatgtataaaattggaaaactgtacagttttattgggtgatcagccaaacgcacattgtgattatatcgcagtaactactaccatgttaaaattaccagaattgaaagtcaaactggaaaagaaaccactggacaccaataattcaatcataaacattaccagtcgcaattatttggagaaaaatgaaaaagtgtcaaattggccggtcggctcaactacagccaaattactgcacatttcacattttgataataggacacatcatgaagtggaaggaagagttcaggacaagcaagtttttgatcattatgtaaagcaaactttattaaaccctgacgtgagtaccattaaatactatggaagagtaacaggtattgaatctaaagctttggtgctgccattaaaatctatgcgtattgatttctgggttggactgcgcatggtggtggaaacagacaacccacgaatacgcgactacctattaaacgaaggtgtttggaatgatttagggctgcaatttaaaattaaacataattatgtagtaaacactaaaaacaacacgttaaacaacatgcggatcgcagattcaagattatcacgtatgtgtgaattgactgggaatgtcactaagatgcggcaaccaccactagctcttgggacgcacaacatagacaagcaacggttcacagaattgttcagagcacaggagatagcagcagaaaaattttggacatctaatggttgctcggcattcggagaagaagagcttatggtcactacatttgaagggactaataccacattgaaggccatgaaccacacaggagcaatttgcatcaattgcaaattgcacagtgtaactgggttaatcacagtgtccttggtcgacaaaaaaggaggagtcggcaagcatgaattaatgaacaaaacagacggcataccagatgataaagatgtagaccacgaccacaccggtcaatcaaccgggatttggtcacaaacaagtgacgttaatccaacaaagttcaccaagtggtggaacctaccagagtctaaggttaataacatgcccgctgataatttgtggggtttgaaatctgccgatgtcctaactgacacaggcttggaatctatcttgaccaatgaggtgttgaccggcgacgacaatgaatttaagcaagagttgttagtcaacattgaaccgaataaaactcaaacaacaaaattttctaacactgattttgacgaaccggacgtattcagcgtaaatttgtatgaagacacggatctaacagatcacaccgcaaaatatttaccagagaataatgtaagaataaaatgtagggaaactgggttcaaaaccaaattgattgaaaaatccataaaaactaattatccagtttattctaggcccgtgttgaccaaattaaataatgcagaattcaacgcagtcactggccgtctagcttcagtcaaaactgttcgcaaagtaaatctaaatgttggtgaagaagtcaatagatttgctaacatatattttgatgaagacaaaaggaacctcttgaacagttacaaaactgacccagttggttttgattacactgccatcaaagcatggttaacctctcgaccagatgccgtgaaaattgcggccgaagtagacgcaataatggtagagggatttgaaactaatcagttaaatacaatcaaagtacatttgaaactggagtctttgttaaaagaaaatccagttaaatatatgaaacaattgcaaccacgtatcatagcatggcaatctaaaggaatttgtgctctatatagtcattgctttaaaaacataaaacaaagattcaaatctatgttaaaacaaaatgtcatttacaccgatggtatgacacctgacaatttaggtgaacggtgtcgaaatgtacaaattaagccaacatacaactttgtagagaatgatttgacaaagcaagacaggcaaaccgatcacaatttgattgactttgaaatggccatttacattaaattaggtgcagataaaaatttgatagaatcttggttacgagtacacaaaaattggagagccaggggcacatatattgtaatgcacggagatgccatgagattgaccggtcaagctaccacagccttgggtaatgccattgttaatttgatatgtcacatggatttagttgaaagactgtcaacaaggttaatattaatgttaattttgggagatgacaacgcctttttggtggacggggaaatagataccgtgacactaagacgttggatcgcagacaaatgcaacatgttcagcaaagcaaaatcttttaaaaacgtatgtcaattttgttcaatgctgctgtacaaaactacagatgaacgtttggaattaggacccaaccttgtacgcatgaagaggaggtttgaagtcaccaatggagtgcacaaactaacagacaacaatgcagagatgagggccatgtcatacgctatgatgttgggaaaagaccaacaactggacgagctggtaaaagaatatgaatggccaatcactactaccacttggtatgaccaactatccaatttgcaagctaatgccgagtataatgaaatatctcaggagcaagtcctcagttacaagcaaaatttaatcgcttacttgaaagaattcaacacctacaaatcggtttattggacagtagacacagaaaaaagataacaaccaaacattggctcatcacctacatcggcacacgttgcaggtgtgagtacaattcagttccgcccccccccccc

SEQ ID NO: 864 - DNA, 12572 bp, Brown algae endornavirus 2
  source 1..12572: mol_type = other DNA
acaatggtaaaacgtagtaatataagtaaaacaatgtcaaataaaaaacaatacacacacacagccagccgtgagaaatcacggctggctaaaaatctggatgaaacaattgaaaatgtttcgtccagtattggagttagcttggaagtacaatcaactaagaatgtattagaaggtctaacccctttcaggcgtaatgttaagttaattaagcataatgcacctgtctctgctagaaaactggttcgagaaagagctaccatacaattgtcacaaccgcaagaattcataaacaaccccttactagacaaatttggaccacatgtttacaacttaagtagaattacacctaatttaatcaaaaagatgatgttcaggtttaaacatgacgagctgtatgttggggaactaccagtgccactgctattgcaacaccaatacattgattacccttgggggagcaatcaaaatgatgcagatggcacaaaaactccagaaattccttctggcccagggaaagaagaattagagatgtacatatcttgtggcatacctttggaagacctaatacctccgggggccatgactgaggaaactaaacccttatttaagaaaaatggagaattgttgctaacttcggtgttgcaagatattaattgcaggttcggctcaatggaaaattatgttaatttatgtgaaaccaatcggccatcagggattcagccagcaaaaattgacggccattacgtaactaacacttatttgcctagtccagtgcatcaatgtgcttgttgtggaacttacaacactatgaacaactactctgctccggcaaacttagctaaagcttattttgatgaacaaataaaactagccgaggatggggatgttaatgcacaaatcgttgtaaagcggagaggtctagatgcttctttcatggtacctgacgtattgttaagtaattatgcgtggaaagatatcacacccggaacttggccccacagatcagtgaatgactatgattacaccttcagatgtgccaattgctggcacagtctggaagtaggcattgaagaaattcatgaatgcgctagttatacagataggtatcataatttaatcgacatgagaggcaatagtattttggaccaattaataacgactggagttggagatatatatagtgatttagctgctgaagatagaacaactttattgcaacatgacgaaaatattgtgaaaaaatatttgcgcactatcagccatagagtgataaaagtgccaactaatttggacccagcttgtcattccaatttgaggtcgcactacccaggatacactcagaaattaactagtaacatgtttgctgtgaagcccgaattgtattctgaactatgtatggccgcagcttggctgattgacaggaatccagatggcaattaccgcctagattccacctcaatcgatcttgtagacaggtcaattatgtacaccaatagacaagaatggatggttaaactcaagaaaacctctccagacttcaaaagtagaccaatggtcatattaggagaaaaattgcgtgatattaacactgtatatgaattattaatgcaacaatcaatagtatattactttataattaaacgatctagcgatgccttaatggacggcactggcgccacatacaccaagtcgaatataacctccatttatgttgatggtaaaacagatccattaactgtaaatgcttccacttatgagttgttggagactaatcaagccatacgagttggagctaatataatacttaacaacactttgttggatggcattcacgtgaccattggcagtttaagtctagataacagagtaacactaaccaacagactatcacaaatagatgatcaaactgcagtaaccatacctgtgcctgacattatgtctatagaaggaatcatgccaataattaactggaaacacaagacttatagtgtaaaactggacttgtttagaactttatgcattcgcaacatggacggaagagctaccacaacgcaattaagacagtatgctgttgccttctcaaacacagtgtacaatgtaggggaaaccagaataactaacagacacataacttatgatgacattgatttccatgtggcttgttgtagagccatgatgatgcatgagaatcaagttgccgacgcttccatggcttacaataaagttttaacttgcttaggacctttacgcgcccttctaccacaattgactaatggattaacagggattatattggaaactttaactagagtagtagaaataataatggacaaagcaggagctgacatagacacagtgttgtcaacagttaaaactgtgaagttctttaacgttaacgccctcgaaaacgtttgggagaaattaaaagatacatccatcaatgcacagttgtcacctctaagagtttcaaatgccgaggttaccaaaactgaaaacttcccaaattgtgtacatcatagagcactaattaattgcatgcataaaggggaaaataattgcaaatgttgcaatttgccgcacaataaccaatcctcattgtgtgattgttgccagcctgttaaattaactgtagaccccaacaactacaacatgtcacaacaagatgacaaccctggtaacaaaaacctgtctaagtcaagtagtagtaaacccaattctaaatcaaaacaaaagcaatcaaaaccaaagcaaaataagccaaacacatctactaatcaaattgagagcagtgctgacaactcagaaactaagcaaacctcgacaacccctgaaaaaccattgattaaattgacaaaggaaaagttgaagttagacgtaattgatgaagaagcgttaatggtagccactaatgtgccaaaaatgtttgtcgacggattgcacaattacccagaactaacatcaaagatacaacccgcaagagaattgcaattatatttgccttatatgttagcaggcgaaaccatacttaaaaacaaggaactgaaaattgtcgaactgataaatcaaaagaacgatagcattaacacatgtggttataacgctctcaagtcagcaacagatgggaatctcgttatggatttggatagtttcagggaagtgacaggctgcaatgagaatttcagaacggatgatatgttcagatacatgagaatcaaaggggagaacttaataattgccattgggagtgagttccatgtttcaaggcacaacaaatcagattactactattgtgttatccatagtagtgccaccacaaaaaatgatatagatcattattatcacggtaaattacaagtaatagataaacccaacacagtactcacatcaaattttgagttttcaaccagcgaattagaagtggttgcacaaagtttggggctcaattttgattcttttgtgtcaatatctatgccggccgccgacaatctaatgttaatagcattggcacaggcttcgagagccgagtttgatcacgaaacaaacaccataggacgactagttagcgtgggacaagatgagtattggcaattcccaatcaataaccatgttaacaatgttcaatccggaaaaatctacaaaaaaataaggaaaacaaacagtgctataagaatgttaatagataattatgaccaaccatcgagtcaacaaataactcataaagactcaggcatacctgaaaggttagaaaaagcgattgatgactactgtaattctctggctcattcaataaggtattgcaaaactatgttatatcaacaagacaaacacaagtatctcaagtcatactgcactgtcgaaacacgccaaacaaaaaacggcgtttggataagtggagctgatgcttcacttaaaacatttgatcattgtgctattcaatacagatcgaacaaaaccactattaataaaatcgctatggtcataggttctaggggggatgggaaactgtttttaagtgtagatggacaactaccaaccaaagtcagagtggcagctttaaaaataagttctgggtctgcaataagaactttaatagctatgtctggcactttaccagatagagaagagttaacagaattagtgcgcaaaagcactggaatagtaggagtgccaggaagtggaaaaaccactacaataatcaacaatgtaaacgaagaaacattagtagttacaatgactagacaagctagactgacgttgtctaagtctatatctggcataaagccaaacattaaagtgatcagtgctgaaatgttgctcaattaccctctatccaagtttaacaaagtaattatagatgaggcgactatgttagattacacatatttaatacctatcgctaacgggaaaatacaaagactagaagtatatggtgacaatggtcaaatcgggtttgtagacatgtcaatggatgcaggaattagggccaccacaaatctattaactatatgtcaagagtatgggaacatagaagaaagaaatgcaacgtacagacttggtgaccctgcagtatcagaactaaaagcaataataccaaacttttcatcactatcaagttctaaaacgagctggacttggcttaattgcgctaatgacgcagaaagaatagtgtggcatattgacaatcaccaaagtgacctaatattaacaccgtatcaagaaacaaaacaccaattagaacaactagtattaacatctacgagacgcacaactagaaccatcaccgtaaacaccacacattcatcacaaggtttggaagttgagtccgtaatggtggtacttaaagcaacaacgggaggacaatggggcttaaatggggatgccaactatttggcttctgcattaacaagagctactaagcaagtaatagtgcttgtaataggcagaccatcaataactaatttaagcgaagcaacatctaaattgggagggtcagactgtttgttatacactgtaattgatgaaatggaaaaaggcagcagctcaaaaaaattaacagaattgatacaaaatcacgatatttcggtagaatcagaaaagaaagacgatgattatcacactactattaaacacaaactgggcaacattaaattgttaataaccagacagaaggttagtattgtatcaaaaccatcttttataccagaagtcaaaatatttgacgtattaactaatttaacaaaccaagacactgaaattgacacaacgaatgcacctgaaaaactgatcaaatacgctaaaatagatgaactgcaacataaattcgaattaaccgaaactaccgctattaacaaagtaagagttttaagctggctggttgaatcaacaggtaccagggaattagttataccgctaaagcacgagtcattgacaataaccaaaaccggtggctgttgcttgtggtgtggaatatcggtaacttatcaaggagccacagttacagttaacgggcaatatcgaacagtcatcaaacgcgtatgtacagctgataataaaatcggagcaataatgttaatgaattggtttaaaaacaatgacaactgtgacatctttggaaacttaaccacaaccaagaatttctcaattaatatgtacaaggagagaattaaaacactgccctatttattcaacaatccagacatgcatttagataacttctgcgatatgttgaaagataaagacagccagctgatgcaaatgaagttcccaattttgggtaacaaatctaaattccgcaatcaacataactttgtgatccaacaattaaataggaaaaattggcttaaaagaaaccaatttaaattaatcatccactacaaatcaaaaactgaaaaattagtcaatttaagtggctcagatttaactatgttgtacaacaccacagtgttagacatggctgccaacacagaagtaacagacaaaacctatctatttggtcaaggtactggcatagatggtttgaacatgacgttggaagaacatcaaatacacaacacagttgtggctcgcagaattaatgcaatcaaatctaaactgctatcaaagaaagccaggtcaaccacagacatactatggttaacaataggagatgaaaacctgatcaataaacttaaattagaacaaccaaacttaagcattaataagttcaaatcaaataattgcaagccagcattgttgcaccttatagaaaattatggtacaatgctaattggtaaagataatcaatcaacatatatttacgcgggttatacaattaatgcacccagtcagcaaaatcagcactatgcagaatatttaagcttaacaagtgacttcttttcttcaaccatgtggtctgatactgagcaacaattaatatctgacattaaagtgtttaacgaagtcaatgccacaaccatacaaccaataactagttggactcagttgcaacacaactatcaaatgcaaaacaacgcaaatcgtccagtagtcaatttggggtgcaagttacctctgatacatccggaaaaaatagcagaaatgctatctaataattacagtgtttatggaatcataccaaacccaacagccaataatgggttgtttaaagtagaaaacagttgcctaatattcaaagatcacaatataaccatgaattgcttaaacaattattattaccatgccacgactggcaagccagtgagaacagacaatttggcctttaaattgaacatattagttcatgtattaggatttataatagttaaggtagaacccattccggttaactcaactgtggtagcttggataaacagtgaattacaagaacccgccagatttaaagctaaagtaccatggttaaatgtagatgttagaagtttgctagccggtgaacctttcttggacattaaagaattgttggtggacaaaaaattttacagaatgttgatgatgagattaacagccgaagacaaaactgtcaaagatgcaatggcctacgccaggtcattggctagtgttgaagttactaatgctacctacataggttccacatctcaattaaatctaagcagcgtaatagacacttgtcgtttggcaataatgcacaggacagcattgttgtctcaactaagtgtaataaccaagttgttgaacaaagccagcgacgtgtctataattagaataatgttaaaaaacatgctaaccacagcattgtctttaactgataagttacctggtttactcagtgctgagacaattaacagtattatttctaatgttataccacaattaaacaacaattacctatctgagctaataattgcaaatgacaatttgttaatcaagttgggtcatacaagcggtaaattggtaatgtatcatcctgagactgagccgcactaccctccggaatcagaagctgaaattgaatcttatggatacgaagaagatgataatgaatcaaatttgggagaagatgacacaacagaagatgaaatgcctgaagaagtcaactccacaaaagaagatgtcagtagtcacaatgaccaaactaataataaagcaaatgatgagttgcaaaacttaacaacaaccaatgatgattatgaatcaaataccaaattagaaaggttatggcttaagacaggcactacatggtcagacagttggttacaaaagaagtttttaaacacattaacagacaatgttaaatcaaataaactaatgccaactagtattacaaatataataacgggtgatgagcatcaatttataaggcaatgcgagcaaattgttatggattgggacaattcagaatctcgttacttaatagaccccagtagcaatcaatttagaactagattaacaggcaaacctcagcaagtattgttaataacattgggttctactggtgacgtattaccactaattacgctagccaattgtttacaccagaacggaataccttgcactataatgacacactatgaccatttcaatttaataccttcagaacatgggttctggcctatcactttctccatcaaacaacaattggatttagttatcaaattgttttgcccttattcaggaaaaaaaattaatagaaaagtaactgaggcttattaccagctaatattagctagtatgttcaaaaatacatttgagttagactgcagattagtaattgctggagctattacaccggcagctgaatgtttcgccgcaaaatacaaatgtgacatatattggatacgtccttacccctggctggatctaccaattgtcaaacttaaatgggtcagatcgatagctaatgccagcgcacaaatgctgataaccataatgggaaggaaaatactagagaagtacaacgtcactcctggggaagacaccagactagaaatgtccaagcaactagccacatttaacttggaattgctaccagagcacatgaaaaagaaatacactaatgcaataataactggaccattgacagccaaatccagctatgtaggaaaagctgatgacctaatggaattaaccataaacaactcagaagaagagtggggtctggtgagctatggttcagtaagctcagacaacagcgttaaaatagcttccaatttggcaaaagcaataaccaaacataatttaaatgtggtggttaatttaagtggttccaagcatttgctagagtttgaatcattcatgggtcttacgagcgatggggtcacaaaatacaataacaagttggtttggttaagcactgggttcagctattcaagattacttaaaaaattccagttcatagtcaatcattgtggagctggggtgttcaatgaagcaatagacaatgcagtgccaatatttgctggtccaatatttggggatcaacctgtttggatagaagctggttcaaaattgggcatagttcaccaaggccccaattacttccaattggaaacctatgcgactacagaacaattcatatcaacaggaattgctaaactgccgagtttaaaaaccaactcaattagagccaaggctttaaaatcgaacatagttcaaccgagtttaacatctgtacttggtaaaattataagcattgaaacaaacgttaaaattgataatgtaccatacttaaaactgtctcgtactttagagttgccagtaattaaatgctgtaggcaacttaacatggagactggtgaatacatttgtcaatttggcaaattaacttgcttgtataacccaactaacactaacacttgcgttattgactcaatgtttgcagcaataggagatgaaaatttgttaactaatgtagcagatggatacaacactcactttatacataaattagccttgcaatactgttttaacttgatcatagtcagcggcaagtcaatagacgaaataaccaacaacaaagggtcagtaggaagaggttacatcaagttctccaatcgtccaactttaatagtaggtagagtaatgtcctccgatgttggtcattgttgcttactagatgggtccgtagttgacataaccacaatggatgaatattcgacagcaggggcaattcctgacttagaactaccagtttccaaagaaatagcgttcagctttcaaagtttattatcagaaggttatcaaggttttaacaaagacttacaatataaattgttgttaaaccaattagaaaaggaatggttgactaggtatgagattttaacaggcatttgtgtgatgactaaacaccacaatagattaatagtgtcagaagacaaaagagtaatgagacctcaattgtgcctattgtgcggacccaccaacatgaggttcgggtggtgttgcgctgaattcataaatgatcaaaccatctacagttacggaagtttcactgaacgagtaaacactgaaattataataaacttaaacgtaccaatagaatcaaagaccaaacaaaaattggcaaaaattatacatagagaagaaaccaacaaactgtacagtttgtcaagatatgaccagtcccaattagctcaacaacatggaataactaccgatataatacacgaagaagctaaaggcaaagtaatagtttacaattatgaaaatagaagtcaccacctgcacaactctgaagaactgatgataactatggttaatcaaggtaaattgctggtgcaatggggcctagacaaatccaaccctccagattctccagtggaaaagacaaaaaatcaacccattgataggttgattatgaagaatgggaagtggtacaggtacaatgagttcacaaacaacgtattagctgccatagagtccaaactaaataatatgaaattgtatagaaccggagcactaggggaagtgaacatgcagaaaatagtgctacacaaactttacaaaaccgtagaatctaaatcaggagcaaaaatgttggattacaccatacttccggaaaaaaccttaactatagagcctgacggaaccttaacagctaaattgatattaagccgaaattacaacctgctagaggacgcatcttcaatagattggtcatctataacagccaaaatgttaatgctacaacaaggtacaaaatatgttgtgtttgaccaaaaagatgtgtctataataattactgaagatttgcacatttattatcatcaattcgttaaaggcggtgccaatgaaggttctagttcaatagacgtaataactactgccatgggggcacaaagcaaatcaaacaacaaatggtttgaaatatcaaatgacgacaaccttaacctaacggctttggaacaagactacaatatagatttcatgaacaatctgcaattaaccagcataccagcctgcaatgctgtaacacctcgcagtgccaatgaattaactaatcaaagcacttacataatcaattcagttaattggtgtgttaatttaactcaaggtgcaaccgaattgacagacgaattaaccactgatgtaattgatttatgggagttaacagacctatcagatcaaatcattaaatatgcgccgttaactgtaggatcgctcaaatcaaaagaaaaaccctacaaaatatccaagtgcaggaagcacaccatgactcagttcccaatccgttcaagaccagttttaaccaagctaatttatatggaacacaacactattacaggtcgactaatgtcaatagccaatattaggaaaataattccaaacgtgagacaaacaactagaagattagcaacaacttacttcaagccaacttgggagtcagcttgttctgagttccaaagtagcaaaataacttattcatccaacaaaactaaacaatggatagctaaacaccacaacgcctcaaaagttttaaaagatcttgagacgtttttggtagaaggtaaccaaataaggtccatagcagatataaatatacatttaaaattggaatcattgttaaaggacccagctatacaatcattcaaacaacaacagccaaggtcaattatgtggcaacattattacgttgcggcaatatacagcccgatatttatggaagttaaaaaaagattaaaatttttacttaaagagcatataatatatgcagatggttataaagccagtgatttaagtaaagtattatctactatcagggctggtaaatactattacgaaagcgatttaaaaaaacaagacagacagacagataaacccttattggatgtggaaatggagatttacagactattgggagtggatgacaaagtactaaattcatggagaacagtacacgaaaagtggcggttcaagggcacttacagcaaaggattatgccaagaaatgcgcactaccggacaagctactactgcaataggcaacgtcataactaacatgcaagcaaatttaccagtgattgaaaaatacggtgctactattaaattaatgatgatgttgggggacgacaacttaatgaatatggaggttttagtaaacactaaagaagcggagaaaaatatagctgtcacatgtaatatgcaaagcattggaatagtcagaacaaagggcggcaatttttgtagtatggtctgccacactaggtcagacggaacaataggattaggaccagactacgttaggctcaaaaacagatttgaagtgactaatggtgttcacgaaaccaccgaaaccaacttggaaatgaggagccaaagttatttgtcaatgataggtagcacacctgaagcaatacgcattattaaggaaaagaattggacaattaaaccagagcagtggtatgaacaaaacactctaatccaggcaactgcaaaaatatataacaccgatgagaactatgtaattgacaactataataaactgatgcaaatgattgacaatcaacaaatatttgaacatgaatttactcagtatgaagctagcagaaaaatgtaatctgccaatcggccaagttgattatatttaatcaacttggaaaatagatgtgtgtgtgtggc

SEQ ID NO: 865 - DNA, 14880 bp, Capsicum frutescens endornavirus 1
  source 1..14880: mol_type = other DNA
tcaaataaaataaaaaggtatgactactaaactaagtagacctttttctttaagtttactgggcggctctcgcctcccaaaaactcaaactcttcacgggttcactggcaacagtgtacccgtgaagaaaattacaaagaaaaatgattgctctgccagaaaggcgtttcggcagtgcaaattcaaatttaagataaacaaaacaaaaaccatttgccctgcagtgatgtcacacaggttggatgaagaactagaatttgttcaatttgggccagaagaatgtgtgcctgatttgaacaaagtagatataaggacaattagaaatatgatgttgctatttgatagaggacactgccatgtggatataccattggaggaagtgggcaagtttctgcaaaacagtcagttgcaaagcacagagttgttttatggtggaccaagtaaaaaatattatgcaaactgtaggccaatgctactaccgccctccaaagttgacggtgacaagacagaagcagcacaattgttgttgactgggctaattagaaagtttggtggcagtgtaatcaacatgttactgttggattgtaaaaacaactacaacatgagtccacacatatacaaaaccggctgttcatatggatttaaggccatggaactgccaaacgtggaagcggccatgacatgcgcatgttgtggaatcgtgaatttggtgtggttattggatgagactgatggattgcaattgtcaagatgtggggtgtgtctgcagccacttttggtgcagaaaatgttacctgactgcatagtatggggcatgcttgaagtggtcgatatcacacaacttagggttggtgcgctagagttgaacaacgctgaagtaactttacaattggacgggcaaccagcgtttgggcccgctacactagcaaaattaatagatcaagacttgaggaatatacgatcagtgatgtcaagggccatgagcaaaacaatttatgtgccaaatgggttgacagagcaccaaaagaaagagttggcagctgctgtacctgcctacaaattattgccgatgcggggcactccaaatccacatgccatgttagcagcagaaagacgaatctgtgctgcaaccatggcagacaaaaggaagaaaggaaaaacaattctggatataggctctagagtgaacctgaacgaggtagaagattggcacgggatgggcccatgtttggattggagggatgttgagcggtactataaccgaccactatctaacacaatgtgtgatcatactgtgaaggaatgtaactgccttgacaaccaagagccattaataattagcatagactcgttgtatgacatagacccaagtgacattctttctttgatgcaaaggacgaaatcaaaccagttattttattgtttaagcaccgcagaagtggattttaacaacaccaatggcaaattggcacaaggacaaggcgaatggatgagacatgacaacaaactaataaccgtgctgaggggagacgacagaccatatgtcaatgattggaaattgagcagattgtggtcaaccgcagatttagtgcaaataggccaacaagagatgagcatccaaaccgtaaagatattgggtaaccacatcgtgagggtgttaacattggtacctgacggtatggattgcctaaggactagacaagtaggtttacagacaatatcacaaattgacattactgtccccattatagatgttgagagttggttgaacgtattaggacccccaaaactagcccacaaacaaatgaaattagatctagcgctataccgagcattgtactcgagaaacttgactggtggattatcatatgaaaagttgattgagttcgggttgggatatgcacatgccaagtacaccaccaaaacgactaccatatctcaccagcacgttactgctgatgatgtaaggatgcatgccatgttggcatgtgcagcaaccagaagaaaattcgcttgggttagctcagctatgaaattgaattcaacctccaacgtatttggactagatcctatagaagtgaccaaactaatgactttggacctggcaggaacgctaataaaagacatatggggtgcaatcttaccggacgggtttatcaaacaacgattggatgaactagtaattcaagtaaccaagtggatcaatgattccttttgggacacgttggacacattgacgagtggaagcagagtgtttacaccaaccgtttatgtgtggccacaattaggtgacgaagttgcatgcaatgctgaaagaatctgttatcaccacaaacaatggtgcaatcatccattatcattagacaacctgtgcgactgttgcagattggtgacagcattgcctaatcaaacaaaatgtgagtgttgtatgtcagaatcaagtcgccatgaatgtcaccacaaatgtcagggtgggcatttggtaactccggacccagcagctttgacatgcacttgctgcaaattacaaacattaaacgacaaatgccaatgttgcagcacattgataacgaagcgtcctgacaaacaacaaccagtgggggcggaaatttacgggcccgaacaaaaagaaatgtcgaaaacaatacgcagttataaatacgaaggattgtcaaacatcactagcatgccaaaggctgtcaatcacgcagaacacgttggcccacatttgactgaaccgattgagccgcagtttgagcctgcacccacgcccacatccatcattaaattgtgggaagaacagcttgggcgaaaatttttgagtacgccagataccggcgcgccaagtcagttgcctgatagcgatgtgcaaggtaacaaagacgaagccgaggcgaaacaacactctgccccagacatcgtgggtcaactcccaacagaaaatgaattccaaaaaacaattttggaactaaccggaataactgacctgagttacgttagcaatttgcgatatgggtacacccaaagtgtgacaagccaacttgcaatgcccaatgagcaaaacccagacaacagagtgggtgtaagtgaactcaaatatttcccaatgggcttgaatcaacatgatgccagcttgttagcagttgtggccagacaaaaagttgctggcggtggattgtgtgcatattatgcattggaacattgcatgggcgtgaaactatcactaaaacacatgcagaacacactaggctgcaaaaaccaattctctgcgcatcaaatcataaaatacggcaacatgttgggccacaatgtggcagttttgaccaatgaatcggtaataactggcaaggttgacccgttcagtgacaaatttttgtgcatagtgcacaccctggaagatacatcgggggccccacattgggaaccatgcaatgtgattcaagtaaatgatcttgaagcaacaccatgctacatgggattatttaaacaatcacaagtcaataaacagttaggattgttaccaccaaatcttaacgaagagcaagaaatgcgagagcggtgcatgattgtgttgaaactaatcaaacgagcaattccaaaccttgcacaaatacagtcaggtagagtggaaagcacagtatacaacgtgaaaggaatagacagattcactaacaacaaactgaaacgacatgaccctggcaaggggttatttgattttgaaatcaataagaattgtgtcgaactaatgcaagcactaagttgcgagacaatctcgactaggttagcggatgaactggaagcacctctaaacattaacacaatgcaaaatgtggaaattgacgaactcaaaatttccctactaagaaatgcagtcttgcagctaagaatgacgtggttgcaggctatgggagcactaactagaacagatgaccactggctaaagatttctgtgttaacacacaaaacaagcaaaggcactagaatgttagcattgcaggacacaaagttaaaatccggtgacattatatcagttgacacaatagatggagcccaggaccgaataatatggaagttgaatgatgaatttcattgcctagattggttaccaccaaccatagggacacaatccaccatattgtacgtcaacaagcacagttttaagagtgggttaattagagccatgatattgaaccggcaacacgttgactttcacaaattcaaaaccctagtggcggagagtgcatgcacaattggtccagctggaagtggcaaaagcaccatgatcgcatccaattggcaaaagggcagcatagccgtttgcaaaacttcatcagccgttaggaatttacaaacaaaaattaatgggccttcaaacatgatcatgagtcacgaaaaatattcatacactcctgcgccagatcaccatttggtgttggatgaatgcagcatgtacacttggtatgatctgtacttttcacttacaaaactaccacaaacattaacaatgtatggtgacccccaccaaattagcaccatcgacacgtttcttttaggaggtgaaagagtcttagacaacatcacagattatgtactacacactcacaaactgagatcaacataccgttacggtgccacagtttgcgagttgttatcaccactgttaggtgagttgtctagcaaggccaagcataacacagtagtaatagacttaaatttaggggtctgggacgatgatgaactccaaaagataatggcagaacacaaaccagatgtggtgctaacccaccacaatattaccaagcataggttgggcaggttggcacctggtaccaaggtggaaacaattcacgcatttcaatcgctagagtcgaataacgtgatgatagtgcaatataatgaagggggcaattcaaaaatatacatggacaaacggtatgcaatctcggctatcacccgagcaaaattaaaagtagtgtgggttagtgttgggttaactagtggaatgaaactcatagacaaaatcagaggcacagatttggaaacactgggtggtggcaaaccaaaaaggtcagaagaggatgatcaggcacttcagcaagcaataaacaaaacaatgagttcaggtgtcagtggtgaatccagcggttcaatgtcacccatgcaaatggctcgtatgaggttttcgcaaaatttggcaacaacacacacccacaccaaaataaataaacaaccagccaagattgcagtagtaactaaagcagacattgatgcattagttgattcttacaccatgagcagacaaccgctgttaatatatgaagggtggaaagagtttgtaaatcggtggacaaacacaataccaacaaatacgaaaataatgcatgatcaccagagtaggacaattcgaatgcagctttatcagtgcaccgctactgtggtagttgatgaacagttcgaatactactcattgcaagtggaatgcccaagatggatgccactcataaaggaaaaaataatgtcagaatacaaaaaaggtttaatagaagaatggcacaagcatgctctgggaaaaccaattgacacagtagtatcgctactacgaccctgtcatcggcaatggtttttagactatttgccactaagccgaactttggatacggaacaaccgaacccaccggcagcctcaacaaacttaaatcgttctgaaagctcaacagaaatagaatcaaatgatgaagagtggtatgatgcaactagtgacgagttggttgatactgacgacttaaaccctgaaaacatgaacttacaagaattggaatatcacaatgtaatcactaatagagaactaagcacaaaatacccctctattgccgaattgaattatcaacaaataaaatctttaatgcaaccaaatagcccgatgttgcaaccgattaaatcatccacattagtagtgttagtgcagtctattttgcccaataccaaactaaccacagttgtcagaacaattgaacaaggatttgaagtggcaattgataatcatgcgaacacgataggggtaatacaggtggtgagcgatggacttgtgctgaaagtagttgcaggaagtatggaacacaaaatacagaccgcaattattgaattcaaggtcaaactttacaacaggttggtaccatacgcaggcatttggaaatgcagtgcaaatttgaacgaccaacaaataaaaattatcaaaaaatggtatccatggttaacccccactaatgaagacctccaacagtatgaagacgaaaatctgttagagttgataaaacacggaaaactggacgtaccaggcaaattgatggacctgatccaaacaatgagagagctaaagcaggtcataactgaatatgaatcaacatcagagaatgtattagaggtgatatgtgaagtatgcggcaatgaatgttgttcagagtttgaagagttgaaattggaccatgagtgcctggtaactagaatgccattaagtgcttcatcaaccagaacaattagactgtgcagcgaatgggcaatactcatgaacgacatggaccagtgctttaaattggaaatacatgggaacacaataacaattttatcatttggagggtgttcactttgcagtggactaaaattcctatgcaatgaccaagaaattttgcggatatctccacagagaaagttagaattcactaggaaagtgaggctcgggattaacagatacccagaggttttgatggcaattatggtttcattgcacatgccgacagaattaactactatagacgctgatgaaagcatggtttgtgtagacttattagagggagtagacacagcagtacgaatgccagcattcgaattaggcatggtgctagaccgcatgcgactggcaccagcttatctatgggctacatggaagggacaagaaaggggtcaatcttgctctatgtacataagtgaaaacatgaaattgagggaggaatggcaagaaattgcaccggcactacaaataaaggcaatgtccaatttgccaggccataggtcattagtcaatcgacctttgggagccaagtaccgcaacatcaagttgacagtgatgaagttgaacgagtctgtcctttgtgacaatcaattactggcctccaaatacaattggaggtacacaccattagcaatcatggtagaaaagtactactggcataaattaaacgaatggccgtggaggttggccaacttgatcacacttaacggcaaattggcgaacattgggctaggttacgatggtgatttgccgataaattcgctgaacctcccactaagttaccatgaaaccaacaacacagcagttaacagatttttggtggataaacggggggacgccgtgctaagtacaatgaaaaagacataccatatagtgtttgtaagtaaagcgcaaatgcaaaactatgggccgatgttggcaagagactgtgaaggcatgccaattgaagagcaggggtgcgaaaccatggatcaagggtttgatatgttaacggagcaaatttgtctcaagtatttctacaatggtttgccatggggagaaattagtcagatggtaacagattatccgtatttatccatattgacctctagttgggcaaatatgtgcacacccactgacaccaaatatgcgtttcgatactatcaaaacataactgattgcaataacatgttagaaaaaatagagcactcatacggtgggggaaaagtgctgaactctgcaacaaaggagacggaacctgacaataagcaaagcatattagactgcatgaaggtacaacaacaaagcaaaacaggcccgtggtacactgaagatgtggcttcaccacctaacttggcctgcaaaaatgtattgatggggttggtgcagtgtcggttgtcaccagatgaaatggcagaagttatgcgaatgaacaacaaaacatgtgtgcatttaatcatgccaaaaatgatagagcaaaacaatcaattgtttggagtggcaagcgaagacgcaacacattacaaattttggtaccataactccagccacttaacactggtaaataaaggtctgttggccatgtttcagactggacaatgtgtaccaacaaaccacggcactcttgtgacacatgctgctaacagggtattaggccattgcatagttaagatattgctactgcccaacaagtccaaattaccaaagtatgtgaggccaaatttacacgacaaccaacaaaaatcagtgacgttcaagttgcctgaaattaagaattttaagcaattcgtcacaactggtaaagcaatatcttacaaagaggtgaccatgtcgcttaagttgtatagagctttatcattgagaatgttgcgtccaaaaacaacgctggacgatttgcttgcttatgcaaggacatacagccatacagttgcttacacgataagttcaaggagctcacagcaaccacaatttgttacagagttaatggaatgctgcgtttgtgttttcgtagaaagtatcaagttaaatgaagcagcaaaccgtgtaatgaacctcataagtggcactgaacacccaataactcatttgcacaatttaaaacatacagcatggtacagtttggtgaaaatcttagcggattgttaccaatggctgggattagacacaaccatagataaaattctagaattaagcgcaactgttgggaaagctacaattggacaagtaatcaaaaatattgacaaactagtggtagtgcgcattagtaaagttgacacagtggacccaattatttgttaccaagattcaactggacaatacaatatggaatcaagttcctttatgaatacgaaaagaaaaattgacaacatgttgcaaaatttaagagaaagtgtacactggggcatgcaaattgaacgaaacaggcaagatctcaccgatggtcgtcaaagtggacaattggcaccaactgcaacttccaagctggccgacaaactagctgataatatagggggagacagagacgagtgtattgaacagttgttaccaattatgctagaagcatatgaaggagatgaaattacaacagcagtgatgcgagtagtgaaaaatgttgggaggcaactggaattgagacccaagcaaacaatacttacctgcattaacaatgacgagtatttgtctgcagcagaattatcagacaaaggcaaagggtgcatggaggactgttttactgtagaccacttaaaagctgaagtaaaagagttgaggtggatgtacccagacgattgcaaaacctgggaaggaaaaaccatactatttagcacaataggaagcaggggtgacatcgaaccatatattgcatgggctcaattgataagggaagttgggtcagaatgcaaatttttggtgcccatggattacgtgagctacgtgaacagttatgggtttgaagcaatggggttacaagtcaactccaaggaattgattgacacctgcataagcgctgaatgccacaaatggaacccattaaaattgtatcaggtttggaaaagaatgttcgaattaatagaagggttgttcaaattcaatcaaagcaaactaatggcgttcgtagccaatgccaacatggtaatagaaacacccttcacacacataggcgtgcaaatagcacaaaaactgaagataccttgcttgttcagtactgcctacccgtgggagcaacaggccggcatgacaaccagagcagatggaatgactatcacagagattattgccggggttgccgcatttgcaccgtttaaaaaacacatcgagacgtggaggagggaaatattgcaattacacaatgaacgcggaataatggttcacggggttggaaatcccatggtgtatttgcatccagcacaaacaaaatggtggaaaacagccaaaacttcgggatgtgtaggttatgcaagcacggtggtcgagtcaataaaacaaacggatatagatttatgtgcctgggctggctcatctatgagcctggcagtctgtttcggctccatgaccggtacagccagaatatctctgacagaccaaattattgacaagttcataagtgagtttaacatagtagtagtggactctgagtaccaaaccaaccgacctgatgatgaggttatagttgtcaatgaggccaattacaacatgctgttcagttgtgtcgatgtagtggtaacacatggtggcagtggcacagtgcacaacgcactacgaaaagaatgtgttgtgatagtggagccacactttggcgatcaattagcctggcttaaatcaatacaatctcacaattgtggaggtaggctgagtgaaattttggacatgccactacaggaggcgatgggtaggattgatcaatggagtgtgcacgccaaacagttaggtacaacactgcgcagtgaggatttcagggttaatttaatatccaatagtgcattgatctggcacaaagcatctgaacatactactaaattattggcaaacatacgagagccaattaatgaactgccaattaatccaaacaatgtggtgagcgtattacaaggccgcaaactgaagtggagtgattgggaaactgaagaaacattaaatatttccatgctaatgcaaaccagcaacaaacatcaaaacatcccacaaacgaaacaagcaccagacaaagacattcaaaaagccaaaggtccaacaaaaacgagcaggactagtaagaaccacaaggagaaaaaatatgaattcaattacaccattagcgaaagtgaagagctggcaatgaaaacatccaagcacgctcccaagcaagttacatcggtacccgcagactcaacaggtaatgaactggcgttatcaaatccagtaaaacaaatgttggaccagtttgtaggcgtcgaggttaccagattgtcagaaagtgtaacatttatacaaacaggtaaagcttggacgaaagaccagttaagcgcaggccatgacaccccaatcacaaggaccattaccagtgaaccaatcatagaattgcctgatgaaacaacacaagagctaatagcaccgagccggccaaaagaacccagcactcttgtagtgcaagaagtagagtcatgtgacgccaacaccaaagatggggaagtgcaaccagcgttacaacacacagagtcaacgccaatagtaatagaaatgcaggatgagcaagaacagcaatcagctgcaaatgtgtcactgacaaccactgagacaataacaattaaaactttgaattcgagtgttacaaccgattatcaagaaagtatacaaccaattccgtacgagtacgtcagtattgccacattgcgaccaacattgatacagaacatgttccacttgaaatcaacacaggagcggggaaccccagtagaggtgataagcacagtgaaggttgaaattgtgcatgagccgcaagggggttacagctgcgccagagaggtgttggaaaaattgctgaccatacagtatgaaattgatgagcaccaggcaagtagtgtgttaaaaaaatgttaccaatggttgcaaatcatcacactgccaagattggaagacattaaagcactaatcacagttctagatttgaaagcagcaattcagttggcaaataacgcaatacattatgaacacaatggacccgagggtaatacaggatatgttatacaaataaccgggggtactgctgttggacactgtaggttgttgtttgttgagttcggcgaaaccagggaactcacaatgcctaaatgtacacaaatgacaatcagccaaagtgtgcaagatgaactaaatgctataattgcacgattgggatgtgagcaaaagtggaatgaagtaaacataccctcactagtggtgggtgaggcatcagaaggagacatttggtcaaaattggacaccacatatacgcatgccgagttgatctacaaattggaaggaagcaagttagtacacacagcagacagaatggaccgtccaatgtcaagggtaacatgccgacaaagtagttcagtattaatttgtgatgaagtgttgaccccagaccgctggtattgggtgactgatggtacagggtggagaggagcaatatgcacaaagattcatggccaaattatgctattaactaacagcaattactataagtggaaagagcatgtggtagtgctgaggactgacatcaaaattggactaaaccccaaagttccacaaaaggtgcaactcaaaaagaagattgtaaccacaggagattcaaaggtcacggctctaaatcgtagcaccttgtatgagtcacaacagcattattatggggtggttataacaggcattaaggaagaaggcgcagatcttgtcgctgtgtatgattacgacaacagaccccatcataaatacgacgatagagattttttggcgtccatggggccaagcaaatctgtaggtcttgggtttgacttgacagggcaactctgggatgtcctgatgaatcgggacaaagccttgagacatatgctgcacaaaggacaacataaagttgcatttgagttttctaaccaacctcaagtgaaaacacttgtgaaagttttgcggaacagcaaaattaaacatatcattgaaggcaccagcgtttatgttgaactgtcaaatttggatgaatttaaagtgagcttattggaagagtgggcaatgtacattgaaatgaaaaacggttctgcaccgcatatcgatgacgtgctcaccaggtatgatcaatgggtgcctttggctgaattcatcaaacaacactgcgataatgacaactacaaacatgtgttcgggaacgtaaatattgacaattacaaggttaaactgtcagcaggacatagacacctcacaaccaaaatatctaacatagtcaaaagtgaaatggactatgaaccaccaaacctggtccacagaaatttgtgtttgactatgaatgtaatgatcgacaaacgtgcaggaggactggaagaaccggcattctggaaatttgaacatgattttcaacacaataatatttcaaggtggtgggataatttgatcatcacaaaacctaaaaccaaatttgatgcaggtcgatttactcaaatcaacacagaagccatgataggaaacaacccaggaacaattagatcggatgactggcctaccagcactggcgtggacggcgaatcgaccaaaatgccctatctatccgtcaaggagtggacaaacgtcgaggacaatgaagcggcaacagctgagattgctgactatgacataatgagcttatgggaagacactgacttttctgattggaatgaaaaattcggaccgaagaacgaagtcatagtgagatccacaaatccaaccaccaacctgagagttacaactaaatacactatggtgcaataccccatatacagtagaccggtgctaaccaaagcagccaaccaagagtttaatgcagtcacaggtaggttacacaacataaccacttaccgtcgccaacattataacgtaagagctgaattaaacaaatttatcaaaacttattttgacgaagggaaaattgacacattgcggttatttgcaaacgataaattgacttacaatgatgccaaggtactcgattggttgcgagaccggccagacagtaacaaagtagcagaagaagtagaaactatcctgcaagagggaatgcagttgcattcaataaacagattgaacgtacacctcaagctggagtcattgctcaaggctgaaccggcttcaagtttaaagcaggtaaaggccagggcactactgtggcagtgcaaaggttactgtgcaatatttagtcacatatttaaagaagcaaaggccagactaaagcaattgctaaaaccgaccattgtgtatgcggacggattgcgtgccgacgagttgtctgcccgtgtgcgactcacaactaacgtgcgttacttgatggaaaatgatttggcacagcaagacaaacagacagatcacgacattataaagtttgaaatggagttatatagattattgggagtgcatgatgacgtgataaatttgtggcacaatagccattttcattggaaatacaaatcaagaacagtaaagggggctggtgacgcaatgcgtttaacagggcaagccaccacagcactaggaaatgccatcactaatttgctagtgcacagaaaagtagttgacaaactgggcagcagcttgaggctgtttttggtgctgggcgacgatggactaatgtttacaagtgaaaaaatagatttgagcaaactaaacaatgaaaccaaaataaagcacaacatgatgtgcaaaccacacattagtgagacatttggagtgttctgctgcatgatggcgtgtataatgcaagatggcagttgctctttaggaccagacattgtgcggctacgcagacggttcgaatgtccgaacggcgttagtgaaatgacggcagagaatgcaaccgcaagagcaatgtcttattacatgatgttgggggcaacaccagaagtggtgagagatgttgtcagccaacaattgcccatcaaaccaactaaatggtatgatgtagactccataaggtccgcggtggcagacaagtacaatatgagtgatgaacaagttttgaatgaggaaaggcaattgctgcaaatgttgcgagaacgcaacagcttcaaacataacatattgcattggtatgaaggtgtttagtaataaatagtttgagtttttgggaggggagggccccccccccc

SEQ ID NO: 866 - DNA, 16272 bp, Carteria obtusa associated endorna-like virus
  source 1..16272: mol_type = other DNA
tcctaaccaacatgcaaaacaaaataacagataataaaggacttaaacgcgcccaccaaagcggtgggcgcagcgagagccgcaaacgtggctctcgcaacgaaagggatagtggaaaaaattgtattctcactacgcacagtaatccattgattatcaaacgtgccaccatcccttacaaaatagctggggctcctctctgcataacaagagacagggccttagctctaaacagagaatacatacatgctgattgtgtgccaaccgtgtcctacgagatatcttatcacgatggacctaatgattacatacaaccagtatacactaatgagtcacatgatgattggggtgacaattgccatctacaagtcaacaacttaactgtctctgcgttgagatcgctacagagggacttcattaaagtcaagaaaatagggttccaaccctatgacggggtgggtaaggtttcagacaaggaatacgttactgaaggtatgataacttccacccccaatgagaacaggttgacaacatacaaaatgttagtgcgaatgctaaaatattggaacaatttgttgaccttgctcgtcaaagaaacattgaccaattttgtggcaaacggtcaagacagcaattgcggagaaaaatattgctattgcacagcatgcaaaaaagcgagctatgaccctatgccaggggttctgcctgacatctattgtccatggtgtgacaacgatttgaggaagcgttattgtcaacttcccaatgatgtgatcgcagaacaaataaatgatgagtatttgtacgtgctcggcaatgagctcgaaaatttggcggcagtgctccatttggacacaagcgatataatagccaacgccgagatgagggccaaaatagtggcacatgatttggaaaaactgaaatcacaacatggaaaatctccaataaggacaataagggtgagacccggaatgaatgatgaacaaaacaggaggttgagggaaatattcattaattatcacatgatttatggccaccaacccatcacctccacggcgtacaccgagaatgaggcagaatgcatgttgtacaaagccgttttggcaatgcaacactcagaagatgtcgggtgtataaatttcaatgtcggaagatacaacccaaagttggtggaaaatttcaaattgggcccagcagaacacaccatcatgatcaatcccacatgggatcaattaaacaatttgcaaccaatggtgaaacgattcgttttaatcactaggaaacccgtcccattaacagaagacactatgcagttgcccctaaatcaaggagaagtgttgtgcataaacaacaggatacatgtcacaaaaccgggcctgactgaggtggaagtttacgagaaagatttggcagaggcaatggaaaagtccacaatagacataggttcagagacttattttaacatcaaagtccacgtaggtgaaatttacaacttaaacgttttagtaaaaagtcaatttgtccaaatggacgtcccgtatgtcaccactgaagaccaaacgcaagaaatagaaatcccggtgttcaatgacaaggcctttttgggtttattcggagtgccacttatcacgtcatctaggtgcaaggtgcattccaaactgttaaaacttttggttacacgcaatttatcaggggaattgagtttcgacgctctactgcagatgggcactgccgttgccaacagcagatatagcaagagtaattacaccatctccaactacgacatcacagcaaaagacatagcccatcatgcttatatagcaaaaatattgaacttcagaacacagtataaattcatggcaatagaattgctagaaactgccccgaaatggcaggggctattaatgtccatagggaacaccataatcaagtttgtggcaacacaatacacaggaaccatagctgggaccatagacagattcttgagagattgggaaattcctgctatacaattacaagcctatttggaacatgaatgctgggacaaattgcatgaacaatacgttcacggaaaacttaaaaactttccagaaaccataaagccaatcagcaatttcaatgaatacgatgatgaatatcattacaccccgttacctgaggtgaccgtcatcgaattcgagactgattcacaagaaaataaaccgggtagaacagcacacaaacaagcggaaccgttcaaagcaacaagaaacccggaaagcgtaataaccacacaaatgcaaactttaaacgccgatgaagcagaaatagagagttacaaatcaaaactggaaaaagacaggatcgataggctcatgaagatgcaagaggctgacaatgacgcactatctgtggaagaacaagcagccgcggcataccggaattacactgaagcccaattagccagcaacccaatcgacaatgattacattacaacagcaacagaaccaccagagggggaagagacagtggacgatgtgattgatgagaattgggttttagcaaacacccaggaagattttgcaaactatttcttaaccaggaaaccatcagagaaaccagtgctacaagatcaaatttatatacctaatgcatcaagggggatcgtcatgaggctacttgactctaagtgccaaggattagatctcaagccggaagaacattttgtgaacgtcttcaacttccgtgaggctaaatatgctcatgacttgactgaaggggaaaacaacacctgtggactgcaagtggtaaatgacgttttcaaccgaagattaacaccaacagacatcagaaattacggtggcaccgtgcctgtgagtcaggccaccatgatgactgtagccgagaaacttggtgaaaacctgctaattctggaccctgagaaaatcactttgtgccattacaacatggactctgactattactatgtcactaaattgctaatcgacacaacacttatggcaaggtggaaagaatcaaaggataaagagaaaggcacacctccgatgggccattgggtaatagcaactggaaagctcaaattagctttctatgtgccaaccttggtcccaatgttggatgaaggcgaattgatggatgagttcaaaaataaacacaactctatcgaccaatcggacactgattcgataataaccagagaccacttggcaaccatggtagagattcaaaaagaacagagccacttaggacaaacactggatgctgcaagagggttcaatgtgataccaatccaaaatgtgaccacacttgtaaccccaagtttgttcaggtccaacaaaggtaggccagaaaaattggacttaaatcaccatgtgccaagtggtgccataaaatacgccaaattattaaacgcgaacagttctttggaggaaattaaagaactgctgctccaaagctataacgtgccagacaccttgcctgctgacccaagagacgcaatgaccaataggtatgtggaatgcatcaaaattgtggtcagacaatggtaccactggagcttaccggccaattatagatcaacaataagcacacattccacaaaactaatgcgacatggcaattattacaatttgactgtgccagattccattaaaagcggggacataatctatttgaaatcgagcataggcaaacaccgaatggtggtgaacacagccaaaccaggattggtgagaatacggatgagggccgcagagcaatccattacggtgcaaatgagcacctttagagaaagtgcctcctctgcactcagggaaatgaaagccatagggagtcacaaacactgttggctacactatctacaccttttgcagaccgcaaaaaccacattgggtgtgcccggttgtggaaaaaccaccaccatcgtggaaacatccgatgctgacacaaccatagtcaccaaaaccagggaaaaccgatttaacctcgtgtcattaggcacacatggcaccgtaaagtccatggaacaggctgccatagacaaagtgagaaccaaatccctgactgtagatgaatgcaccatgtgtgactggatgcaactgtattacatgataacggaagatgtcaaatcaatgaccctttttggtgatacctgccaaatcggatcgatagacatgaacccgagcccaggggtacgatacgttaaaccagtgcatgaattcacaccacaaacagagtatttgaccaaatcgtacaggattgggtacccattggctgaaactttgaaaaacgttatcaaggggttccaagggacacaagaccacaaaacgactgtggaagtgatcgacatggaagtaatggatttgcaagagataaggcaattggtcgaattgaaacacccagatttggtgctgtgccattaccaagaaacaaaacgaatactaaaacagatcctaatgaacatccaagtggaaacaatccactctttccaagggggtcagcgcaacaacgtgctggtcatccaaatcggagttagacccgtgggaattcatttggacagtaagtataacatcagtgcagccacgagggctgtgaacaatttgacatgggtctccataaataccatgcccgggcacacactgaccgccaaaatactaggcggcatatttgggggcacaattaaatcaggattgctaaagaaatttttgatcgataatgcgttcaataatttcatgaacagcaacttgggggagggagaaaaattcaggctggaagaggtcacaatggaccaaaacacaaaaacttatgcaatagaagtggaaaaagaactcatcaggatcacatacgatgcgaacaccatggaattcgtagatgcacacataccagaaccactcaccaacaaaactgatttacagagagtgaagcaagctcatgaacaaaatgtgacgagattcaataggctagccaaagatggcatttccacattcagcggggaaaaaactatcgaagttggcaagggcaccgaggaaaaattgtacaaaattttgtttgaaccattcgatcaaggcaagtacggaattgtcaccaacttcgtggtggacacaactattgacgcagtcaccggaactttaactaggtacgacgcgcaatttcagatcaagacgtacgtgtggagcttaagtatatcacctggaagtgaagcctgggtattaacagcattaattgacgaaagtggtttaacagcagtgtacaaaaaccagttcgatgaaatacacgatgcgctgaccaataatttcaaaaccatccttggagatgacggaaatgcagttattacccgggatcctgtgagagtgagatccagcccatcaattctcaaaactttgaaggtcaatttcgggttcccatgggtaaaacggtacacactccaagaggcaaagcaaacaatcacaaagacagaacctgcaccaaacgaagatcatgaggaagagttttacaatgcctcggagcaatttggttcaccagagagtgtgactgttgaccctgaagccaaaagggggacggaccccaataacccgtttggactcacaaatccggaaaaattaaatcaaatgatattgaaagccagatctaacataattaccgccatcaaggctgagaaaaatgtagcaacgactgttacggaagatgactatggaaacttctacgtaacaggtagcagaatgggggttcaagtgtccgtcatcaccaacaaatgcggagaattaaaggatgttgaacttaacaaggcagcaaaaatgttgaccacaaaagataaagtcataacacaatttaacgttaaaaagatacaatatgaggaaatggcaacattgctacacaaaacatacaaccaaattgagattgagttggaaaatttacaggaaaaaggagggacacatggtaaaatctcgatcgtaaaaattcatgacataaattcaatagattccaacaagtctagaaaatacttaatcgcaaagaacaaccaaaattgcgtgctcttccaaattgacaagttgattcacatgcaagttgtaactggcatgcaacaaattgactcattggattgtgatgaatcaacaaaagcccagatcaaatccgccatagcgcaaaccactgtaaggaaaaccaatgttgtcaaaaaggaattgtgggaaataaaaccaaacattaagaacttgggggcgaggtggaaagggttaatatatgaaatgttgaaatgcataaccgagcaacaagaaattttggaccaaatgatagaagcaacccttcaaagtatggccttccaaactggttcacctgactggaaaacttttgagggatggattcgaaaccaagtctctttagaagcaacagggttgatcacaaggcaactcataatacacacaaccatgtctaaacctagcacaactgaagtggcaataatgcaagagctcaaaagcatagcacaaaactacaaacaaagtgtggacaaaatcaacgtgcgagcagaagaactaacagagaaattattttctcttagctttgaagagacaaatctccacatcaaaatgactgatgaggaagcgaggcgaaaggtcttaaacgatatattaaaaacaaacgtaaaaactttaaatatccaaaataggtacgactgtatattgataccatccatcgacggtcaattgtacatcaattttgggaacgtgggcacggccttcgtaaaacatgtcgacaagatccaaactattgtcggtaatgtcccactagttgaagacatcgggaaaatgatccatgacacggaaggcagatacaatttggaactggggggggcaatgaaaaagcaggccaaatccaggtttgaccgggacaagttgcccttgaaaccagccaaagaacgcatcacaccggaagagaatgctgacatgatgactgacagtctgacgcaaaactacatagtccgctccaagcccaacaacaagaacccgttcgcaagacagatgaccacaagagaaataaagctgtcagcctggcggaaaatgcagaaactccaggacctattatctacaaaccaagtgcagggccacatgaaggaaaaactggaaaaaatcgacaatttcgcacgtagacactataaaaaaggatttgagaatgggtacacgaagttgagatacatcctcagtaaacggagatatgaaatatacacttggaaaacggcagaatacgaagtaatatgcatagataaatcccacaacagtgcatccatcaacttcttacaaaatggggaagtaatcattcatgacccggaggacattctacaagtggacaacgtgattgagcaaattaggctcatagattgggacagttcagagccataccaatacgacttgaggaccttggacatatcattgccgggaaatctgtggttaataggggaattcgtggtgagaatgaatgcatacagcactgaggcaattttcctatacaaaggcacaaatgtgagaatggtaaacctgcacggttgcggaccttgcattgcaatagcttttttgagcacctatgggagtgtttatataacttccggatatgatcgatattttatgagacacattgaaacattatgtgatccgggatttgaaagaagtctaatgaacctgataatgaaaggaaaagatccagatatagaattcccaataccgttgaacaacttcccaagaatgcttgaagccggaatagacagggtagtaaacactacaaattactttgtcgaaatactcaaggactcgttgggtttgcctcacaaaccgtgggaagggttaaacatgcaccacgagcaaaacataaaggaaatggaaatcaaagtgcaacacctagaatccaaagggttgaagccacaacatagcaaatggtcacccatcaacttctgcaacatcaagtcggcaccgctgtacacggtagactacaaatatgcatgcattctgaatgcgaaactgcagccgatgttgttcaaattggatcacatgaatgattggatgaggcttcaatatgaagtaaacgaaatcatatacacaaggtggtactctaacttcctgaaatttgccttcgggtgggtgggagccagagacggcgtaatacctgcagaatgcataatgtctattgatcagcacaaaaggcacaacacagtggtttatcaaaaagctatggaattggcaaaccaagtggcaagtcagtctttcaggatgcctataagcatcactataagtggacaactagatcaggaaaattttctattgttaacagaaatgctgccaaccataaccgtcgtgaggcatgaaaaactgtgccgagaaaccatggaggagatactgctgtatatagcaataatgaacaaaaacacatttgacagtagaaacatcaagctggatgtggtaacaacaaacccagcattctcaataatgaactctttcatgcaaatacgctcactaccccccaaaaattttgaagggttagcccattatgacgttatgacacatgaagccagatctgcaatagccgagtacagacacgttctcgagggatctagggagagctggaaggtctcaaaaagggaaaccatggaagcattagtctatgaacttgacaaacaattaactggccagcagatttggtatggaataaatctgaaacaagataaaacccgtgatctgatacattcttatcggtgcacaaccgacttggatgtggatggttgggataaaacagagaaaaccatgtacatattgccaataattgacaacaatcttttcagaatcatagcccaagatgagaaaaacttgataatttcggaagcatggtcatcaagaccaatcaaggtgtcgaaatggttaatcaatctgatcaacaacccgattgacattaaaaaccagatttatgtgaaaaccatacaacacctaggggcaggaatgttgtacgaaatgaacccattaattgagagcattgttgtgtcaccaacattgacaaacgaccaggtgatgcaaacctgcttagtaccagtgattaaccccaacaccctaagttggccagtgacgggatttttcgaactgaaagaggtacgtatggacacccggttggctggagcttgtgccaggaggatgtgcttggaagatccaacaatacacgacctcattgcttacgcaagaacagagttaaattcgacttattacggacacgtgggaatttggtcaaaacataaggagacggtggatacagctgtaaacactgcaatagccgtgtacctaaaattcaaacccataatttgcaacttgaggaaaaccgcagatttcctcacggaaggaagcaagaccctcttgggtttggttaaccacaacatgaaggaggtgttgttgagccttgcaacagtggcaatcaaacacgtaggtttagacatagggacatcagagatctttgacgaaattgccaaattattcacaaatggtaacgaaattcaggggaagatatcagaattcttcgaattagcgagggacatgactatggaaatagccccaaggaaaagaaagctaatgatatacgaaccaacggaagcgaatgttatcatgcatgacaattatgaaaaatgtcacaggagactgcaaagcaccatagcaaaagtcaaatcactaagtaatgaatgcatcaacaacagactgatgacagggataatgcgattcaaagacaccatggatcctcattatgatgaagaggcggcaggacccgcaactaattcgggctccattttcgtggagaatgccaacaagcagagactcgcacaatgggttgaatggggaaaatcattggtcgaagacgcgggacacgttccaagacgtagacaaggtaaaatgacaacggcaacccttgatcaaccgggttcctccaagcccgaagcgaccaaaggaacaaaagaacccggaaaaccaatgaccgcgaaaatgcaagccaaaaccattattaggaatcaggaagatagagggagacaaaacgcactagaaacagagccaaaccccagacttaaacccgcaaaattaacagtgtctgaattgtgggagagaatacctgaaattgaagaattcaacacggttcaaacgctgccccagaccaaaacaccaaaaatagaaccagaaccagaaccaagtacaaaccttacaccccccgaaaccgaaggagggatcaatcaaaaattgaaaccaaaaactgtgagatttgaacccgaagtaaaaaccatcaccgaagaagaggctgccaaatggcttaaagaggccggcaaagatatggcaggaaacctcaccgtggaaatggataaagagagccaggtgaaaaagcataagacaactcggagcgtagaaaaggaattcttacctacagagacagtggaatcactgaaacacaccatgaaagtcgaagctgaaagaagcagaactaatcaacaagatgaacaagcgggaagagcatggctaatcccacatgaagaggctttaaaaaatcaaccaaaagaagtggccacggtaggccaattaatattcgagcaactcgagcgggaaagagaatcagccgtcaaagtggaaaatgagaagcgagaccagcctgaagccacagaaccggtagcgaatgcacgagcgatcatgttaacacccactaattgtatcttggtagcatcgcatttagaattgatgaccaaaaactggctagtggcaattcatgaaaaatttgggttgcaaataatcaagcaatacataagttcaaatgatgaactcgaaaatggcaagcccaaccccagacatctggagaatctcatgtcagcaatggaaaaacaattcacaagttggtacgtcaacaaaaagaaacaccacgaaatggattcaagcgaggaggacatgaaggccctcaagtatgttgtttgttctgaattggacgtcaaagtgattgaaactgcaaagaggttgggtttagaggtaataaccatcaggaaccatgacatagccagtggtgaaaactacaacaacaactgggagaactgggtgaacttcaatcgagagcgggacgtggaccaaataagttttaaaagaatgattgtgcacccaatggaccctgccttatccatgggattggctggtgaggaagtgtcaaagccgcagagaccaacagtgtttggtcatgataccatgcacactctggaacctcacggacacttgtcaaccatcccaggactcatgatgggtccgttaatagatcaagaagtgtcaatctcaaaacaaagtaattatcgcttctacgccacatacaaggactatggattcaaagaaacagatgtggggatgggggattgcaaatatgcgttggcatctttagaccaacccggtgccatcagatcccaacttgaaagccagactctagtgaccaacaagggccaaagtgttgaggtgtacagaaatggaagtccaaacaaagaaggtgaaaattcagataacgtggacaacacatttaccgtcagcagaatgaactggcgcctggcggaattcgagccagaggaaataactctggcgggaaaaataaccaccaccaatagtctgcaagagatgtggcaacaactggtgcatgaccttccacctggagaattaaaagaaaatcaagaaatagtcacatctgaaaaaccatccagactttcagtaacttccgtaataacactagggactgagggtgatttcagaatcgccaatcaattggtgcgcgaacttttaacaataggcttggacgtaacgttaatattacccagcacaatgataccgttgatacctggagactacaagttcatctgctactacgcagatataaatggattaactgatttcaaaaacaagaggaggcaacacacagctctgaacgaaatgataagcggcatggaagagagagttctgaaccaaataaaacaaagtgatctaattttcacattagaacaagctgtgtttggaaaatacctggcagcagcgtatgaaaaacctttcattgtgtttggaaacgtggggccttttaaatctgacccaattatatatcaaaaggaccctgatgtgaaaactgggtttgtgaccgccatggaggagagattcatgaaagcggtgataaaggcgagggtaaattctaggtgtggttccaaactagcttacttgagcgaacatgcacccataggcaaaatactctacaaatttccttgggttcaagtacaacaagggaaatccgtgttactggaaatggcagacaacgtctcaaaagatgagcaacgaatagaatttgtgtgccaagagtacaagaatttgataacaaagttacaatccatgacggacagaaaggtggcgctgatagtgttatcaactggtgtgggcaattctgatcccgaggaaaagaaagctgtcatcaaaaccttaatcaaagagaaatttgtaattgtgatcgtggacaaaaacgtaatctccagtgacagcggagactgtgtccaggcttacaacgcagaaatactgccatttgtgactgtgtgcatcaaccacggtggaccaggcacagtgatgacgtttgtgaaagcaaaaataccccaatacatcatgccaaaagaaatagaccaacacttctgggctgagatcattcagaaagaaggtttcggagcaagcagcaaaaagacggcagtggaagaattccttaagaaaatgcccaaatacaaggacaatctacgaagcctccaaatactcgataatgcagagatagcaactagcaacgtgaccaaattggaacacgaagtgctgtgtttgcacgaagattacactacagaggttgtaccttactataacggtgtgcaaaacacaatcatcacagaaaaatatgcccaaatggaacccagtaatgcgtcgtgcaccttgaaagtaacagggttgaccacgatatacgacccacccacacacggattgtgtgttcaggaatgcattctggaagcaatacaatgcaagactgaagaagccacggcaattttaagaaatttggtcaccagcgaaaacaacatgatgtatgaaataaccaagtggccctacctgttgggaataaacatggttataatcgtggatgggaaagccaattatttcaaagccaatactaactcttcacaatgcatcaccttgaacatcagcaaagttgcaacacattaccattgcactttgtgcagaagaggccaaactacatgtgaaaacgtaagaacttacgggaaaagcaaagatctgtatagtgacaaggccataatcaacaataggttggaaatacaaaacaccctaacgcgatccgcggaaagcttgtcaactaaacaagaaattaacattgccatgatgaagaccctaataaaaacaggcaaaattaaaaaaccgtgtctggataaggaaatgctggaaactaacatgcaaacagcactcgcaaaagtcaatatacaccataccatacaaagacaaccaaacaggatgttaaaggttaaaataatgacatttgaaacgtattatgaagtgaaggaaagactgatcacaggcaagttgtattgtctttttggtgtaaatggcaacaaccagttgtgtgtggccatgctagatttagaaggcaagcaaatcctgatgcctggagaagactcaatagaaccatcaggttggatcatggccgtaggttacaacttaaaaactgccactaggaaaaagattgttaggtcggccacttaccaagctataaacgcaatgacatccaaatactgcgctgaccaaagtctatgtcaatgctccccagaaacaaacgcggaacaactggtcatcgctacatttgacaatagatggcaccacaaatatgatgagagggccacagtcaagaagtttgactatgaaaatgtgtatttcgtgccaagacaaatcggccacaccatgctagaagccattaaaagatccttccccagaatatcttatgaatacggaatgaccaggctgcacatcgacatgactccagaatacttaagcaaatggttcatcaaaggtgaacttcaattgggcgagttaacaatgacgcgcacaaaattcggttatatgtctgaaggtgtaacagatagcgagggggatcagaaaatcctgagagccgcaacagaaatgcaacaatacttcatactaaatgggaacgaatatgaatacaaattcgacagcacaccacccaaccaaatatcgataataggcaccaatggcgagaagattgacctagaggttaccacaatggaaatatcctggaagatcaatctaggaaagttggagaaggaaataacaatgatcaacaagcaatatgtgtcaaaaactggcccaagagtgttcgtcacaaaaatggtgggaggggccgacatgtggttcaatgctgaaggtgaacctgacaggactgccttccatataggccaattcagaaaagccctgatagaccaaatagggttccgagatgacttgatctccaggccacaagttgacagagtgctgggaacaaaattaaacaactcatatgccatcctgtccagtcaagccagttcatcggaccaatgggactcatcaggtaaaaccacagaaccgggaccggtggagaaattccatggtagaatagaaccaagtataaatgacatcactcatgcagagacagggggaaacgatgatttagcctgggaaaacatgatcttctgggttgacagagagtacatcaatgcggtgaaattcgccccaactcaaccaacaatgattaaagccaaagaaacggccatgaggttaatgaccacatggaaaacaacgacaaccgaattccctcagaggacacgaccagtgttcaacaaaatggtaaatgccgaattcaacgccattaccggtagactgggatcatcagtcaaaatgagaactgtacaaatggaaccaaagcatgaaatcacaaaattagcagacacttacttccagccaggttgggaaaccaagaccaccgaaatgagaaagcacatgctaaacatagacccaaaagccatgagagaatggttggtgggcagacctggccaattaactgtggcaaatgacataatcaaaatattggacgagggaatgtcaatccacccgattaacgaggttaaaatacactcaaaactagaatcattgttaaaaagtactgccatattcaccctaggttaccagcaggccagagccatagtctggcaaagaaaaggcatagccatgcttttcagccacatgttcaagcaactcaaggacaggcttaaatctctcctgaaaccggaggtcgtatacgcagatggtttaacaccatccgaactcggtagaagagtaagattggtgcgcgggtgccaaagcgtgatagaggatgacctggctcaacaagacaggcagacggaccatcaactattagattgcgagatggaattatacaaactaatgggtgccaacccattaaccatagacttgtggaggacctgccacaaccattggaggtacagagcgacttattactcagggtcattcgacgccatgagattaacagggcaagcaacaacagcactgggcaatgtcataacaaacatgatatgccatagagagttaatagaaaataatatcacatcaatgctattagtgttgatgctaggggatgataacctaatgatgaccaaagagcatgtcaacacagaaggttttgaagaaagaatgaaaataaggtgcaatatgcagtgctccatccaacaaagcaaagaagtcggtgtgtttctccaaatgttagtgtatgccacaacaagtggatgggatgtgtgccccaactatgtccgactcaaaaatagatatgaagtgaccagtggggtaagcgaagccacaatggatgtaatgaactctcggaggatggcatactgttgtatgctggggggcaacgaccgagtggacgccatatggaagaactgtgggggatcaggcaaagttccgaagtggtacaatcagcaacaagccatgattgctacagctcaacgcaataaatgcaccatagaagaatcattaaggaattacaacagactgttgacaatgatggagtcgaaaatgcagtttgaatacgaattcaagcattggacatggtcaaaattcagatagtttaagtccgcgggggggagcaacaagcgatcagccc

SEQ ID NO: 867 - DNA, 21587 bp, Ceratobasidium endornavirus 1
  source 1..21587: mol_type = other DNA
tgaatcaggaaataacaccaacccactcattcttcaacgaagaattaaacacacacacacacacacaaaccgcaccagtgaattctggtgcggttacgcgtgtagcgggtttactaaatggtaacttgactacacgcgatggatccttttcccttacgggcactggatccacaaaacaaattactcaatttaacgagcacggaccttctattaataaaggtaaaggctccttacaaattggtaatgcacttgttgctaattcgacaagttccacatctatgtctgttagtggtgacgacaaaatcatcacaacaacagttaaatctacaatcaaagattctgacggcaaacgtgagtacacaactaatgtgtccaaaacagtaaaagttgatggatacgcacgatatgagggtgtgcgcacgcagaaagatcatgtccttagcaacaaagaacgcaaacaatacaaacacatggtcctccacctgcaatcccaagctattaagactgcatcaaagaataaacgttatgctgatgttggcgttggtaaaaacaaagaaacacacgtttatcatttgaatgtctccgctagagtagccatgcgagctcttgcgcttgtcatgcacacagataaggcgatcggcactgacaacctcatcaggtcactcaatgatgcatttgaagacgccaatgccggagaccaatctgccttggctgagcttgctttcaagtaccaaaattggacaaatcagtctttggcaactcgtgagagtatcgcttcgcactacaataaggtcaatattaaggcgccgaaatcttccgggcgctttaatatgcaaaatgctaggcgacccaagaaaaacaaacggtcatccaatgtgcatgtagcagccgtaaccaatacaatcattggcaatcgctatacgcaccacaatgcatccatgattggtgttgtcagcgaactcactaaatgtggtttcattgacttcgcaacacgagcataccagtacaacgtgttatctgtcgccacttaccaaatgtccagcatgattcatgagcaagtggctgcaccttgcacacaaacggatcatgctcatttggaacgcaaaccaaagattaagaaggctacacccacaaacattaaacgcacccacaaagaggtacaccccattaaatcggatcaagcttacattgatcatgtgaaaaagcaacgggcaacgcaagcttgcagagcttcacgcattcttgctgcttcaggcaactttaagaatgcaacaactcaaacaatcactttgctcaaagaagcaagagctgtgtaccacaacagcaatctcatgcacaagattagggtggcacgacgctcacccaagaagggcacctctaacaacactcgcactttgccgtatgaaacattgcctcgtagcaggaagtcacagtactgcttgttacgaatgaccggctacacaaaaactcgcaacccccatgatgcacaagttgcatctggaaaggttcatgtgcgcattggtagcaggaagaatgatccgatcaatcacatttcttatgaaccgttcctcggctcactggaggctgactacgattgggttaccaactcgatcatttgcgaagggaaaatatggtacaactataaattctactccagtgatgtgacaatcactaagttcacatcattgcaatcaaacatcatggtacaagacaatgtgccgcttacaatgatacctgctgcgattgcacccactgaactagagatcgagcaagggattgatcctacatctgacgccgcactcaatcaccccttgaacggatttgccaatgagcatattggttaccaagccctgcctattgcttacacagcgccgccacccaaactaaacggaacacagattgaggcttacaacacttaccagcacgaacataatgctaagaccattgggagtgcacatgatagacaggcaattgacttcgctgcatcattgtgtaatgacacccctagtttattgtcatcattcaattccactgtgcagaatatcaagctcatgtcatcattccaaggcaaccaagtcactgttactagtgagccacacgccaccaacatatcaattgttaacaccgaaaatttcaaccgattcactggacggtcagcaaccaagaaaagcaacaaaattgctccttcggtgtatgcctgcatgatcaactcactgatacatggcaatcacatacttgatgttgtcaatggtgacgtcgtcgaggttaataaacgcacgccaaacaccatcaggaacattgtcaagcacatcacttcaatgggcgcacccacattcctcgaatatgcctcccaatatgaggatgcaaacacctgccctaatgaagcgaataacatgaaatgccttggtgacaggtgccaccatgggaagggtcgatggccacacattaaatatgatgacaacaatgggttcaagttccaatgcctcccagggatgacttacaattatagagcattacctaggtataacgcacaaattgctaacagggacatacaccctggtggtgatgatgtgctcgacctggtcttagaccctagctcatggtggacttgtgccaattgtaatggaaccgtgctatactggggcacaacctacgatgatcacacattctaccaggcaaccaggaatgaagtactggctaacacattctgtccacattgtcacaatcgtgttttcgttaaaaatagtgaagtcaaccccaaccttgacggcaatgtgcatgctcctttcagaggtctcgtcaacccattgcattggattgaggaaatctatcctggatacactttatccgcatcgtcaacagcagcaccaatgattgatgatcatgatgctaggttgttaagacgcttgctatcagttggtaaaccaaaagtcatttacctaccaactgaagtgtccgaaatcaatgacattcaatcatcgtttaggactgtttctttggttcctagacctggtgccctgcatgcattcggaggtcgtgcaactgcagaattgtatgcgatggtcggcacagcaatggccaacttagagagcacgccacacatagttactgtcaatgtgcccattagcccttcatttgagcaaatgacacactcacacaattgccctgcaattgtgtgcctcaccaacttacatgccaaagatggacttgtcaccgctgccattaataaggcacctgtcatctatgtgataacgcccagttatgaaggtgaattaccaaaacgccaacttggtgagttctacttgtatgcggctgccaactctgatcaaccatacgtaatcgcgaaaggtgacagccatggtatcgaaaccaggaatgttatatccatcagtggccattattatattaactcaacgatcaagaaaggtcactacttcctgatgaatgcatttgttaggtatgatggcaacatcaaatcacttcgtgttgtcgacactgatgacaatgctgttgagtcattcaacatccctgtactggaaaaacacagtatcgggaatttgttgggttatgggtgggtaactaaagaagttaaaatacaccgtcgcttgctttctgtgcttgttcgcagggatcttcgaggtggtgacctgtcatatgacagcatgatggaggccgctattggtctcgccatgaacagatacaatctagcagacaggaccgtcaaacttattaatgtggatgctgaaacgctcgctgatcatgtgatgatcgcaacacttatgatgcgtaggttcattgacaagcatgagcagctcgtcgggcttattcgcaatgacccatcatggcgcaacatatctgaacaggttgtacatgctggggctaacgcattgataggcacattcttgcaacgtggcaatgcactggagcaatacgccaaccagctaacccgtttccacgattccgccataatatccaaagttgatgcagtgttaactgacattaggaattggactgatgtgatcgtcatgcatgacaccaagcatcatgacatgacattcacaccagattttgaaatcccaacgtgcaaccaccttatcggtcccgtgccacaaaatgcaactgattggtgcaagtgctgcctcaacaacagccacacaccaacttgctcttattgcatgcccggacaaattaacatcacggcagatttggatgatgcagagtatgcctatttgaatgaagaagccaaagctgaaatgaggaagccatacattaaggacatgcagaaaccaaaacccggccgaacgccattggacgaaccacctaagccaaacaaggaaaccgcatccaaggctatccctggcactgagcgagagaaaactttcggtattcgcggcttaagtgcatcatatcatgggcacatatgctattcatgcaaacagccctatgcacacaaagcacgcaaatctgtcggtaaaaccgaggtgttcaaaattggtgaagaacacttccaatacatgggcgactgcccctggcacgaagatggacaatattccatcaaacttatagagagcacccccgggatttacatgcccatcactgacatgctcgatcaaggcaaggacaacaaggatgatcaaatggaacttgtacagctgacatcattcgagtgggctgacacacttgctaaagggactggcaccatgtggccaaccgttttgcaagctactccattactcaagggcaccatcaagatgggcgatgttttcaagatgtcggccgagatcacttacccattcgatatcaacacatgtgggcgtgatgctatacgaaccttgtggccacacttgaccattgataaaatcgccatatgtgttggtaaacatgacagctacactcagacggacattgagagcatagctaaagagttggcacttgatattgtcgtcaacgtcgagaacgaatacacattcatgcactatggaagtggcaagaaaatcggcctgctcagattatcatccagcaccggcataccacattggcacgcgcacacctgcgaattggttaaaaccccagattgccatatgagcatgctgcccgactgcacaccagcaatgcttgaagcagcacacgcaacactccataaagaaaaatggagtatgaatgcgccgaacacaaaacgtgttataaccgaaatccgtctactcaaatcatcattagctggtaaaagcactgtcactagaccagtatactcagagcatgaggggggcgccttcattactaacaacacatctggtatgcacaacttacaagcagggcttgtgcaccttgctgtacctagggacttgagacacataatgccgtatatcaattcaacgtcacgtgaaacaatgaatgttgacgcccttgcagctagtgctgacatcgtcgaccaaattgaaggtatatatgatgaacgtatcaagcgtgtcagggaacaagtcaaaaatattgttgacgtgttcacaaccatgcagtcaagtctcgtcccttctgatatggtgacgacagtcaaaaactttacaattgtttcccctgacaaaatccgacttacattacctgaaacatatagatggaaagcccttgacgtcatctacatacggtcaggcactggttttacaccggtatgtatcaatccttactcagttggtgctgtatattactgtgatctgaacatgtctgctcctgtggctggagctatgaccattaagtaccggtcaaggatatcagtctcatcggcattcagatcactcgcaggtttgatgaaggtacctccaactatggaagagatcaaatcgacattaaaccgcagtagaggtgtccttgctcccggtggttggggaaaaaccacggagattgtaaggaacatggacaaggacagtttagttatatgttccacatcaacggcacaagaggttatcaagaacggcttacttaagggtatgatagttggcgatgaacgtatagaccccaagcctgagttggtggaatatgtttactcacttgagaaagcacaataccttgatctgcctgataaagcgaagatcatcgttgacgaggctgggatgatacggccataccaacttcttacaatgatccgaccgctatcaacgtacacattctatggtgatgacacacaggtcggttacatcgatttcacaaatctgggtggacaagcagccactaagtccatattcgattacttgccaaaacacatgatcactgtgcacaacacacagtacagagtgtcacacccactatgtgctgaaattgacaaggtacgcaatggtggatacatttatgccggcgagtatattgaaacaactgaccgtgatggcaacacaataagcgaaccaacacgcacgaccactttcgacatgactgattattcggattggtccgatctggccatatctaatctcattgccgtgggcaagtatgacaagatattggtgttccacaatgatgatattcgtgcagtggaacaagcatgcaggaaagctaaattatccgtttaccctggcatggtcaacacagtgcacagggctcaaggtggtacgtggaaacgtggtttggttctgcagcacaaataccattccggttttggtgttgaagtgtcaccccgtcattgtatgactgctgcaacacgcttccttaatcacctgagttgggtaacaatcggtatcgagaactacaagggcaaagatctacccactaggatgggtaaattgtctgcgcaaactccaggccatggttacatttctagtggcgtacgcggcattaagcgagcgttcaagagcttcaaggagtcggacatctacggcgacaaccttgaccaactgctcgacgtggcaaaaaccaatgttgaatggaggccaaaaatcgcacactctgtgaatgggtaccgcaactggtccttgtacaacgctatgatcaaaaagtacgaatccatgtatccatgcagagtgtcaattacgcaatcatctgggtatgacgtgataaccattaaggcactcgggctgaaaggcgttgtgcatgtgttccccgaacatgtccaaataatctcagatatggctggccaactgacacagaccaaaatcactgatgccatccaagagtgcagcgaaacgtcatcaactaatagctacgtcagctttgatggtctggttcccaaccatgtaaagacaaaacacttcatgcatctcacaacaaagacagaattcagactcatgcactctgcaactgttgcaatgcaggtcgcaggttctacattccgagtggacgttggtggttgcacatacttgctggctaccaccaccgtgcgcgaaccactcaacttggttttctataactctgagtgtgaatactgggtcaccaacgtgacatctgagccaactgttgtggttagcgaagacgttaccatggatgattccttcgtgaattggttaaacggtggtagctacgcatacgacatagatcaccatgaaattaatgcactcaagtggttccgtaattggtggcaagagcggtacttggagggcaagaagattgccaacatgatcaaacctatattcgatgttgacgggccattcgttgcagaaaatagcttgtactcgactgacatccagaaatcaacctataatgatctttctacagacactgatgtaactttcaatgacagcatgatggctgtcattgacatgcttggcatgccgctacctagcttaaccaatggtgcaaaaactgtcaccatgcttgttaaaaacaacaaagtcttcacagtgcccattgcagcaagcagcgtcagcttgtgtaatttgatcgtgtacaaccacattagttatctgaaactttcatggacaggcatgctgctacgaaacactgcatgggcagggcttcgacctttgcagggcaagttcatgttagatctttccaaacacgtggctgccggggatcgtactgggtcaatactcataaatgccttcggccgcgaattacttactgccgtcaggcacgaacccaaatcattggtgctttacaggcttgaggatgataaggttggcgtcaattttaggaaagaacatcaatcacaacaggtggcatacaatgtcactaccatcccaaaacaatggtcacaaatcaatgtcaacagagctgttatgcacagcctacagacctgcgtaccttcactagatgtgtttgatagtgacgccagcggggctattcaaatgtccatatggcactggcgttctcacttaacaaataccacatgtggcaaccctgagatcatgaaattgttggagcccaacatgtggaaagcactggatggtgcatgtaacatgatgtcaacatcagaagttaagaacgtgaaagaagaagcagtaaaagaagccatggaccgcacaaaagccttggcaaaagaagctgtcacttctaagcttatgagcagtgatggcctaatcactatgcaaaaacgtgctgagtcaatatgctactatccaccatactgcctcaaccaacaacctgaatcagtacatgaaacaattgtaggcaacagtattatcactttcttgccgataccagcagccagcaattggcgtgacaatggtgacggaacaactaccatctatgactcccagcaccactgcacttacaatgtgccttcgtggttgacacagctgtggcatgataaattgatgaatgtaaaaaccaatgaagtcacaataacgacgatcggtacttcagttgggcagctaattctgcacatacacattcggctgcccggtgatgaattgcgcatggtactgcaggacggtatctctgaccacttagttaccatacaagtacctatcatcaataacaacttcatggaagatttaacaaagggtcacatgcaagttacgaaaattaaggtacgagaaagcctttggagaagaattaccatgcgcttgctgcggcctgacaccacgctggctgatctgagaacggccatacgaatgctgcttaacaacaccgagtacatggtcacccatcaaagggcggttgagacggggcttgatagtgatcaaggtgcacttatcgcactcgctgcctattgcatctatcaccaaaaactcaacacaaacagagactacgttataggtctggttgagaacaccgaaacctacttaatgagatctctgaaccatgctaaacggacagccttgggcttgattggcacattgctcaaaatcatgggagccgacaaagaaccagctgccatggcaaaaatcttgggtgacgttctcaagcaagacacttctatgaaccccatatttgatgtaatcaacaattgggacaacctcacgcccaagcatcatgtggaaactatacccatcaagatgatcggcggcaagaccctaacgaccgttgtggataggtctcgcgggttccagcattccggtctctccaacctcatgttcaattatttgaggtatggacctacattatataaaagatcaaaaggtgacacgcactaccccattgccgaaggccgaccaatggctgcaacaccagcacagaatgcacaactcgcatcaaacattggtgggaatttcagcaacaccttgttagatcagatcaatgcacgcaactacagcgagctgcgtgacaacctgcgaggcaatgtgtactcaacacaacagatggtataccttgagtggctaatacgtgatttaacgttatctgagaagcgcattctcaaactactcaatgattacaaatcaacgaagatatccgacaatgtcatcattatggtgaataagctcaacaccatactgcaattgtcttacaattcgggcatcggcgctgattccaactggatacgcgacctggaatggcttacaacgaagttctcaccttccagtccgtcgtcagaggccatttaccagcgtaaccacgctttaattgaacaatgtagcaaaacagtcaacggcgcaacactccttgatgacctgagcatgtatgcggctgtctcagcattaatgtcattggcaaaattaaccggacaaacacccaagactgccaagatatggaataatttgtcaggcatgcgagttgggctagtcagcgtgggctcctatggtgacatgctaccgtttatgaacatggctggtgtgcttgcagaacaaggtgcactggtgaccatgcattgtcccgctgaagccgaaaaccaattccgccgagctggtttcctaacaaaaaccgggcagtggtcacttaaagataatcttgacctatgggatgaactcacccgggcaaaactcgacgtcgacaaaatatctaagtcactaggcactaactggatacaagggcttgacttgcaggatgaccaagacttgtggatatcatcaccaattgcacctcaaggcatagcagctgcaatatgcttctctaggccacacttctacttgtctccattgccttggcaactccaacatggcacacccaaaaccaatgttttctccactctgtctgataccggcatcatcatgatgcattccgaccacatcaataatttcatgctgagccgtaaagccaataaaactgttaaagatgtgcttttggccaagcaagtgatgatgtacacaatcgacactcgcctgaccacgatgattagtgcatactatcaaccaatttcttgtggttaccttggatggaccaaccccatcaataacaagccgattgctaagactggcaccttagtgtcattcggatcaatgactcaagggaaaggcttgaggttagcgtcacttgcaatcagagctttgatcagcacaggccacaaggtcattcattattcaaatgaaaagtacatgactgacgaaatcaaagcattagtcgccttaaaatctgttaaaatggtcaaatggaccggtgattactacaacaatctaggcaaaggttggaccgtggtgcaccacggcggtgcagggaccacgcaatccatatgctacgctggtgctaaacagctcatcatgccagttgcctatgaccagtcatactgggcgtcccaaattgacggtatttatggtcttgcatgctactccgaagaccccaatgaaattgaggcaaaactaatcaggcttgcatcaacaactttcaacaaacttgatgtcactgtggatgagatcaacacaaatgtggagactgcccttagcaaggcatttgaggccatcatgccatctgtgcaaatcctaccagtgaaatatttccactctgatgataataaatcaaatgacgccatactgcacaaggtcggcctaccaaaaattaaaaccatgcccctgttgcctgagcgtggtaccttaactccaggttattacattggtaagaacacgcaaaccctcaacgtaatgttcgacccgtacgcaccaggccgtcgcacggatacatgcggttatgacgtgattgcatgggcatccaataacaatatggctgaatttgaaaaagctgccaaagaactgggggtcaaaggtgatgtttataccgaaaatttcccaacactagggtgcatggtaaaagccaatgtatgcgttatcaccaacaacgacatacaatacaccgtctctgatcaaaggtggccaacaatatttgttagggctcaatctgggcatgcagttattgtatcaccagtacccttggtagatgtacgattcgttgatccacttaaagctgatatcacaggatttgcagcagccgagcatggtgaaccatgtgagaatggacccaacatcaagattgatgccggacacgaacataagcacatgcacactactaatgagtcattgatcaggacaatgcaagtgctgttaactatgggacggtccgcagcaattgacaaccgggcagtcgccaacacagtgctcgaggctaatgcagcagcaaaagtgctagagggcgtgaaacgaggtatcaggggtaacgattgggcctcattggcacgaggcaacggcatgctgcctgcatatggattatcacgcatatcaagcactagcgtcgatggcgtgtatgacataacgggtgaaaacgttaagccccctcaaggtatggtcctcttgcacaggcgcaatggaacaatccatgccaatacagtcattgaggggcaaatcgagggtgaaaactacactttacttattagcactgacacaacgccaccaaaccttgtgttcaatgtgcgtgctaggttattcgtcaggcagtctgattacaaatggtcggccagcgatactgcaggatatgctctgcggcatgacgttcaattggtcaacgcattattgagcacagccacaattacgactgtgcccaatgacgcaagggttggcacattgtacttatacaacgtacacaataggtggcatcatggagaaggtgaaggtagacacccactcaacaaagtcagcatgccggttaattcaatggttattgttccaggtgagaagtatgatcacgatttcatcatatcattgagaacaccgcaaattgtgagcccttcacttatcaagggcatcaaaggttacacactggactggttccaacaatcttccacacgaccgtatttagatggttacgacccatcattgtggcacgacttccctgtgagttatgacgacgatgtttaccagcgaattttcatgaagacccctgcaattagtttcgaatcccgcgcattcaaaacaattaagtcatgggccaataactgggctgcacaagtcacaggggaaggtttcccgctcaaaccatctgcttttgatgtcatcaacaacatcaattcgtttgctagtgacaggaaaggctatgtgaaatacattgatactctcgtaccaatggtatctgccgaatcggccacaactatgtctaacgttaagcattaccatgctatgccaagtgtgcagtatatggagcaagttactagggcagtatacttcaaagcacttaagagtgggtcccacactttcaaggtggaagtgtttgatgacacaaccggtgaatacattgaatccacactcgagcaatcaatcatcaccttaattgagagggatgaccagactgtcgatgttaaatttagaaatgacgcactgttggagctcattcgttcacaattaactggtttgcaaagaccacagtggagttatgcccgtgttgctggcaaccccagcgttattaaggccctacgttcaggggttagcaaatacggacgcagaggcttaacaacaattaacatcggcattggcgttccaataaccactgaagctgtggaatttggagccttgacaaaaatgattaggtctgcagtattagacttggcccaaacagacgctgccaactcgtcctacgatgatcttgattatgatgctgaccctgcagagtatgaacctcacatgcctgcagtggatgctaacaagtttagcatttctgatgcaatcatttatgcatcagccatgtcacacttcgaaaatcacggctggaaagaaacgattgacaagtatattgatgatctcgtttcttcagcgctggaaattgacatgtcaagaccagaacaaaaattcactatttctgtgggcaatgatcccagctatgacgtcttcgtttcgatggatggatccgttggacaaaactgcactatttacttcgaatgtgacaccaatgatgaggaagtagccaactcgttatatgataagtccatgttgttagtgagggcgtacatcgtatcagaaataggcacagggtccattaagtcacctagaggcctgttgcgttcaatattctattgtggtgtcaatgattccgtaccatggttatcagatgatgaaatgtgcccaggcttggatgcagaattatccacatacattttaaataaacacatgagcatgtcaccgccaattcgtagtgaagttgatgccattcaatcagaatacaaggtgttggaagttgttgacactgacaccatgttgataagcactgaagtgatgatgtcatttaacattaaagccaacatttacattggtgagaccaaaaacaacgattataacttggacatccgatatgataatagtggaaagaaggaaacgcgcacgctaactatgagcatagatgaattacttgatatattatcaagctctacacaaatccagtgccctaacggtgttaacttcaaacttcgacttgaggatgaaatggacctatccttgctacgcgaattactacctgaagaagctaacacgttgcttgttgacgatgatgttacaagtatgatggttgcacactttattacatctgacaaaaactctgatggagctgaacttcggggtttcgaaatcagtgacaagtccgttcatcatgatagaactttcacagctaatgattggcccgaggaaggacgaagtaatggattaccatacccagaggaaacgaacgagttccgcaattctgatgttgacaacatgcacggtttaaatctcacgaaagtaatggctcgggtcaatcccaacccaattcaaccagcgcatatcaccgcagtcatgttggcttctggtatattgaatatcgtcaacggttacacaagagtgagttcaaactgcgcggtgcatgacaaattgactctggaattcctgccaatggctgatacatccaagttcaactggatcaaaccacccaccatcttcgggaaacagagagaattggacatgtggtgcttggtaccattaacattaaatttctcgacaccaatccacttgtatgatggatcaagccgcatcataccgacgccacccagcagcttcaacaaatcaattagtttcacgtgtccagatgttggctacccaatgtacctgggcaatactgtgttcaatggagtgcaactatcacggaacaatctgttgcgtgccatgaatgcgggtgccgatatctacggtatggccgattacttcattatgcaacaatacatgttcgccgagagagttgaaaaagtgacagtgttgggtaactggcccgagaatgcccgcgttgttgagtgcaagaattgtgttgtgaaagttagggcacctccacatgctgttgcatccgcaccacatgttgcgatagcttcaaacacgggtaagaaacctggatatgctctacccacgactagaccatggtcaacaattgattcggacaactacgtgctacacgcggcgttctcagttttgaccatcaggggcgtagttgtaccgcgttcgaacaaattgccgcttgaggacatgtcagaaaggttatggttcaagcgttctggattccttggcgcagaaactaacgcacttggagacctactcggaatcgaaataagcaaattaacttggcgtgaattaataggacgctacacgaacggcaaactatcgtgtgtgtctcagcagtatgtaattgaatcgctggacaagattgatgagatcataactccatctgctgacggtcaagtgttactcattccaaaaatccaagggatggtcacaatgggcttccgtggtgttttagaagacaaactaacatcatttggattgccttacatggctgaggatggtgaacccgttgacgctataccaccagctaaagatgtaaggaccatgggcacaacaggtatgcaaatttcatttgagaaccaacccaagaagacaatgttcgctattggcgtaccagttgctggctggaaaacaactttagctcaagaattgccgcaaatattcgctgaccacgacgattacttggatcaagaaaaacacaggaaattgttcttagacggaaacttggatttgttgcatgcattccagaagcaggctttggtaccaaagaacaaagtgttattaacctggggcagtgagaatgtgccatcgagcagggtttaccttgggtccgttatgcatcacaaatcggcccgcgagcttaaccttccggtgccagagtatagactagagctgaatgaaataaacagaataggcctgtttaatgagaacaattacacattggtgaatagttatgatgaattcaaacaaaaatgcttaggcctggttgaggacgcactcgagggcaatcttaccgttagagagaacacaattgagctgggtgatcttgctgacattacattcagtgatattgcaattgatggatcatacggtgagtttagttccaaagatatatatttaccatacataccatgcctttcacatgatgttgtacaggacattgaacctcctgaacaagaaatgacacctcttgatttcatcaacttgtatgaagacaatgatctgactgatctggtcagagttgtggctcccatgtcagaacctttccgtaaaccggtcaggtcaactgaacatgctattcgaattattgaaacggctaaaactgtgatgaagaaatatccaatgcgcacacgacctgtacttacgaaacttatttatggcgaactaaacgcgtctatattacgcatggagtcaaaagaggtcttgaagaaaatacagtgtgaccctgaatatgaagctgatagaatggcacaattgtttttcattaaacaaaagaaatttgaaacgatatcctacaacaccgccgccactttggagtgggtaaaacaacataaaggcagcgaacaacttcaaaaagagttacgtgaattacttgaccaaggtttcttggaagtgccacttaattcagtcaaggtacaccaaaaactagaagccttgatcaagggatttccaaagaaagcaatcggccagttacgtgaacagcaggtaagaattatcgtgtcaatggcaatcgcagtcgctgcaatattcagccccgtattcatcaaagccaagaaaaatctcaagaaattattgaggcaagatgttctgtatgctgatggcctaacaccacaggaacttagcgcctatgtcaggaacattgaatatgatgatgatctcgtcttcgttgaggatgatggcaacaagcaagataagcgcactgagcatgatatgctcctaactgagatgattgtatacaagaagtatcttggtgtcgctgaacacgtggtagacctgtggtaccaggcacacaatgcgtggcggtacaaaggaacatgggtcaggggtgtctccgacgccatgcgccaaaccggccaggccacaacagccatcggcaatgtcatcgtcaacttagtggtccatacaaggcttgtggaatccattggcaatgattttgtggcaatgcttgtgctaggtgatgacaaccttatcatcagcaagagcttcatcgacccaagagcccatgaaaaagatagcaggttgcgatggaatatggtgcaggaatgtgaacagttcacaacacacggaacattcctgcaaatgatagtgggtaaagatggcaatggcaggctgcaggcgagtcctgactttatccgtcttcgcaataggtttgaagtaaccaatggtgtcagcaatgatcctgaagcaacgtttgaggccagatgcctgagttattgcatgatgttgggccaaaacgaacgtggtgagaaaatcattagaaaaatgggctatgacacaaaactaacaacatactacaatcaagttgcagcaattgagaacgttgcagcgaggcatggtgtgaatagagagttggttaagaatgagataaatgatttgtacacaatgatggagtctggaacaatgcaaactaaaacttggacccacttcacgggcaccagccgattttaacaccaggcaggtgttcatcaaccttgccttagagtcaaactccctcgtcaacacttatctgtgtgacgacaaggttgttatccctgtaaccacaacacaatcaatatttgggcctctaagacagagttcagtaactgttagattagacggacaccttcggaaacatgaaatcaggggtcagtattcaaacgcggggcattgggaccgtcaccacgttattaacgttgacaaattaactgtcaagaaagacatgaatgttcataattctaaaactattctcaatgacgattggcttgaggttgaaatcaaaagaatgaaccaagcaacaaaagaagagcaaattgatcacgtcaagagcataattcgtgcaatgggtacaacatttgtcacttttggtgattttaatgtcatgctgccgaccagatcgcccgttataacacaaccaaaaggcactattctcaaatcattagatgatctggctgatggggtttatctgactttgcatcaatctatgagaacaaggcaaatgatgctaactggtggccatgtccattacctgacaattattgacggagtgtggatgcatgatggcctttggaatgaccaaatagacaaaccaatcaagaaccgggaaacaacagtggcagtcatcaaattgaaccctgacgacataaggccaaagagtgaagtaaaaatcactgatcttggggccttccatatgaattgcttccagggcgttggtgctagattattgaacgacgatcttagaatgtctttcgacgctattatcgatgccaatgattgttacagcttctttgtgaacaatgcaacacatgtaactgaagcgttcatcgagttcgtccaggatatgcacactgatgagagcatggatgcttattatagcaacaatttcactcatcaacagttcattgactcaaagatgaacacaaaagatgttaataagaatgtgctatcgtactatttcgcgctgaatcttgccatcaaataccacagcgcaggcaggatcacggaacctatacccgcacacttgcagaaagggatgaaccttgtcatgcatgaattcccatacttgtggcctggtaattatttcaaatttgttgctgacaatgccacaaaacgtgataatgacgttaatattgacccacatggcatgtcggaattgtacagctacaacgggatgacatggacactacggaagaaaatgaccgataaggacatgaggccaatgtatccgactgtaaggggacatggtattgctagtgctcatgatggaccaaatccattgtcagagatgttacgcacacacacaaaatccgcagttaaatatattgagcagcacggcgttaacaacgacacgctctttgtgtatggtgacaaattcaacaacaatggcatcagcgggcacaactccatcataatcaagtctgatgacgatggatgtagttcatgcaacagtgacggcaacaacttcattgtaaaagttggctacaaatcgttaatttccatggcaagagtgactattgcactgtcactgaatatcagtggcctgagggtatgcatactcaacagaccgagcgatgcaaatgaacactcactgagcatgcatatgatcgaggtacagccgggtatcatttacacggcaaacaacagtaactcagggtggagccatggtgcaaccatctttgaatcaggcacagtgcactacgatgaaaacactatctattccatggccggtgattacggtacagaatcattgtacatgggtgcaaatatagtttgcattgatttatctaacaatggaaagaaagtgcaatatggcccgatgaacaatggggtcaatactgcctggatgttaggccacaccgcaactttggctggaacagggcttcagaagattaaactactgtatgaccacgtgcacatgtgggtacctgctaagttgcgtgcgttggacagaatagtgtatgcggcccaagaaacaaatgcgggtaactcttacaacatgggtgttgagggcatcaagaaagctagtgcaaaaattggttatgcacaaacaagacatatgttcaaccaattaaatgggatgattgatgtggaacgtgttaacctgacgggtgatgagaaaaagcggtctgtgcaccatctcgaatattacaataagctaaggcacacgaatgcgtcaggcatgcatagtgttgacgctagccaacatagcttcgatgagcgatcaatacactatcaaaagctcattagagctgaattggtcagcattgttagggaatggctacaatggtcaaaacccactggtgtattgtacataactgctaatgcgcaattcgtaaccaatgaacatgttattaacttgattgatggcaacaatgactggacactggaacaagctagatggaaaacacagaacgagcggctagggaaaaatgaacttagaataatttgccctaggtacaaaacatacttgcgttatttaagaatggcattgtttgacaatcaatgtgacatactcccgtacagggtatgcgtcattaatgggcaagagacaaactgtgcagagagaccgcacgtaccaaggcaaattactgatgggtaccagtatggagcgcaaggccacaatcacatggatggaaagtacactgcggcagtacgttacaacaacatgactgcggtggccgcaagccttaaatttgagtttgacaagtatggcaacgcagggcatgtgtatgggtttgacaccgttaaaggctaccacttaccacaagtcgtgccagacaatttttcacctgttgagcaatgtagaattgaggagggtgtaggatttagtggttggtacaacggcgtcattgttaacagcaatggtacctggctaatgtcccttaaggatggagtgcgtctatcattaccggtttattacccaacagcactactagagaatggcttctatttcagggcattcgaaggcatgggtagacaatctagttatatcgacaattacgggcaaaacaaagagcggtattgggttagaggaccacactgcggaattggtacgcagcccaacagcaagaccagatactccattaatatggaagcatcaatgtccagaaaccaagttgagttacgaaccaaactcatcaaagactactcaaacagaatagtcgagagaataaacagcatgaagtgcaatgtggtgtacatctccacactggtaaactccccaatgggcacgggaatagatggagcagtaatacttaacattgcagaaatgcacacaccttctttcctcaaaggcaaagtgggaggcgcagttgctaggctaatgccattgtttagtgatgaagttttaaacaaacacgtctacataaagaactgggatgaccaaaacttaacagttgacaaaatgctgtatgaaagagcaacgacaacatcatccggttattgttggggacataagtgtatggaggccgtcataataaaaccaggctacaggatggagcatgtggacaatgcgcaactagaaattgtggcaagactggccggaacatacgggttagatgaagttgtgttgaacatgatgcatggggttgcttttcaccctatatcacaccctcataacgctgatgaattcaatgcaaattgtcagacgatggttatgaacgggatacgcaagaggaggcctggcaatgccattgaaaatcagtgagcgactccgtatgagagatcgtgggacccctttacgggaccctcaagtgtcgtgtgtgc

SEQ ID NO: 868 - DNA, 18619 bp, Ceratobasidium endornavirus 2
  source 1..18619: mol_type = other DNA
cgaccaaccgaataactgaaaaatgaataaactgaatacaaacaatcaatcaacacacacctcacctcagcgccaaaatcctttccccgacgctgttgtgagtaccaatatcggggaaaggataattaaagaagtgacaaaactgagataccagtcacaacactggacggacgatgaagcggacgtttacagagttaaaggaatcaggaaaattgatggaaaggtcgaaaccgtttggcccagaaatcatgctagagaagcctcggtctcggattatctagaggaatcataccaacaaggcgtgatcgataaaccgtatgatgggagtaaaagggaaagttacattaagaagattactgaggcagacaaggtgacgcctggaacacacatccacggcagacatttgagccaagcttacacgtccattaaagttaaacggactcaacacgaagacggattacctatccaattcatcaacgaaaaagtgcctccagctgtaaagtacgttgaaattaccggtgacggtgattgttggaaagacctttacgattattgcccaaagtcattgattacaggagttggcccagattccagaatattcaaggatgctggttacctggacgcctgtgcgtacattgacgacgatggtgagaaagtaaccaacacttacagcggagtgcaaggcctcaattctccaagatatttgcaagacgttgttgcagatttgattgaatatggggagttctgggacgatgaatgtgaggataaacagacgttcaagtcagttcacaatcaacaaagactgcatttgattttagaattgaacgaaaatgataccatgcatttagtcgatttcgggttcgacgatgaaagtttgaatgacgacccagatgcatacacattacgtgagttggatctcattttgttcactccttattacattgattacgaaggtttcgaaaaatttgaaaagaagatgcaaacctggaaacctttcttctccatagatgttagaggcatggctgtcggagtgcacggagactatttattgcgcaacaactttttggacaatttagaaatagaagttgatgatgaaaatagccaaaaatacattaatgccatcacagatcacgataaccgagtaattaacaacacgtgggctaggacccaatttaagttcttgaacactgtgcgccctgaccggaaactgacggaaacggccaccaaacagatggaagacatgttaatagtaaaagcttcggattcattagaagaccccacttatcgatacttgatggacgtgtgttctgcttacgcttacttgaatactgattactcgcaaacacactatgacacggtcatttcgtcttatttacgcagacaagaatggtggaaagaacaagtcgaatccaataagattcaacctgtgttgtgttcagttgatccatcatgggacgaaatgctggatcatgacttgacatacatcatttgcccagtagtgggctccgatctatctggagatttgccttgtggcgtaggttcatacaagaaagaagttgacggcagcgtgttgtttgcgtttggaaccagcaccgtcggttacaaaatcagagattgtacaacgttcgctgaaggaaacaatatcaaaaccgtaaatgggaaaacaatcaaagtggtgagccggaaaacgttcgatgcaatgcagataatcgtcgtcacacctctcacattccaccaaatggaaattcatgaagctgaggaaagggttttcgacgtgcctgtcttgattaaccacgcattgtgggtgacaaacatgccgctgtacaaaactgtgagagtgagagtcaacaaaacgcttttgaaacgattaatcaacaaaaatcttaacggcaatgtttctgacgacttgttgatggaatacggcatggctttatcttggtacagttacaacaaacgcggagttgaagtttccaattacaagatcgatcctttagatgtcaaaacgcacgtttacttgagtaaatgcttgattagaagatccaacttgaaagatgaaatccaagccaaactcacaagtcctggttcgacagccacacttctggctgccgctgccgccatgtttgaaacaatcaatgagaagttcgatttagctaacaacaaatttgtcgacttgttgttgcaaataattgaaaagttcaaagtgccagttgtgaaatccaacgcaggagtggctgtgaaagcttgggatagcattgacacgtggacattgagcgagcatttgacgttgtctcactccggcttggacgccgcttgccgacatcacattatatgcgaaaggccttatacaggttacatgtgtattgactgtttggcctacaccgcggaggaagatagtgatttatgtttgtgttgcgataaaggtgattgccagcacgatctgactaatcaagtatctggtcaagaaaaatgtcactgttgcaagaacgacacagaaaccaatccctgcaatagttgctcattggagaaagcagaggaaccggaaaatatcgattttgaatgccatggtttggcatgttacccaagccgacctaagaacaccattgctctggacggagagtaccacgagcacacctgcatcaattgcgagtctacctatgtgcacgcacacccatataggaatttgcagcatcaccaaacgaaagccgaatgcccttattgtggcgtgaaaaagatttcgactggcatgagttttattgcgtggaccagtcatcaaaacaaaaacaacaattacaaggacagagtcgtcaaaggggacaaacctaaacccggcaaaagcgacaaaaacgccaggaaaggtggcaaaccgatgagtcaagctctgcaagaagaaaatgcatatattgagaatgtgtatggtgcgcctactgaagcgtcgcccaagggggaaaatcaagaggactccggggcagtcgatgttgaaaacgtcacggtagaggccacaggccaagaaaatcaaatgcccgtggaagagcccgttcaaaggttgcaacaaattgccgtgatgaaaaacatcaaagctgaagaattggagagtcgggctgcgccgtttgaactgccttacacggaagccgaattgatcagagcgctcccggtcaatgcagttagcaatctttacggttcgagcgaaatgttcgaacttgtttcaacgtcagactcgaaattgtcaactattccattcgttgccctcgaaccaccagtggagcccacgctaaacttttcaacgtcagaggttaccgacctcaaaggaggcgattgtggcttgcaatgcttaagacactatgtcggggcggatttttccgaagcccacgtcaaaaccgtgactggaaaaaccagaggattgacagcaaagcatttgatcgacgtactagcctactatgatttgaatgccgcaataatcgaaccaactggagtgacgttcaacagggtgaatgattccgaatcgttcgcagttgtgtcagacgtggcagctctggctgacattgaagccgatcactgggttgtttgtagaatgacgagaatatccgatgcaagaaatgagctgtggtgtcatccgttgtcgacaccggcccaacacaacgtttctgctagaataagattcgggagagattaccggaaattgacccaccacgaaaaattgatggttggtttcagtctcagcgccaaaaccaaatttagcttaaaagtcaagttggacacgcccaaatacgaaggaggattcatcaccaattctaacaaaacagatttcaagagaggacaaatacatattcaagtgcccgtcaaccttgaatacttgtgcgaagcaatgcaaagatccgtggattctggagagttagatgatgacttaaaaaccgtttgggacgttataggcaacgaagaactggacgtagagtacaatctgaggaacgcgttcaaagaatgttgcctcgttttggcaaaaacattcattgatccggcgtccatgtgtcgcttcaagaaattgcccataataaaagagggcaataagcactttgtggatctaagcaccacaaagttaaaaggatctgacgtgttcatgtatctgacgaactctggattttctagcgccacgatgagttcaagtttcaagaaggtggccgtgacagtgagcggtaatgtttctactgttcaaggttacattccaaaagcctctattggcagtatctataggaggatgcaggccataatcaacacacaagtcacaagtgaaagcttacacaaattgttgagtcaagcccaaatagtcatcggagtgggtggtgccggtaaatcgacatcaatcaagcaatggagagaatcccatccaaatgtaaaggccaggttcgtggcttgcacaagtggaggaaccaagtcgcttagagaaaaattgccagcaaatgatatggtcgacagctttgaagccgcaagcatcacacaatccgacgctgagatggtgtttctagacgaagctactctcatcaaaccctgggagttgtccctaataattaccccaagcacgcaaaaactgacattgttgggcgatccaacacagatagaggctttggacatgtacaaatcaggaggagctagagttgttaagaactgcatcgaagtagctcgcgatttgggagcagaatttgaagagaggtgggcttcctacagatacggggagccgttacgagccgaattggccaaagtaccggctttgcacaaactaacaacaaacgccacacacaccacagagtttgaagtctactggatgagcgagttccacgccgatgagttagtcaggatgttcacaggttgtgaagtagtcatagctttctatcaagatcacgtggaatatctgaagagaattgtgaccaaatcaagaattattctggccgaaagtgtccactcttatcaaggcttggacgcgaaagttgttggggttttacaagctcctaaaggaaatgcagacgtgcatttacaatcaggacacactattagcgccgcaactagagcaaaagaaaaattgatttgggtgtcagtgtcgtgtttctccgccagcgtggatttgcatgccaggattggagctgaagttggtgcttcattcttcaatgcagacgaagttattgaaatgttagcatttaaggacaatgcaaaaatgttagacgttgaagctctcacggacatgagtttcatgcaggtcgtcgacaaagtcaccacgggcgaaagtccagaaaattactccatagaaaacttttcgatagagactttcgcaaagttgatgagccattttacagacaagctgcaagttaccaatcacacaaccaatgaaaataaggacgaagttacctttgcggcaaaatatggaccattgaaagggcttgtaaatgtacacaaaaacggtaccgttaaaggcgctgtcccgtccaaataccacgctcaattgcactctgccatggcatggtcctgtttgttcgggtcaaccactccaatgccaaacttgtgtgaattaaactcaaaaggaaaaagccgtatcaggatcattgctcatgtgagcaaagtgtacgcggccaataacaaagaattgaaacttaaaaacgatctcaagggattcatggtgactacaggcgcgagatcatgtgctgcatgcagtgaagttgttttcaccaggaacggtaagtcaaccgttgtaaacaaagattacttcacgcaaaatcgaaggcacgtatatggcgcggagtccgaattgatagtcgaatgcttgaacaacagcaatgtttggaatatcttaccagactatctcgacgacgacaatctgtccttagccatcttaacagaaaggttccaaactgctttcacggaatggaagagtgctaaactaattgaccaaaatgccttgcattacaacaaatatgagaacgaatggattgccacagaaatgaagacaaagtatggagtgcacgtcgagactagcaaccacgacaacatgtactggtatccgatcttgtttaggaaaggattacattggcatgccgtggactgcagcatggaagagcggaaagtcgtcaaactaaccatgagaaaaccaaaactgaaacagctaatctacaaaaatttgattggcatgctggaacactacagacgcaaaagtttggtaacaatagttgccaaacagtacgtaaaattggtgggagcaagagccaatgctgacaaattaccaggcatgactcaaaccattgcttggcacagaactcacaaaacgaaagtgtacaaaaacatagcgaatagggttgcagaattgaaaatcagcagcctgaaattcgagaaacaaaacattttggctcctacaaatgtgcacaaaattatcgaagagaacacggaatggacgcacgtcttatcgtctaacaggttggctgttggagatgctgccagtcaagccggtgacctaattctggtagagcttgcaaagttggacagcctagggtcgaagaactttgacacttacttaagcactccttacgcaaattacgtttgcaacacgagcaataaaaaccacgatttccaagacccgatgatatccatgcagacatcctggaatttgatggggtctttgtacgacgatatgctgaaaaaccacatgagtagattgcctagcacatctgacacttacaaccaattgcaaaatgagttgcaaacgagatccgctttccacggacaagacttgaattccaccacagttctttgtagtccaggcattacttcaagcaaaaagcaaatggaattcatactcaaagatagagaaaccataatcacctggataccaatggaaagacgagtcataggaaacaacatcatttatttgaattcaaatagctcacgagcttaccccgtaactgcagagtttgacgaggctttaaacaagggagctgtgattaaaacaaaagccggtattctcaaagtgcacactttgagaatgattggggagtacagaataattagaattgacaagagccacaacgagatttgggctagtccctggacgcaagacaacagatacgtgtggttggaagggccagctcttattcttgaccctgaacaggccattaaagatgggcaaattttaaagagggtgaaacaaaaatacaatttagctttcttgagcaacttaagaaggaggctgttgcgcagaggcacagacatggaagacttgaaagtgcaaacgagaactttagttaacacagctcaattttctttaacgaatgtgtacgacaaatatgacatacatgtgcacgaagccaaaagatgcgctgaaatggcaatgatcatacacaatacggaaaacaaaatgtttggattgttggaaggcaatagttggcaggatgacttaaagttggccggcgtgaaactcgtttcggacattctcaccagtgttgtgccgaacaatgttgtttccgaactcttaggaaaattgccaatcgacaaccacaagaacttgatgactttaatcattaaattcttcgaaaaactggaaaacttaagaggtacactaatgaatgaggaaaaactgtttgtcgttcctggtcaatacgtggatgttggcaccattaacttcgtcaacaaattgaagcaaaggttgacagcaaaggctaaagaacggccagtcaagccatatttgtttataaggtcttgtgacgtttgcgatgtcagccccatgagggaggcgtttgagtattgcggaatggaaatgctccacctaggccccaaagaaattgttccaaaacgaggaatcgtatttaaaactgcaaattgtaaacacgacaacgagccgtattgtttaatttgggaagaagtacatgcaagcatgttcttgtaccccgagacaagcggcaactgcccaattataaccaacaccagtcttcacgtcgaaggggaatctttgcaagcttatcctaacgtgactctgtacactgactgtgtggtaacagtccgatcttggaattacatgatagcttgcagcgttgttattagtgaaaacactctgttcaaattggatgatttggcaactgaagaactgagacaactgacgcaaggtagaagcgaagttgggggcgtattgttgctgctgccagctgactccactgttttagtcgaagacagtgggaaacgcattgtatcctctactagacgtgatttttcttttaggaatttgaacgacttaaatgaaatcatcatggaaaacttagacgtaatgaattcgctgcacggtagaacgaagatgcaaattggcaagaaaaatgtcagcttgccgcaagcagtggtggacgttggcgccattgactcaaaaatttctcatttaagaccaaatttggctaagatgttgaacattataatgccgtcatctaccggaaaaggaatggtggctgaaattttggctttgtccaaacccaaattgtctgtcttggattatagtaccatctatagaagagacgaccaccgacagagcatgattaatttattcacaattgccaaagggaaaaaacacgatgtagttctagcttccaacaggccgaaaggagacaagttcgttgcattgttgtacaaatacatgccgcgcaaatacagccaaaaaggaggtaaattcacgcacaagacatgggacaaatatattaaggactggaaaaagacagaaactgcaggcagatttatttattgggaggacgtcgccagtttgacgcaaattctggtggatctgttgggagtggaagtggagatggaagccgccgtaaccgactgcagtcacatagtaatcaaacccgtaggggttgaaatgaggacaggtgacaaatgttgcgagtgcaaaagtgatttaagtgaaatgaactaccaagtgaagtctaaaactaccctggacaaattggaaagatatcgcttgaaaagcccgtgggtgcaaataggcacattgaacaaagacaaaaccattgaaagtctgaaattggaggcgcatcaaaaactgtcatccgcttaccaaattaaaagtgaaagtgcgcgcgctggaattgaaaacaaggatgtggacttcaagaaaaggaagaacgcaacatggcgtgatgcagcttcgctgaaagccgccaacaagtccaagaggatgttatttacattagatgaagaaggtgaaccacacgatagtgacaccgaagataaggaagagcagctagtaaacacttcttacgcaagcagtttaaaacacaaagtagaaactattggaattttcaatgccaaatcatatgccagcaatccgagaaaaccaaattgcaatgaattaggtattgtgacaggcaagtttatcgaatgcgtgttcccgtacgttttgcccctggatcctgtaacggttaataaggccctgccaaattacgttatgtgggctatgaagagtttgatcggaattatggcgtctacatggtacgtgccaatcactaaagggttagttattgaccaaatagaattggatggattgcaattcatcgacaccatcagcaatgactatcagacaggaagaatctttgcaaagagcgcaaaaggcagaggagtgatcaagaggaaagtgttaacaccaggctgtcaagtcgacagatatccaaccataggagaggtgatgcccagaatcactttcattccctctaaagccaccgaagtcacaaagtatgatcacgtgatattgtggtgccccgaatgcaaacaagtaaattcgtggtatgtcatgcctgtggtgactgtgtgcgcgaacaaacatccaatgaaattgatttgtcatccacttggccaaaagagggcttttgaaatgttggagtttgcccggtttacaccttacgacacgctttacacaatgggacctctcgaaaccgagatacgtaagttcactaataattactggtggagtgacactttcgatgacgacgagcattacgactcggatggagacgaagacgatgacgatgatgaattggacaaacaattgtacaagaagactttggacgacatcctgaagaagaagaaagaatccgggaaaacggggagtgacaaaaatggaaaagacgagtcaaacaatgccgaccaatcgggttctggcccctctgaacaaaaagctgcattgcatccggccgtggcagttctcaagtctgaaatagagtcaaaggagcgtactgctcccgaagtttcgcaaggcgaagatgctgagaggaaagaacaactagagagaatgagaatagaaacggaacagagaagattgaacaacatgttatcgaaacaaccaaaagctcaaaatttgaaggagttggatttgctcaaggaaatgaggcaagaagagcgtgcgatagaagagaaggcattgaaagaaccaaaacaaaagacaaaagatgaaataagacgaatcgtgaacacattgcaagtaatagggactgcattcaaagagttgaacgacgaagacgacccatatgaagaagaaattgacatcacctctttaatgaggaaagaagaatacaaacactgcggctcggaagaaatgttgagagttggaaaccacctccaccaaccgcaatggaagaagtacagtattggaaaaactccagcgacattcggagctttgttgcgttggttggcttttgaacggccttggggaacaccgctgtcaaacgcaaaatgtaatcattactcttggttgaacgaaaaattaaacagaatgaaatctgttatggaagaacgatggttctggaacgataacatcgaaatttcactgttgaacgtaggaccgatacgtggagatggttgggagataacgactcaacaagtgttcatcagtcgaccacaatctgaacaagtgatgttgtccaccttactcatggcacattccgctaaatacaacgacaacatatttgcttcagtgcctgggaatttcgttagtattcaaccggaagctatttcttttgactgctgcattcacgccgacatagcggctctaagcactgacgttgatgaattcagtcgttctggtctacgagtgcaatggacgcgaaaagagcgaagtgcgcaatggaaagaaaatgctttgatatgtccagattcacaaatgggtagacctttagtaatagttaccggtctaaccccagactctaaatgggtctttggatggtgttccaatgcatgggatatcatgagaccatttatgtgctacgcttcccacaacgttttgcaaccgacggaagcctttccgatgcacacttacgtaacaccagtgcactcccggaggtttagaaggcatttggttacatggccaggagccgaagatgaattcctgaatctaagaatcagtccgctggcaaacgcgcctatcaatctgtacccggttggacagggttcatatttcaaatcaggtccaagatacgacaaagttttatacaccataagtgagttgacctatacaccagactggggaaagaagaacaaatactgtcaacatcaagcagaaaataaattcggcgatgtgcttgcttataatgaaatcaatttttgcgaggtgtgtgacgtcatcccggtaattatgatgaggaaaaataagaatttggcaatcccgaaagacgttggaaatttggtggcaaggatactgatgggacaaaccacgtttgacgacaatgagcaagattggatcattaacactttgggaatagacaaacacgtgttacacaaaaacggtgatctgcccaatggcatagtcgtttctagcaaagaaaacttcttgaggtgggagaaactgcctacagatgaaaaagacgaagacgagccagtatgggtggagcttaaatttgaagacggaaaaatggtagacgttgatcgagcattgggtggttcagctgaagagatacgacccgtgtatgattggacagacgtgcaacccgagccacgaggctggttcattccggagttgttgttcgaatgggagccagtggaagcaatagaaatgtggaactcaatgatggtcggagcttacatgagtgttaatgacttgaatgcattggccgccgaaaccatgatagatttttacgaccacatcatgcctctggaaagaccaatacctttatccgatggaggtgaccgagacacttgcgacgaagtttgcgtcaagaatcatgcacatagcttgttttgcatgatggcaaatgaatccagcatagagaaagaatacgtagactgggttgacgcaaacggtggagcaggcaacaaaatagttacagatcttatttacaagaagggagctgaaatgggactgcacatgtcaaacacacctacgaaggtaggaatgcaaagtggggccgctggaacaatagagatagcttcagtgattaagtctagaatatcatcagcgatggttgacctggacagatttgaaagaaacaattattacggcgaaggcttggaattcctggctggagaattggcaagagatcgcagttacgacgccttaaggcagaaatcccctcttcgattcatactcggacatttacatccagtgaatttgaacaaagagttaataatgactgcgatggcacacaaaaactggaatgaagaacaagttatggcatggatcacggattcggaagaagttcgcgtcaagagcgacgtaagtgaattttacgcattgatcggttacgacatggataaccgaaattcaagagatcggcgtgctataggaaaaagctggccgttgaaaactaccaacccagcgcgacgaattaaggaaaggaaactatttggttgcgcagtaaagaaattaaagaccaaaaatatcatgaccgccgttaaaaacactgatacggttgcagttaatgaagtcacagccgacaaaggagcgaccattgaaaccactgatgaggagcaatggtttgacacaacaacagttcaagacgtcaaagaagaaatggcaacccaagagactggaacagatgcagatgaacatttagacccaaagttgatgtcagaacgtattaaagctgaagacaaaaagaataacaaaattgcaaacgcacaagaactggaccaggaagagctaactgccaacgaaaagcatttcattgaatgcatggaaggcctggaaaacaatccggaatttgaaagaaccggcaacgtgtggcttgaaaatcacatatgtggcaattacgaaaggccgatacgcattcacaacaacccgctgtttagtgacagatacaaacaggggcgcgacttaacaagctcatatacgcacatggtcgacgtagcttatacacgaccagttaaattggccaagcaagtggtcaaggcattagacgcacttcaatatgccttgcagaaattgtacattgaaaatcaatcaaccgtggctcttcacgtttacgcactacacactggcgtggctgaaagatctccagccgactgcgatggcatgcatttggcttacacaactgaaaccgaaaaattcgaagctctcggcttcaaaaccatcaaactcgctaagaacccaggcagattgggggctgtattgcggaatttaacaatggcgctttggccgggccaaggttgggttatctcgcatggagggagagttacctatcattctctctattgtgaaaaatatttaaaacatttgaacttgacgcatagataccaaagtggcggagcagaaggagacctgggcaacaatttgggaatttcagtatggagaaccttttcaccttacatggactgctttgcaagaagcactccgaatagttatttgaagtcagcaagctggttgattgcatacagcagcatatacggaatagatgaggcaaacatgaaagaattcgacggggaacattacatttgttttgactctccatacaattactctaacttaggcccaatgaacaaaatatatcaaacggtaactcggcgaatgaatatagaaaacattccagcaaagttcgccggttcagaagatttcgacaggtcgatggtcatagaaagcggccgtgacatggtcaactacctgcccttggcttggcaaatggatgacaactctattaagaaaaatactaggtcgagtagaaaaccaaaaccgtcaaaagagatcactgcggaaatggacagattgagagtcctgaaatttggggctctaggagcgttgtcttcaccaaaagctttgactccaattgaacaaatgagaaaagaggcacaggaaagacaacaagagttacaaaaattcgtaattgatacagtgaagatcacaaaagacgttagttccgccagcttatccgtggaagattgtctgacagctataaccaaattagtgcttcttgaagaccaaggaagccttgaatcagctgtaggcattgatttcctaccaggtgacaaagctagactgttcacaatgtacaaaaacaaacctttatttttaatagagagcgaggcaaatttgcaagactggaacgtagtggcaaaaatgtacaacgaaaggaagctgctgaaggaatctcccgcagccaaagctctatggaaccgtactgatataggcaaatcgttgatgatcgtggacaaaccgaaattggaactcggaaccgcaccaaaaataacggaagaagagaaatcggccctggttaagagcgcaaagagatcgacaaaattagtccaccaatcagacgtgaaacagacggtaaaaattagaagagtaactggcagcaacaaaaccgaatggatcgttaatatgaccaaaaacacagttacagctggcaatgaagccgcatctgaaatcacaagagccgaaatcgacattgctttagctaatgaaatgctgagacaaatttatgctggtttggtgtctgctggatctgaggaattgatgttgaatcatcattacttcgtcaaaacgcaagccggaattttggcaatcacacacaatatctggcagacatacggaagcggcatgttcgtctcaaaagctttagattacagcagggtggtagaaaacttgcacagtgtgtggacaagaaaagaaacaatcaaacatcaggaacaatggaaagacatggagtggcagtcattaagagacaagttctacgagttctccagcaacaacaattcgtatgaaacgcaaggaacaataggattattgacagagaacattgaacaaggaatcaaggttgagtacaacaaatccgaaattatggaaagaatatggttcaacgctgaaagcacattggtgtcaaagatcactctcaaagattttgaaaccaaagttgtttatgacccgaacacaactgctaattgcgccatgatgtgtttaaaatatttcttgagaatgcatgtaggtagagatgtagctaacgacttggtatccatactgcatctgagcttctatgaaagagtggagaggttgtccgaagcactgacttcgataaatctgccccacgttataatacaaccgacaggggtagctaccggtataattaacgaaataaacaagtcgattccaatgttgttgctggaagtggtgcaattacttgaaggaataagccatgtcagagtagtggaagtgaaggggaaattggattacaacgtcaggaaaatgaacagcgtcaaattgtctagcgaaatcatgtcagaattcgcagaatatgcagaaatgtcaggaaaattgagtgattgcatacaacatgacacggattttacggacgcgtacggagatttggaaacaacgatatccaaagccgcactcgaaaacatgagaatcagatggagaggtaaaccaaagagtgggctacaacggaatgacaagttagtttctttgcaaattcgaaccgtacacggcaccgattacaaatccattcaaggttgcaagaatggtgatgtgtacattgtttacacaaggaaaggtaaacaaccattagtcactgtctcaaaagagaaaggaacaacgtttttgacaaagatggatgtgggagacatcaatggtgctctattgcttggaaacataataactaaaactggcacaaagaaaacgatcacggacaccaaaaatagacaaatagggtttttgaatcaatccgacaaattggcagctgcatcgagatttggaagtttggcaacgaatccagtcagggccgacctacagaaaatagctttcacgaatttcagcaaccgcaatcatcacacaaaagcagagcggaatataattctggaaaaaggaattgacaacgtgcttgttttagacaaaaatttgaggcggatggctcccgaagaatggcaaatgatcgaatgctctggttgggtgagggcagtcttcgtaaactcggagttgacaatacagaaagtcagcagttacgacgtggacgtgtctgaggtttcacaattgttccatgccagtcgctttgaggatagattgaaactcttaaaggaatttgaagattgcccttgggtagtagtaggcaatgatttgttacctgaagccttgcctgagcagattaaaaatctggatgacaaagaagtcaaaggcagtgtgcttgccacaatattaaaaagcgcttcatacgatgtggaattgaaagatgattccacttatcacgtaaaagtcacaaagaaaattctagacggacctcgaccaatgaagaagcaggtaagcaacaaattcgtcagagatccaagatttgccgcggaaataacgttcgacaaaaagaactatggttacatggactacgcacttaaagaaaacgacagcgtaagagtagatgaaaaacttctagataatttgaacacgttagatgaaatgtcgaaaccaaagagtcacgacaaattgccagtgctggacgaccaagtagtgtcgaatattcacagcgtggtcagtttgaacaacctagtctttactgacgaaagtgactcttacttgagtctcaaaacagaagaccaacatgaagtggttctgtatggactagccacaacaacagacccgatcaatggagaagtttacaaactgccaactgatcccagaaccatgaatcaatgggacgacgagacggctatggtggatggacgaattgaattgccttatgataacattaaacttcaacacagagaagaattcgacggagtaaagaaagtgctgaagtccgtgttggcagagtacccgtctcacagccagccggctcacaccaaaaggtacctagcgggactacaagctgtgtcagatttattcgggaagaagttagttttaaggcaagtggagcatgatcccgttgaagacgctagattgtttgccgacacttatttcagggctggcagcactgcggccttgccgaacattgggttagacccaaacaagattttaaattggttggctgaaaggccggactatattaagatatctcaggacatgatggatatgctaactaacggtctggacatcagaggtttggacaaagtgaacgttcatatgaagttggagagtcggctcaaagacgcattaattggatccaactctgcatttgaaaaatacattagtgacaacaaaatgccggaaactatagaagagcaaagaaccagactgattgtgtggcaaaggaaaggaattgctgccatattttcaccatttttcaaagacctaaaagacgctttaaaaagagtcttacgcaatgactgcgtatacgtggacgggttaacccctcaacaaatttgcgctacattaggaaatatagacggtgacgacgtagtgttcgctgaagacgacttgaaaaagcaagacaggcaaaccgaccacactttaatagacacagaaatggaggtgtacaagttgctgggaggcaacgcctcaatcattcgattgtggagaaatgtgcacaaccattggagagctagaggagtgggtgtcaaattcgtcggagatgctagtcgacacactgggcaagccaccacagcgctcggaaacgtgatcgtgaatttgatggtaaaatgcagaattgttagagaactgggcaacagactaaagatgatgatggtgttaggagacgacaacataataataacgaaacctccaataaccgaagaaatgatatcgcaacaaagtgccagacatttcaacatgcaaagcgaaccctctgtggacccgatctcgggtggtttcctgcgcatggtagtctacaaatccaatcatggaaaattggaatgtggacctgacgtaatcaggctgaggagaagatttgaagttttgaatggagtcagtgaagctaacgatgaaaatgttacaatgcgtgcaatgagttactgcatgatgttgggcgacttgaagccggtacgagagttaatcgaaaaggaaaagtggccgatcaaccctagcagatggtacgacttccaggctctggtaaatgctactgcttacaaatataaatgcacagcagagcacgtcgaaggggaattcaacgctctaatggagatgctgaaagaaaggaaagtgacaaatgtagaaaaattaatgttcgtgggacgtggcaattaattcacggcgaggtacttaaggtgtgtgtgg

SEQ ID NO: 869 - DNA, 15207 bp, Ceratobasidium endornavirus A
  source 1..15207: mol_type = other DNA
ggtggtggcatcctcatcatcatcagaatcatcattctcataatcagaaccaatcaagaccagcgacgttgcaactccatcatcttccaacggcgtggtcactttcgaccctacgataatcaactcatcgtcaattaaagttggaggtgactccgattgctggaagaaacttttctacttcgatatggacgaaggggaatgggagacgaaaccagagaacttctcctacgcaaacattttgcaatgcaccgccgacaacggcacaaagtggaagccagctcctctaaagaagctcatcgacgttgtgaaacggtacaacgtttgtactttggtggaggcaactggggaagaggacgattatggagagccgatcatgatccccacgactaagtggttttcgaaacccgagaacgccaagaatttgctcattcgaatttcagtcgtaaacaaagagctattgcatttggaagaatgtttctacactgaagatgagagtgagtggcaggccgctaccaatgctggatggactaacctacaggaattgcacgaggagctgcgaaaactcgacgttaaaccaaccacgcctgagattccggccgtcatgtctgagcctgccccacaacaggcaaaaccagatgatgcgcagcttctgcggcagttgcagtcttgcgcatcagaagtgtacacaagtatatccatggatagatatttgagtcagaaccaggttactgtggctgctgcacttgttggcgcaccaaactcgctgttaaacaacaaattcttccaagatttggacttcgcgacggacggggcacatggtgtagagtatctcaaccgtattacaaatcatgacactagagtagtgaataacactttcgccagaatgaagttcacgcacattaaaacttgcagaccgtctaccgagtacgacatgaatgccgtgtccgacattaacaacttgataattgccacagatatggaatcgcttcttgaccccaacatgacgttcctgttggatattgctgcttgttattgttacttgaatattaaccctgacaaaacgtatataacggacgaagttaaattgattttgggtaagcaggcgtggtacgacgcccccgttccggacgagcgattgtgccttctcactctggaaccgactttcggtgaatgcttagaccatgacttgacgtacgtgattacaccgactataggcatagacaacgacggacgattgcctaataatctgggatactaccgtagggtcgacgactatgttctcgtttctttcggcagttcgagccacgtattacgtgttggctggtggaaggggctcgccgctggagaaaaccgctacgagcgtgatgggcgcggcgttaccgttgtccatagaaaggagttggggggcatgaccgtactttgcatcaccccacttgtgtacgacagaattatggttacagaggctgaagaacgtacttttgaagtacccatgctggaggccggatgcttgtcacgtattggcattccactcgtgagatcggtgaacgtttcgctgaataagacattgctcaagaggctaattaataagaacctgactggtaacgtaggaacagacgccctgatggaatacggaatggcactgtcatggtacagttacaataagcgcggagttgaactgtcaaatacgaagattgatccgtctacggttaaaactcacgtgtacatcgcgaatgtattagtacgtcgacagaaactacacttcgcaattgaagattatgccatgacgcgcggagttaactcagctattctcaccgccttgtgcgcaatggctgagaacttgataggacggctcaatctggcaaactccgtgtggatggaagcaattaacagtattgtggataacctcgcgttgccgaacatacggtcatctgccggcacgaaaattctcaactgggactcaattgatgcctggactctgcgccgcgagatggtgcaaacctcgtccgggttgagatcgctatgttctcaccacacgcattgcccgacggcccacaccggattcttgtgcatctgttgtttggccaatactgcattagaaggcacgtccaaatgtccatgctgtgaccattctatgggttgcgtacatcgtggaaaccgaacaacggaaggaaagggaaaatgttcgtgttgtggtgacccaactaacgacgaatactgcactagatgcaccccctccgctgcgtacttggacagtctaacctcggaaaaagccgttactggtagcacgacaaacggtctcaaagtggcgacgctggatgacggaaacgaggtgatagacgtttaccctactgacaccttggatttgggaggcggtatgcacaggcatacatgtgtagtttgcaagagaccctaccagcacaagcacaatttccacaaacttaatcaccgacagtacctgcgcgagtgcccgcactgcaacgaatccacccctaagcccgaggacgttgctaaaggacagccaacttcgaatcggaaaatgagcacaacacgacaaaccaacaaactggtcgatacacatcctcagggccaggaggcaaccggcccgaaacagacagccacgatcaagagcgccacagaaaacatgacgctggccgagctttgccaagtactgccaatgaacgccgtgcacattttacgcaacgagatcaagcacggcgagttggtatctacatcccccggaaagttatcaaccatcactttcatcaacgtaccatcagccggagagccatcagagctgttcgaagtatttgacgtgacggagttagccggtggcgactgcgggctcgagattatgcgttcatacgttggcaacaacttatcaacgaacacgaccaagtcattaacgactagatcgtatggatttacaatcacagatttacatgccgtgcttaactactacggcttgaatgcagccgtcgtgaacgagtccatggtgacattctcgagagtaaacgacactgaagaatttgcttgcattgtgacaggctcctcgatagaggaatctacctttaaagagcactacctagcctgcaaagtgcgccgagtgaaacccggaaacaataagctgtgtgcagccgccatgtcaacggtagtcgctcatgacaacatgtcattgacaatgtacggtaagcgcatggagtcgtgcacgctcacggagaaattaaacgttgcatatgttctcgccatcaaaaccgaggttcaaatgaaggaaaagattgctttgccttctttggaaggcgatatcttatgcaacggacgcatccatgaccttgcgaaagggcaataccgcttcaaaattccacaagagatgttgccatttgtagcatcttttatagatagtattacaacgagggacgtgaatgataatctgctgcaaatttgggacgtagatgaaacaaacatttgtgacgttgaacataactgcaaacatgctttcgtagacgtctgcgccaacttggcgaagacatttaaaaatccagaaattttgtgtaggcgacacaagttccaagttcgaatcattaagggaagatcatatctagacgtttccaaaactaaactcaagacaggtgatctagtattcgccacaaaccggggtgaacacacccccttgattgtcactgtatccaacggattagtcccaattgaactcaactccatcccgtcactatcactattgataccgaagacgagttacgtcagcggcataatgcgtctatactcatttgtcaccggggttttgagcaccacgcgattgcatgaattgcttgcaagttgtcagctcactattggttacggcgggacagggaagtcaatgtcactgcaacagtgggaaaaagaccatcctaatgaaaaagcagtcttcatcgcttccactagtggaggagtgaccagcttaacgaaaaaactgaagtccaagcaaattttctcgttcgagaaggcgacgtacatgaaaccagtcgccgattattatttcttcgatgaagcaactgtgttgtggccatgggaaattgcccttatagtgtccggaaatgccaaagaaattcatttcctaggagacccgctacaaattagtgttaccgactttacaacgtcttacggtggaagaccgagcatagacatcacttcatacttgatcaatcagttgcgtatgacaccaacgaggctagtagtcacttaccggtttggaaatccattaatcagtgcgctggccaagcacagtgcgttagctgacctcaagtcctttagcgaccgagccacaacaattagcatgttatactttgacgactggaacgcagaccagctgacgacggcactcagcggacacaatgttattttgacgcactacaatgcccacgtcgagaggttgcgcaccatattagctcacagttcagtgactaccgttgctacaatacactcttaccaaggtttggaaaatgacagagtcgccgtcgttcaagccccaactcgtggttctgcagacattcatctcagtctcggtcataacgttagcgccgctacgagagcaactcagcatttgacgtggatatcaattggctgctttaaagactcgcccgaacttcaccagagacttggtgaggtcatcggcgcattgcaaatcgactgggatgaagagaatgagtcttacaacgtggtaatccaagatggtgagtctagggacattactattgatgatgagatcgtcgcggtgagtgaaggcaccagacccgttaacgtggacattcgacgctttgacctggaaaaatgcgctagcttaatagcacattacaccaacttggccgctcctacagccgcaagaatttcaggagacacattatacattgactttaaagttgggatgctacaaaagcaagtttcctactccaaaggacatttggatgcaccgataggtgacaaatacaagtcgaacttactaaccgccattgagattagctgcaccggggacattaaagatctcgttagtgaggttattcaagtggacgaccgatatcgagtcaggatactcgcatacgttgcgaaatgttaccagacttccaacaaacgacttctgctgcagggaatgctgcaagactttgaagtaaaagaaatcgacgttcgtagttgtgctgcgtgtgcagaggtagttttgagttaccgagggcaggaaactaggatatccaaagattacttgcggtccgaccgtcgaactgtaaccggaccacatgccgcactggttaaagaggccctcgaagtgagcggcaagtgggacattctgccaattgaattggatgacataaattactcgcatgctatactcgccgaaaggatagacgtatggtttactgacacaccgcgaggtctagtctcattcggcaaatggatggatcaattcaagtatgacaataaaagttacgtaaaacatttttcagcgaaagccactgcacaagtaaaaacattggaagttgaaaatatgacatacgtggctcttaaagtttctggaatgctgactacaacgtatacagacgtgaatgaggacgggcaagttgaaacgatgaggtgtcgacgtttcaaagctcctacaatgttccaactcattgagaggagacttgatttgatgtaccgcctctttgtaagggacaagaaaatagttcctttgatcgccaaggtttacatgaacaacgtaggtgctatcgaccgatttgagggaatggccgagtcatttgagtggcacaagagccacaaaacggtcacgttcaaaaacatactcaagacaatcggcatgcagaaaataatcgccctcaaggcggagcgaaaggtcttgtacttgcagacggaagtcgctaggatatttaaaaacttcttgagcaccgcgaaggttgcaaccaataaccataattgcatgggtgacccatcctacattgctgccgaaatactgttggcatacctagcccaaaataacgtgaaccctgagtccacacggtatgtgtttgctaccccctatgtaacacacgagctggagtcacaggtggtaaatgtggttttaaccacaacgcagaggaccgctgccgttgtggggaagaaatattacgacgagaccctacgcaaccagatggagcgagtagatggtgctagcgacatttacaaacaattgctgaacgagttagaaaaccggtccacgtggaacgagggtgaccttggatctgcgcaattcgtgctcactagccctgacatgatgttcgatgaaatggtagaacgtagaatagccagttcaaaagtgcgaacagttatcacgtggttaccaaatgtaatcttttatgttaacggaaacccattccgaaaatttgtggacggaagcacttttgccgtgcaaacaacgaaccaatttgaaaatgccgtcaccttcggagaaagatggacttacgcaggacacacggtccgggtgcacacaatgcgggttttagatgggatcaccgtcataagtatgacttttggtgagttgtctgcatgggcttcaccttggctagaaaccgccggcaatgtatacctcgacgttccgacattgattttgaatccgcagagtatagttgatggcggacgaattctgtctaccgaaaggaaattggtgaacctgacaattttgggcaacttgcgtagacgtttgttgcgaccgaatacgacattagaagacttactagtacaagccagaacactgttgaataccgcccagttcacgacgaacgagtatttcagccggttcaacgtttccgtgtctgccatgatggacacggctcgaatcgcttgggctattcacgagaatgaaaattacgaattgtcgttattagaggttaacgaatacggttttagtttgaatatgtcgttagctaacatggtggggaagctaaccaacgcgcttatcccgacaagtagaattacagctatagttaacactctcgatgatgatatcaaagtaaatttggggaggttactgacttcctggattgagaagatccagatgttgacaccggtcatgatgaaacagaggaagacattcatcaatttttcagacattgaattgcccacatttgacatgagattacttaagtgggtgaggaaaaatttcgtcagcacaaagcgcaaagctgcatccagagagttggttactttgtcgacttgtggcccgtgtagggcacaaaagcttaacgacgtgcttaacgcttttggttttgtcgttccaaacgttcgagagccaagtgaaggccaaattgtcgctcacacaaatgcttgtatagatcataagaatgagcatgttgtgttctacggtgacctattcaatcaattcatgaatggcacgtctttcaagggctatgccctcgtcactgccacacaaacaatctcgaacgacaatgatgttgttttgaacgacgtgcgactcgatgacctgctaaagagatttgtaaattgcaccgtgagagtagaggctactggatttgaatttataattgctaacattattctcaattctgcaaacacaacgtttattgttccaccagatttcaaatttaatttggttaaattcaagacaggcgtgcgtttgcagcgagctggatcgcaggacaacatagcttctggaatagtgctgagtgacaccttccatacgctcgtgactcgtaactggcttgcctacagaggcttgaacaacaggctgccgggcgttgatttaagctctttcaccgacgagagccctcgcgggacaacacccaaaaagaaatccaatgggaaggaggcaactggtacagcacaaccaattggttggccagggaccgacgagtttgaacacagatatgagttttctagtcagggaatggaatttaatgatcatggaatagtggttggggaccgcaccatacacttcccgccacacatgattccaaatttcttcaacaaattgtcaccctcgagacagcgacatctccgtctgcaatggggttcagccgaagggttgcccgggttcgtgtatgacactgagtgctacgatgagaccatagaagatttcttaattctgcagccgcaactgcaaagtgatggcaccttttcggtggcgatgtccggcattctcgacacggaacgtacgttccaacttggtgaaatgcttaactatgacctgcacaaaaatatattcaacaaaaatggaaagcaggttagcaccgaaaaagccccgaagatattgcaacggtcagtcactgtgaagtcggaacattacgtgtacgtttgttctaaatgtcgcagtgcgtattccttcccgacacttttgaagaatgccgtttgcactaacaaccacgtcgtctacgttgcgagcggaccacacggcttggtttcgtattcacccattgacttcaatatctccgagcagaactgtagtgacgaatggtccatagaatttgtgacatcacagagcttggtgaacgaggaggtgtaccggccgattttctccgagcactccttgtttgatgtcctcccacagctgggaccgatcgaagtactacctttgaggaaaaattttgacggtaggattactttaggcgaattcattcatgctttgatgtttgacgttcgtgatcctgattatccatatatgggcgttgaccagtacatgtcattcgaaggatacgactggttgagggaccgattgcggcaggtagggaaaccaataaccgctgaagaacatgcagagaagaccgaatacattagttccatccccgtgtggaagctcatcgagttagttaatgctagaactgggcagcccatgttgaagggcatgggttggatggtcactggaggaatatctggaacaatactgacgatggccgaccttggttgcacggtcacagttttcacttcgatgctaacacttgccctagttgagaaaaatccctggatactattcagctcgcccgccggcttcgagaatgtaaagccgaattggttggatttctcctgttgcacgggattcgcgtacaatgtggctgggaatgaaaacgacagccgaaacgacatttgtgctgcccggactaggacatcgaaattgtacagcacgggtcggtcgcttggacttgagttagccatttgtggagacttgtcctatggcatagcccaaaacggatggaactgcatacgtccttacatcgcagggcgacgccacggatccagggcctgtgaaacgcctctcccagtggatacgttggttccgatgataaacaatgtttattacttgcatcacttcacaagttggccaggagcccaagatgttgagctaggcctaagatgcacacctcatcagaagggaactacggggtcagtagtgttgcaaccaggatgcatcctaggggagatagatcatgagttacttgacgacaatgcctattacgaccgcgaccattgggctagaagttggcttaagaccggtgaatgtagatggaatggaaagaaagtgaagcatgtcaatttagcgtttaatagtgatggacaggaagagagattgaaattctgtggctctggccgtaagtgtgaactgaccacttatgacaagacatatagcgactggacgcaagacgtaaacttggttcaaggtatgactaacgtggactcgttgggcgtggttgcaaaattgacgtacaaccgaaactttaccgaacttgaagagcaatggttgcatcgttacatggggaagaatcaggttaaaccctctcaagtagatgaatctttggatgggccatctgaccacgagctatcccaagatgaggaaggtggctctggccgagccccaagctcaatgagtggcagcagtcctgacgcacgctcacatgcaagcgggagcgatgcaggaaatggttggtacccgatggacgagggccgtggttggccagctgcggacgatccttcggcggaacaatcgtattggctgaacgccgaagactcgcctggaaggtttgagtcttggaaacttgaaacctacaacgttactgattctcacggtgagccggtaacggatgataatggtgcaccgattcaacgagtcaagtggatgccgaggaatggtttggacttcggagacgtggatctgggcttgaacgttgcaggtgaagtattgagcgtcgaggccgatgaggcagtgccgatgtcgtatctacacggcaatcctttaacgggtggaacaacgtccgaaaatctggacatgtactacgacgaaagcaacattgatgacaggtggaagaaccgccaacacaatcatcatcttgctagtgacgaatggtccaaacagaaaaggcaggcttgggccgacaaactggagtctcgcatatcgagtgctacacctgtcattcacattgggcaaaccggaatgatgcccacttctcacgcaacttcggtcgctgagagtccacgcactccttcaatgcaaagcaatccggctgatgtcgtaccgggcacgatcgtgcaagagtcctcggaattaatcaatcagagcgatttggaggccgccgaaattaagaggatgatcgacgaagcttccaccggtgagcaatggttatttgaccttttaggttgtgacgctaatgacacgataaacttgcccagttctctgctagacgagttggcggccgccgattctggagttgttgaagtgttcaactctagcaagctggcttcgtcagttttacacggacggtacaaacacggcttggatttgacgaacaccgagtcaacacactttgtttcggccaagctgagtgagatcaggcgcgtgtcgcccattgggctgatcgccttatcaaaattacgaagcatcttatttggattgggaataacatctgaagacgttgtccacttgtacgttttgcacgaaggggttgccgagagaaacacctcatgcaataaaggaaagcacgtcgctttcaccaccaacccagaaaaataccatcagcgcggtttcatcacggtgcctttagcgaaagaacctggccgagttggcgcggtcataagacccatagctgcgatgctgggcccaagctgtaaggcttatgtttcgcacggtgggcgagtaaacatgaacagcctgtggactgaacacgctttagaaagatacattagcactgaaagcgttaattttacgttgagtccttggaatagtctgagcccgtacatggacggatacgttatgaagacaagaccgccagaatgggcaagattcatctctatcaacctgcattatggccaagtgtacggcatagacgaatacaacatgccaatcctaggaattaagaaatgttatggtctcacaacgcacaaccggatgtatgcgaacttgcgcttgcacccaaaatattctgagctgctctcgagcatagaatttgcacctattgaagatcccgagagtgtcatgcctgcggtgccgttgtggattattgagttgtcgactcataattctgctactatgcctcttgcgtggcatattgacgggagtggattcaaaaaagagacgagagggtggggagtgagctctcacaatgactttgaaaaatggtttgcctctttcattcaagagcccgtagcaggactgagagtcaactctgaaaaaggggatccagtaaatccttcactaactcaaggtgtcttgcctaacgcgcaattcgaagaagtgttcaaccccccagtcagcgcggactgcatgaggttatgcattaaaaaattcttgcgcgatcatgaatacattgatgacgcacaaattttagataggatgaacatcccagcatattgcaatgctgacgttgtgcgtaaagaactattcgctgaagggatcaactttattttgtatttctccgtcaacgacacgatgatgtccgagtcttacaccgcccaaataggcactttcaatactggcccgacaattaacctacacatcaaagctcagctggccggtatgcggcatgcaatattggtgaaacaaccagacttaactcgtattcggaaccgggaggaaccacacgttatgtggccggccaatgacaagcaagggtacgagtcgctaacttcgagattgcgcggaattaacgaagctgtattgaccggtgacaccaaagatgaacgtctcgccgagttcgaggtatcgtcggtgataaacaccgtgtacagggccaagggacgcattgacatgatcaggaagcggcgcagagataacgttgtcacaacgaacgctgtcagagtgttcggcacaaatttcttcgtgctcgctccagacatgaaaattggtaatggatctctggtcatttaccgtgactcaactggttgggtgcccagcattgttatcgagcatggtgcaaaatcttacatggcgacgaacgatggtgtggtcccgacgtacgtgatagtatcaggtgccgctttaacccctccccaagtggggcagtccaaagctggacccggaaaatcagtgattcctagcctgcatccaaaaccaatcaagctgagaactggtttgaagggcggatttgctacaatggccgacaagaattgggccgttagtcacaaccacgctagtgcatctttgaacgttaacccaaaggccgacgttgtgtgggtcagatctttcgacaatcgcccacaccataatgatggtgacctctattcattggtcaggtcaaaaattccgcagaatctgagaatcttgagcggtgagagagagtcagaaccaacgccacgtgagctgatgagtcttaaattagagggcaagtcgtttgttacgtgtatcgttggaggagaattaaaaattaatgtgctcagcgactacttatctaagcgtggttactctgccgttaacgacgagttgacgaatgacgagatgattgctttggtgactgcagacgctgagtgtaaaggagatgcgtacaaatttttgatgggcatctggacggatcgatttgagagagcaatgcaggacggagatgatctgtacaagtcaaaagatgtgtcgttggacgaaattaaggcgaatttaccactcggttgggaatttactggtacagccagaacatattctgcaatcgtgtattacccaaggtgggaagcaaaggcgtcaaaaataacgaacaaatacaggggcactgatttcttcgacgtaagaactgggctatttttcgaattctcggaacgaagatacggatacatggagtacatacaaaaagaggttgacgaggttgtcgtaggcgaaaaaatcctcgacgaactaaatacggtggatcaactggccgtgaagaagccgaaaaacgagtacagtggcggacttgaccatgatattgagcaggcagttcgtagtctagacttgttgaacaacttgcggtacgatgacaaatcaagtgagtacatgatcaccgcaacaaacgacccgcagaaacccgctgtgctctatggctgtgcaaacatgggcgacccgataaacggtgaagcttacaacatacctgcaagcgcaataacctacaattactgggacgatgaaacggcgatggtgcctggtccaattgaattgcccagaaacaacattaagctgcgtgtgagcgaaatgccggaaatcatcaagagcatcgacaaagccgtactcacgaactatcctacacacgctcaacccgcctacactagaaactacaacgccggattcaacgcagtttcggagttgtttgggtcaaagctaaacgttaggcaagttgagcatgacccaattgaggatgctaaaactttcgccgatacgtatttcatacaaggtggcgccactaatttggagggagttgacattaattcccaagacgtgctaaattggttgaaaagcagagttgacacccatggagctgaagaaatgcataaaattgccgctgagatagaggaaatattaagtgaaggattagacgttcacggaatggacaagtttaaagtcaacatgaagaatgagagtcgcatgaaggataagttggcagaactactaacgatggacttaccgcaaccggataacggcatgccggacactataaatgaacagcggataaggttaattgtgtggcaaaggaagggagtaactgcatgctttgcctcttttttcctaaaaattaaggaaaacttaaaaagagtgctcaaaccgaacgtaatatacgtcgacggactgaccccgacacaaataagtgccgaacttaacaaaatacacggcaacgtcacgtttgccgaagatgacctaaagaaacaagataggcaaaccgacgacacattgatagctactgagatggaggtgtacaagcatttgggtgccaatccaaacgtgattgctttgcgccgtgccgtcggtagaaaatggcggggcaaagggataggcttgaagttcgatggtatagattgtcgcaaaactggcgaagacgtaaccgcgatcggaaatgtggttgtgaatttaattgtaaagatgcgtttagtaaaaatgctaggaaatagtctattgttgatgttggtgctcggagatgacaacataataatcacgacggggcacataacaaacgagatgatctcattaaacagtgctagacattttaatatgataagcgaacccaacgtgtcacaagattgcggtggttttctgagaatgttggtgtatcaaggacagtccggaaaccttgaatgcgggccagacgtaattcgactcaggaggagatttgaggttactaacggcgtttcaaacaacccacaagaagtgattaacatgcgtgcccaaagttatgcatgcatgcttggcgatattcgaccggtacgagagttaaaccttgaaatgggatgggatttgcaactgagccgatggtacgattggcacagcctggcccgcgctacggcttgcaaatatgcttgcacggtcgagtatgtcgaggctgaattggcctcgctcataaaaatgatgagggatcgaaacgtgattatcaagtcgaagctcatgtttacctctcacgctatgtgaaggaaacaattaaggaatattggggttggtgtgtgcgtgggatagttcgtgagtacggctttgttgatgctcttgatgatttccggcatttcgctcacacgcagcttaatgttgtt

SEQ ID NO: 870 - DNA, 23635 bp, Ceratobasidium endornavirus B
  source 1..23635: mol_type = other DNA
ttacgtcaagaaaatggcgcccaacactcacatcactaacatcaacaacaaccaaaacacaatatctacttacaaacacacaaatcaccgcgatgctgccgcggtgattgtggcctctaaccaaggccatttaaagcagcaattaaaaccaatgccaggaatgcttactaatcaaggggaaccaatgggttaccggatggcattagttaaaaatagctcaacaatgattactggaaaaaatgaatatttaaataatattggcattgggagcaaacaaggaaaacatattataatcaacaaagcctttttaaaacatattgacaatgagaaaagaaaacaacatgtttcaaataaagtacgacaagaatggaatagggctaacaaacaacaagaatttaaaaacaaaagtttgcatttttcattaacttttagacaaaaaccaaaatgtgaaacacggatagctaaagaagtaatagaattagatccagcaggatatccaactgcggtagtaaaaagggcattattaatcgcattacatccagacaaatttacattttacgatataaatgaattttacataagcattaaagaattagttgaaacgcaacaagctgctaaggctttacgcctttgtgttaatttattaaaattagtgccatatactaaccaactgaaagttatggatgctaaattatccagctactatggagggatcacgaacataaatagtatcaataaacaatctgttaaaaagaaagaacccataactgatacaaaaataaaggatactaaaataagcaacgataatttacaaacgaaacaagtaacaggatatggaaaaaattataacaggaatacaaaaaaaagaaaaaacaagacggataaaaaacaaataatagcagagatatcaaagcaggcaccaccaataaatgaagaagcaaacgaaacaaaaataatcgaaacatgcccacaacataaaatatacgatgatgattgtgcttattgctacgctgaacaaagaaaaaaaaatattgctcgtagattagaggaagaagaattaagggtaaaagcccgcaattgtaatggtgaaaatggtggtgtgccaatacaaccagttactgaactggattacaaataccataatatgaactcacctacaaacggaaaaactaaagttggcaatagtacatttaaaatagaccgacaaccgtatgtagacccaaaactactaaatgaggcactatttgaattgctacctaattactcagactatgatactaaatatgatatagaacatcggaaataccatatatatgacactgagaataaccaatcttgcatctctattatggctgaaaagttagggttaaattactctggagaacggttgattaaattacaaagggaaatgcacactgaaaacataaccgaattgattgtgaacatagaatatcatggtaaaggtaaaaataagaaaaaccatctttcatttgaaagtactaaaaaatcaaaattatatttactagaatataaaccagtatgtaatggtaattgtaagacgcatttacctggtaaagagcatgcaaccatgacgaatattctaactaatgaaaatggttattctaggcttagaactaggcaaacttataacaaattcatgtatcggaaaagccgcatgtggagattacacaagaagtgggccactgaatacgcggaatacagggccgaacatggattagatgatgataatgatagtgtaatatccgatgatagttatactaacgaaaaaacaggagaaactaatcaaaataaagtttatgaaataactgacataaattatcatttaattgaaggttggacaaacattttcgtaaatagtgataggtctgatgaaactcaaactacacataataccaatgttgtaacccaaattgcaacagaaaaaaataaaacacaaggacataagaataagaatttaagtgaacttaaaaatacaatagataaaaacctaaataacaacgaagaaatacaaaaattaaattggcaaggaatattaaatgatagtttattaagttatacaaccgattactatgaaaaaattttaaataatgaaggtgcgataatagacaaaccaaacaataacctaataaatgatgataatattaaaaagcactacgaacaaatggcaaaggaaatgtattacaatccggacgtaaatattgctacaaaaatcgaggcattactaggaaaatgtgccgaaccgccaaaaataaacgagacatttgagggatcattttgttatgatgagaggttattaaatatgacaaattgtccattaaatatagcagacgacaggggaacatgtttaaaaatttgggcatacttagaacgtaatggagaatgcacatgggctagtaatgaaaaaggaatgtatacaggaacaaaaagaattagtaacggacaattatataaattcttcggcagttacttacgtagaactttaggtaatatacaacaaacacaatgtttccaaacactaaattgtggtgatggatcttacgtattaaattcaattccaatacaactaggtagtgatggtaaatttataccaacaacaattaataatctaacaaggacaagatttgtatggtgggtagattgcaatacatgtaaacggaagaatggtttcatgccaaattggccaaaacacgcaacaccacaattcttagagcatctacgatgtggcaattgtataacaccattatactacaataattttgaaaatacaaaacgcgaaccaatagaattaaaacaacggaaactacaaggattattaaggaggttgggaataacacaaaacctctttgaacacatagaagtttataagagtgcaaaatggtcctctaatgtagaattacatgaccatgcggtagtagccagattcctaagtcaaataaatattcaaccatttaaggtagatggtaggttaacagatggtcaactatcatatattaatgccgcttttccagatttggaaattattgggaatacaatttctgggtcacattctagtggactatatgatgccataagtgattgtttactcacaactggtatgaggttatttaacaacaacagtataaattacaccgctaataaacataatatcatagaatttgaaaaagaacttaacattgttgaagatctagataacacagataatgggttaattgactgcaaagatagttatgggcaaaacaaattaatagaattaatgcatataggcgttaagacaattgcattcgtaacaccataccaaaatgaattcgaaaaggctactttcggtccacttacaaatgaagttggtgaatggcaaatacgagatgattgcttagtaatattaaggcatgatgaaaatatagctaacatacttgattatgatttaactatcaaaatagcaaaaagtgatatcattacttgtaataacgcctacttagtacgtgatataaacactataggcggattaaaattaagagtagcaactaaagttccaaatattgagtttatcaaaaatctagtaaaacacaatgacgctaaaacaatggaattcactttaccattattagaaggcagaagtatcatgtctttaatgggaggcacgggcatcaaactagaaacatttactgtccataagaaattactaagaacattattaacacgtaatttacacaaaggtgaaataagttaccaagaaatgattgtagcggcaataggttttgcatttaggaaatataacttacaatcaaggacaataggcaattttgacattactttagaagaagtagtatcacatgcatttttagcaacagtactaataaggagggcatatgtaagacggcaatggttattggatattgttaatacagaatatgactggattaccgttttaaaacaaattggattaactctagcaaatgcgctattaacaacattatctgagtcacaaggctacactgctacagaaaatataaaacatatagcaaattcaattaatagtattggggtcacaacactaagtgacagcttaggaaaaactaattttgatgaattagaaaattggttagataacgatgaatataacacttatgagataagtaatataaatgaggttaaaaacacattgaaacacgcatgtgaccaccattctgttaattgtaatcacattggacataaaaaatgcacatgttgtaataaaccaacagaaaatgaattatgtacatgttgtgattatataactccatgtgtacataaatgtaaacataaacatatattggatcatatatgtgtttccaaatgccaacataagcagttaacttgctcatgttgtcaagtgaaatcatgctatgacccatgccataactgtataccattagttggataccataaagatatatatgatgacttattagaagccccatttgcagtagaatctaaacaaaaggaaccatggaaagtcaatagggatagaaagccaaacgaaaagattgatactaaccgaacaccaggcacaatatattaccatagtgggtataaaagattggttgtacaaccaggcagtgacgctataattatggatgatggggtgacacacaaacatacatgtgctatttgtggtaacgattatattcataaacataaaacagataaaacaccacatgtaaaacacccacaatttgtaggtgattgcccagtatgctggccagtaggactagctgacccatataacacaacagatccaaatgatgcacgtgtacaaccacaggtagataaatcaacagaggcaattgatgaaaaggcattaactttagaattatacactgccttgttaccgtcacatggcaaagaatttttagacatgctattaactggcaaaattaatcaaaagttctatgataactcaaatgcaagcgggtataacgtaaaaatacctttcctaccagaaggaacacatatgtggcacaaagattgcatggaactcgatagaagaatacaaatgaatactgaaggtattacatgcggtaaagatgctcttaaaaaattttatgagcatacaatcagtactacggcctttaacacagcagtagggaacggtgaaaacatgacagagaaagattttgcacgaattgctaaagaattaaacttgaatttagttttacttacggacccaacaattactatatttaaatatcaaccaaatgacaatttcaattgtattatgcattcaagctttaacaattcgatcaaccaacattgggaacctgtgattgtaaagatagtaaagctgggcccaacaatcattacaaagaatgaaattgtgaatatgaatagcattagaagattaataaaaatgcatacaaaaaatcaaaccaatgaatggacatggagtatgtccgacttgactaaattacaaattgaatgggatttatacacgacttatactaatgctaacccaggtggtactcaaatagaagatacaaaaataatcgaaaacggcgaagatatgtacttaactaacaatgctgcaggacaacatgatttggtgaaaggccaaatcaatataaaggtaccaacatgggcaaagtctactatatttgcagggtaccaaactaacgcattaactacacctcaattaactgctatattcaatacaacacatactggtatagacaacttggaaaacgaacaactagggctactggtaaaccatattaaaacatattataagtgcacacacatgaacgaattaagtggtacaacattatcactaaaaccaatacatgtaactgtaaaaagtgatcaaactagacaaggtgctagaataaaacttccaacaactaagatatggaaagcgttagacataatatatgttaagacaagtggaggtaagtacaatatggtgcacgtaaaacccataactatggaccaagtgtcatatacacttgtaaacatgcaattaggaagaacagtagacatatgttataacaatgaatcagctagttcagctatacgcgggatatatgcctgtctaacatacaatacaaataaaactcagttaaaattagcattgagtagtagtaaaggttttataggcccagcaggtgctggaaaaacaacaagaattgtagctgcaatgcataatacatctgcagtaatagctgtaacttcaggtgcacagagagtattaaaacagcggttagctgatcaaaataaagacccaaataaggtatttagttatgagggaatagctagtggtacacaacacataccgaaagagataacagaattgtttattgatgaagctactatgttgaggccaatagctataagccacataataagcactgaaaggaggtatgaacatatcacatttttcggagatacaagtcaaataggtgtagtggattttagtgatcaaggtggcgagagatcaatagctagtattttacactcattgagtaaagaaaatttagaaataactaataaacagtataggatagcagaaccattatgttcaattataaatgcaactagagaaggtggatatgaatatataggaccaaaagatagaaaaactgaatatgttgtagaaacttttagtacttttgatatggatgctattatcaatttagttaaacaacatggtgtacaattaattttggacccacataacgcaaggattaacgcatatcgacaaaacttaacaggtactaccgtacaagaagtaaatactactcatcggtaccaaggaaatgaaaaagaagtagttttggtaatacaagaacaaataggtaatacaattgggatagaacaaaatgctagatactgtcattccgcaatgaccagggttaaagacaaattaatttgggttagtattggctgctttgcaccacatataacattagataaacgtattggggttgtgaaagttggccaaggagttggaaaaatattgactagactagggtttaatcaaaattcttactgggatgatattttactaaatttatctaaactcgatacaaaattcacaagtgattatgaagaacgggaccttatgagttctaatgaaaataataggtttagtatagccgccctaaaagcaacggctattaagtatgaagaacaatatggtgccacattaacagccatacataatgatgaatattcagagataaatatttattatggtgggttcactattgctaaattcaatattgacgataatctaacagtgacatgcacatatgacaaattcaatgcagtaacaaaagaacaaatcagtgaattaaaaaataacttaaaagttgacacgaaaatcaaaccaactacaaaatatagcaatatggtgaatggcgatacaactataataagaagaataaacatattggcacttataacaacaatgtttgaggcaaatggtttaaaatatagaatactagacgacgagcaaacttatattattaccactagcactgatgacgatgaactaagtggattacaagttcataaaaataaacaaataatattggagataagttcagacccaataaatacaaattgtagattattccattggtcaaaccaagatggtgaaaggtttgccagaaaattaggcttaatatctggtgaagatgatcaatatataccacacagtctaaaacccttattaaatgacaacagaaataataacatacatactaatttacaaataaatagggccataagtagggctagtgtatttgctaaatctgtatttaataaaataatgccaaacaaatggggttataaaaatattaataataaccaaagtgcacaatatttaaatgaaatgcaggctactttagatttaacaacaaatattaaaatattaccaaataaggaactaatcaaagggatagacatcacctcataccctataaaaggtcaaaatgaaaataaatataattacctatgccatatgaaaccaaatcgagacgtaattctgctaaacactatagacccgtgggctgaaactagcccggaatgcgtaaatattattgaattcacagataacatacttgataatttattaaataattatattggtaggacattaaataaatttagcaaacaatttaggataaatacaaaccttaaagggatagatgggttgattatcagtatagaagaacatattgccgctaatgatcgagttggacaattaattggacaagaagaaggtaggctgggttcaatacggttatcgatgctagatgaacctattaatttgccacaaaatattgatgatgaaactttatcaactatacaaactgcaatgccatcacttgcggctaataaattgatacctgcaatgcctatgcatgacaacaatcatctatgtgaccaagtaattttattgggattgtggtcatacgttggtagggaacctatgactatatataacacaatgccaagcataatattaatgaataaaatgttcaattgcatagctacagactcaccatataattgtactaattcaggattcagacaaacacattggccatggtcaacaatgttattaaagcaattgagcacaatacacgtacctgatggtgaaaataagcgggctttaaataatgcaacacttgtacaatacgcttcagcaaacgtactaaataaaagaggaccctggattacagatgctaaaatgttaagtgaaaacaaaattatatggatatcacccttatacttacccgaaaatttcaaagatattgtaacacttataaatacgggaaaagcaatttatacctacttccctggacatgaactactaaaacatgacggaaactatgatataatacaaaatcaagctcttaaattaaccataaaattgccaaactggttcacaaaattgataattgatgctgaaccaattaaaatctcagaaaattgtttcttaatcgcaaaatgtatgtggaccactgcaggcacaatgactactagattactaacaaaattcatacaaccaggaaaaacattagttctaagtccaccattagtaaacccacaagctagaatggttaaaataactttacctgtattcaaccctgatataatatcgaacttgacccataacaacaatttacttactactagaacagtggaggtaccagataggttactcagacaactaagattaacccatgcacgtgaaggtaaaacatttacagacttatgtgcaacagcacgggtcatgttaaatggtgagcaatttacagaatttaacattagaaatacatataagacttctccttccgtggcattagacacagcctatgcagtagtaatatacgatggtaaactcatatcaggtcttaaatccgctatgcaagaatggtaccaaagacaggaaccatataatccaagtactgaccatattgcatcaattgcagtgggagccgctggtagattaatggaactatccgggttgaacagcacaccaaaagaagtattacggctaatacaaaacctatcatatggtaaaagtgataatatattagcacgaatattggatgaatgggataaattagatgtatctatgacgcacacagctaggacattaaacatttacactagtgaaggtgtaaaattaagtcaatatacacaccaagaagttacaaaagcacgtaccataacaaacaaattaagaccatacatatatagtaatttaaaatacttaacagttttggtaagagtaaacgggccaacagatatgtttatggaaccgataagcacaccagataataacccaaaagcgattaatttaccaaccactccggtttttaatgccacaatagagcaattattaaaggctttacaaagcaaatcatttgacataactaaggatgaagaagcatataaaacaggtctattaagtgatacaagaataaatgagttgaaacgaaaattaaacgaattaaccagtgggccaaaaatgccaacccccacacattcacggccaacaacaccagatccagataaaccaaatacaaaattggattgggataagattaaattatggttacaaggagtaaataactatatacaaacattagaaaataagagtcaaaccgaacgactatgccaagagtacattaggttggcacaaactatagaacaatttaatgagatggacaacataatatataacaatttatatgagttgagtaaagaaacattgtttttgtatgataatgcaaattggtctaccatgcgagataatataggatcattattaagtaaccatggtatacagctaccaagtttaactgtcagcaatttgaaggggacacgcatattaattacagcgctaggatctaaaggtgatttaagaccaataagcgccatgttgaatatattgaatgcatgggaggctaatacatacatactatgtccaagagaatggagacaacatatcgctggtacatgcaaaggaacagttatattgacaggggaatggaatttagatgaaaaactagctactgcattttcatttaaagaattaaacttagaagtattaatgaaacaattagagcaaggactagggcacaactgtattaaacataaccaccacgcaatattaccaacaatagatatattcataggcatgggagtggctccacaagccaaattatatgcacatagatatagggttccgtacatcgaatttaacccactaccatttaacgtaggcggtgataatgaacgaccaatacaaacagctattaggaattttacatcaaaccaaataatgttacttaatgaaaacctacttaccgaagaatatacaaaattaggcggtggcgaacttgatatgcgcagattattaacatgggaaaacccgacaattcatgcatacgatagtaatcttatcaaagatttaccacgcaataagtttggttacaatgttggatatatggcaggtaagttagttgatgaacctacccaattaagcttaaggatgaaaaataaagacatattattcactcaaggttctatgaaccataacaaagttggtaatatggtagattcattgcttaatgctataatgcaaccagttggcacacaatatggaaatctatatatacaatgtggaaataagttagatgatataaaatcaatagttatgaaatacggaacagcaatagcagttaacacatatgccgcagctggcaggacaatatatttaataggtaacattaattacgctaagagtttaaagaaaggaatggtagttatacaccattgtggttcaggaactactacagaaatgctcaaagcaggggtggtacatattgtggcaccagttgcatttgaccaaaacatgtgggcaactgaaattgtaaataatggggtgggcacatggttgaatgactatagtagtgcagcattccaaagcgctttagctagtgcaattggtcttaaaggagcggcggcaaatacagctgatttgccagtttcaaaaccagttgaaggatttactcgtgcttttaataagattatgaatgatgtttataatttaccaattactgctccagatatccaagaatacatgatattcgatttatctattggaaaaacgacaattgatttcaccacgttaacatcaaggatactaggaattgagttcattgctgcggaatctgatgaacttaacaacgtaccagcaggtgaattatggatggacaatttaccagactcaacaactgcatatgacccacctgtaaatggaccatgtgtatttgaaagcattcaatgggctaccaattgtgatccaaatgatttagataccataggcaaatacctaaaatttgataaaccacgtgaaaatggagtggccccagatgaaatacatcttgtaacatgctgcctaggcataaacctgatattgagaactggcagtagggctgaattatatcattatttcccaggaaaacagacaatattcttaaaagcgagtatcgggcattgtgtagttgcacaccatgaggtaataaactgggacgcaggaatcaaaccagttataccacaatcgcaatcagccatgaacccgtttaacattaccggtagccatttaataaacaataaagtttggagtatacttaacaaaaatataggtttggataatattggatgttcacatttacatggtacgcctgaaaacaatctaaaccatctacgtgtattactagataatgttgcacctgacacaaatgaacttgataaaccaaaatggcaacaaaaactaagggatatgttaggtagggatagtaatgttaggctaaaagatttaacaggtccaagcaacatgcacgtacttgcagatgtaactatgacggataatttaattacaactggcacaatcataagagacaacgcatatggttggctgtgtgataataacggacaagttataagatgcacaacgcaaaaaatacataatataacatacataataccaccagctagcttctctagtaggaatatacctatgttattcatagatagtggtatcaatattttaagcaatgcaacagctagaacaacaattaccgatattgacccagataaagtatgtgctataaatagggaaacagttattttagcccaacagtatgcaggagcaagtttacgaatatttaatgatgcaaacccggcagaatacttactaatatgcgagtacgacaatatggcacatcatgcatacaaccatagagatacaataaggttatatgaaaatacaaaagtattgtatctaaacaatgaacataagttaatgccaaacgtagggttaacaatgaggctacaagaacaaaatttcgtacgcgcaggagtacatgatacaagagaatgtacttttatatatactgacaaacctgaaaagttattaagttatgtaaaaagaatacacccacaaacttgtatacattcaaaatcattgcgtatagatagagttgattatagggacatagatagtgaacaattaatacaatggcataccacaaatactgacgaatttggtagagtcgtatataacaccacaaacttacagccattacctgaccaatttgattctacattgggagaattaaaaattgaattagacatgttaaatgtaaatataaacgcaaatctattgaacaaactaaccaaagataaagataacaaacaaagattcatattacggaaatgtggtaacataaaacacctacagatgtggcacaaagagccaaaatatgaagggggactaataatttttgactataattttgaaacatacattctacatttaaacaataatagtgtagtaataaatatggaaaattataaaacctgggcacaagagatacaaaattgtaattttataaatttaacctggggcgatgatcaaccattaccaagtaactctacatattgggttactaataacgttgaaaaagccactataggggacgataagaattataagcggatatatattgattttaaaagcataggcaaaacatatgaagaatgtattgtagacttattctttgataatgaagcagcagtagggttaattttagctgatgactcacaaccaatagaaattggagatttagaaataaatggccatttaatggcaaagagatgtacactcatctatgaaaactatggggttaaaatgacaggaaaatacgtggatgtaattgaagtgaaagcatccagctatacaagaaaatatacatatgagagatacgggccatcggaaattccagaatggcttgtcgatcgatatgaggccttacaaaacttaaatggaatggattacgcaaattatttattgcagatcgatgaagaatataaaccagagtataaaaaaattggagaagaagaagcaatagggttagggataaattacgatggtaattatgaatattacactaggccgattgaaggcgaaattatattagataatatagccactcaaaacccaaacttcttattagggaaaggtattagatggcatcaggtatataggtgcgtgggcacatactcacaaaaacctagtacaatcgcaaaagacataattaaacatgccaaaataatagatggaaatatagtaccacattataatttgatagtagctagcgatttcgacactgtaacagttgaaaattgcataatattggatggaggattcgataaagatgacttattcttattatgtttatggatgacaggaaaaaatataaagatatcaaacataacagagcaactaactggattcaatttaatttataacacaagtgacgttactgaatttgctataaatgattttaacaccagaggacttgatgatagctgggataaaccaacagcatataaactagcagaatttaacgcagtggccgatttaataaggttttcgcaggtagaacaggataatgatgaacgtattaaacacatttattacccatatgctatgttatcaaactattggaaagtcgatgataatgatataggcaaacttaaatggttagatgaccaaaatgaacattccggattacacaatataactgaggcaatatcttatctaggttaccaaaggttatggggaacaaatgattatgaacgaccatttaagcaagacacagacaaaacatggaatagtggattaggatatgccatgatagaaaacaataaatactggtggaataaaacaacaagcggttacactggatatttaattgatgaatcagaatggaatcaattaaatggtgcaagacgtgcatataaaatatcaatatttaatacacaacacagcttagatgaatatagcaataaagtaactatagtgccggaatctgggtggatgaggataggtggctctccaacatttttgcccaatttgtaccaaatgactgctgctaggttgaaaggtactaaagttaaacaaggtgaacaattaagggatatgtggtttagtgataatttagattattgggaaaaaccatacgattttaggaaattgccaaacgacaacgaatttatgatagggtggaacatacatgatactgaaaaacatgaaaaacctataggggcaatctacataccagtgggagaaggtaaaactacattagctaagaaacaccctaatatattcgtagatcatgacgatctattagatcaaagagaacacgctaggctacaaggcaaacccatggccttaagccaatttcaaaaaaatgtaaatgtcccagcagggaaaatattattgacatggggaccgagcactacaccaaaacatataccagctttagggtcagtaactttacaatcagcacctaccgggttaccagaagacaggagcagatttaaccaaagtaataggttgagtgtgcggttattacaaaacgtaccacttaatattgctttagatcgtaatgagcacgaaaggatatgtttagatatagcacacaagtatatgccagggctggaagtacatgaatatacagctagcgataaacgcaatatagcagcaatggctgaacacacattcacagaaaggtcatatgacggttatccacaatatgacaatccgttggataagtatgtatacctaccgtatatagcagttgatggtgataatgttacaccaaatgaaagtatcgttgaagacgatatacctatacaaatattgaatttctgggatgattatgaccaaactggattagtcagaattattgcaccttcaacacctaataaacttaaaaagccaaaaacttttgaacaaccaaacaaaataatcaagacacaaaaattaactttgacaaaatacccaatgcgtagcagacctgttaacacaaaaatggtatatggtgaattaaatgctagttttatacgtatggaagatcataaggtataccgtaaacataacctaaatgtgagggaagaggtagaaaggacatgcgatgcatattttacatcaaattggcgagaattgagtaaaagtttcccaaccataacattaaatgatgaagcaacccgtgagtggttaagaggacgcacaggagttaagaaaatagacaaagaattagatgaactagaagctggaggttttttagaaaatggcgttaacagctttaatgtacaccaaaaattagagtcactacttaaaagcaacccaataatagattgggccaaacaacaagttaggataatagtatggcaaatgagagggatagcggcaatgttctcaccagtattcatggcggcaaaaacacatttaaaatcactatttggtgataggtttgtgtatgcagatggttgcaggccagatgaattatccgctagagtaagattagttagcagtgaaaatgtttatttctttgaagatgatttagcaaaacaagacaaacaaactgacagacaagtactagattgtcattattatatgtatcaaaatgttttacgggtacatcctatggttatacaaatatggagcacaggaacaataaaatgggattataaaggtatatttgtaagaggaatgtcagatgaaaaagtacaaagcggtaccgccacaacaggaattggcaatgtaattacaaatatgatgtgtcatagacggatggtcgaaagggcaggtaaacacctcaagcttatgatggtgttaggtgatgacaacatggctatttttgaaggttataggccgaatgatagggagttaagagttgaaataagggatttctttaatatggaatcaagtgcggaaacaactcaaacacattgtgtatttttgcaaatgattataggaaaaggcaacaatggaacatgtgcattggggccagatgttataagattaagaaataggtttgaagttacaaatggtgtttcagctgacccggaatcaactataaacgcaaggtgtatgtcatatttgatgttattaggattaaatgaaactacattacaaataataaaggataaaaattatccaattgaaccagtaaattggcatgatatgacagcttcaataactacggcatcacatagatataaaaaatctgaagaatgggttagaaacgaacttacgatgttatataattatttaaggaaacctgaaagtataatgaaagaatgggaacactttaaatgtgtctaaaccccaccaataggcgctgaaggccaactaaagcatcaaacattaatcgcatactatctgagaaggctcaaatctaaggctaaaggagaaccaaggctcgaagaaataatttctaaatatgaatttgagcaaaaacaaaatttgacacatacaataacaacaagtggaaaatataacttaagtggaattatacctattaaaaacaattatggaatattactagataaaggcacaattataacttacatacgggaacaagaatgttgggtattaacgcataaaccagtaacaacccactttattggcgataacgatggaaatatagccaaccaatcgagacaaggtagttatgaattaagaaataaggataaatcaaaataccaacatattccagctgaacctgtcattaagaacaccttgacaaaagataaattaagacaactattagaaaaaaaatatacctataaaacaaaaatagccccacacaaattagattacactactttaacagatggacatataaatgaagaatggaaaaaatttttattggatgcttatgatgactgttcgtttatacctgacaatgggaaaatagccgtgtatgggatcataccaggccagttagatagggacccaggtgatgaagattactcaatatggatatgtggtgccaaaccagatggaagacacaaccgaatcaatgacatagttatgtattggccaactggtggtaggcatgcagctattttacgactattaccatggttattcaaatcaggaccaacgtacatgatgcgaggtggacggacaagaataaatggtctatgggcagaagatcaaatgatgtatttatgtgaacaatataataacggagttgttgcaccatatgatgaaacaaacttctggatggatggatgttggttaacggatcaaattgacaatgaaagtactatgttaatattagctatcatagcaaatagcgggcacatttatggaacagacgaggcaatagaaccaattttaaatataaaaattgttgttaatatatttaaaacaggccggacaattatgggtccaagggccgaccatgtgactaaagattttatgactcgccgtgaaattaaaattttagatgaacctgtagtaggacattggaaattaccacgtgacccaacccgacttatcgaattattgcaaactgaagcaaataaactaaaggattatgtaccacataatcccttaaatattgatagagatataattttagttaatgataaattaaactgccaacgcatatacgctaattttggcacaatcaaaagaaattataaaattataagacaagatatagttataagtgatggtaaattaaaatgcataaaatgtaacctagaatttgaggggaagttaacgtctaaaggtgtcgaaattaacgagataacatataaatatacacatggtgacaaacaacatgaaatttatgaaccaacaaataaaaaacaaatttcaaaaggaaggaatacatttggagttatacataggcatttacaaactggtatgcaacatacaaacaatttaggcaacgtgccattaaatagatctaacaatagtccatatttatggatggtagacagaataccagctataggggcagatatacctaaagagttaattaatgttcataaatattttgtaaataaatttaatgaattaccaactaatgaaactacagtacaaattacgacatgggattgtgaacttaagcaagggtgtgaataccaaattttatttaaagctaaaaatgaaacttgcacggtacaaccatggagatatataatcgaattaccagaactattttcagacaaaatacattatgctaaagctaggcttttggcgtgtgtatatggaaatcgaaataccaggtatcatataagcaatgggcgaccagggcaacaaggagaaacaatagagccagaagggtttttcctaccaaataggagattatggtcagttaaatgttggggtggtccaggtatggaaaatgtcttacatgaaggtaaaataatggaagccggaacttattgggattatataaagacagatataaacacgtatggaggagatgaggccctattattaagcataccgttaataacaagtactaataatgctaatgcagatagtatatttaacgtaagttgtggaccgaattttaaccatccagtagatatgtatttcatagataggaatatagtggtcaataacttagatagtacattaaaccaaaggttgtcaagtaaaatggacattaagacgggaattataaataatcaagagaacatttataataactttaaaaattacaacttaaaaattaacagtataacacaaaatccaacaaaacaaaaacaaaaactaccaagtttattaaaaccaaccaattctaaaacaaataaaataacaaactcaatcttacatacatactcaaaacggatagctagaaataatcaaacattaaaagagatattatatgggaatgaaaatgaaacagaacaaaaaccattaacactattgcgtgaaaattatgattacaagagccaaagaaataacgccgaatacataaacggagaattaaacaatataaggcacgcagaaagacataatggtataagacacaaaaatgggttatggttaagtggtctaaataaaaataccaacatatttaacgaaattagtgtatctaggaaagcaagtttggaagaattattaataaaaatgcaagcactaccaaataaggtgattagtaatggtacaggtgctagttataaaaggcacgggtttactaatatcaatttcaaaccaagtcataggaatgctataactttaagtgatgaaaatataatcataatcgaaactgatatatggttgaatcaatgccatgctgttttaaggttgttgccggcaattattggcagagaaacaattgtcgtaaatgataaagtaattatagatgcagatataagtcatggtcaatcagtatgcgtagttgattatatacacaattcatatatgggatgggcttaccttaatggtacggaacaaatgcataaagagatggttatagatatgattagttcatgtggtgaagtatattgtatagatgaagttatattatcaacaatattgagtaaagttataatattaaggccagaacatcatttccttaaaagtgcggattatgggacacaaccaacagattattatgattgttatggtaggtatataggtacatataatcgaatgaacatcgagacagcaattagtattattggtgaaataaccaaaccaaatagtaacactagaaataaagatcaaatagcttggtatacacaatcagattggccaggaacaaatggaacacaagtaatgggatacccacttttcacaaaatgtttagggcaattagcaaaattacaacaatacggtgccaaatttaaagtaccaacaccacatgtatggtgtgaacatttaaacccacgggcaactggtggtaggacaaggaatcaagctatgcacatcggtgaaatagatgattattatctaactgtagaatcagaattaataacaatatggccaaaagactgttcaaacaaaagaaccccaaggttcccgacagtacatagcactgcaatgaaagcctccacacctgatcataatcattattggatagagaatgaccaagcagaatgtaaacattacacggacgaaatttgctacaaaaataggcatttaagtgcctcgttcaacttacgtggaaatagtatatgcggatgcaaaggtaatacggtattatgtaaagataagaatatacgttgtgataaatgcacgacaatagaaaatattggcacaataatggatatacacccaaatttgtgcaaaaccgaaggtatcaatttggccaacttatacactgcaataggtggcgatgggttaactgaccaaataattgatgggatgtactattggaatgtactagctattagtaattgcgctatagctagagttataccaactaagaataattcaattattggtataaatatacgacatagtatctatcggcaaacagaaataatattaccacttaacacatacattacaagaagcaataatttccaccaccatgttattactacaataccattaaatgccacatccgaattcaataaagccaatacaaaaatcgatctaactaaatgtgtaataattaaatataataaagtatatagaatagacgattatgtaataggaaataaagtgagaagaggaatacattacacgcagaagagtgcctcacattatctccacgtacacaatttaaatttacagattttaacagctagtgtcaatagcaatagcacaacactaataccaacaggtgaaccatggaatatagggtacaatgaagaaccattaaggttcgtaccttgggatataaacaatttaacaaatactcaaaaccatggcaatgaaggtgttgctaatattagtggagaattaataactatagataacattttaaaagtacgtacaaaaccgaacacagaactaaaatcacaaaaagacttaattaaaaataggtcagattggaaacgaagtcaagaatatgacgaattacgtaatgaaaatggggcatatccacttggactaacagatcttggattaaaatcaatagatgaaacagattgtattgaagagagacacataaacaatataataaaaatttacaattattttaagaaattaaaaggtaatacatatattataacagcattaacaatggattacatacataagtttgaacctgaagttaacacaataattttaaccaatacaaaagaaataacctataaaaacacaatattattagaatgtactaatcgtgaattagtaacttacaggccaatagtaggattattaacagataaaaaaataatgttccagaacgcaggtggcccagaagcaaagccaaactctagacacacaatagacaaatacatgaaaggaggttcagcatatgcaaatgctttacaatatggaggttgtggagccgcaaatttaataggtaaagttggaactgatattacattagcattgaaaatattacaggcatttggttaccattatggagctgatgaactaatatataataactattggccagtatttgtcaataatattggtaatatcaagaaggttaaattaccatacaatactatatattcatggctatcggacaataatgtattaaacctaactacaatgtatgctggggaagaagttggaaaattacacgaagttatcaataataaggctatagccacaaccacgaataaaccaaactataacccatacataaaaacaaatgttgataacaacagtattaggttaaaatttaaaccgtggtgcaatcaaggatatataaccgcatgtacttatgaaaattataggagtgacaaatgtacatatatattacgtgatttaggcacaaatcaaacaggtaataataatctaccatttggtttacacacagatttgttagttacagggttcaccttatttaatgctacaaccaggccaagcttatgcttaggaaaagaaaattcacatagattgaggttagctataaaattaaatataaccaatatacataattatatacaattactagatggacaggtgtgcgtttacagtaatttaagtgacaacaacaatttaaatcatgaaagaaataacataaacttaataacctatactacagaagaaatcacgggcaccgaaagtatatattgtccaatgcaaggtattagccaaactggggcttcaatacgattaatagggtgcacaaataaaggaacaataatgcgtaatggcatgaggacacatgaattacctacatatgagagagagcaattaaatgccccggttaatacaattatagaatcaaggtggacaaattattcaggcggtgccggaaaagttactttaaataaggaagttaatgtaattaattgcattaacacactatcaatgtatagtcatttatatgggttagacgaaactataacaaatcaaaatttaccagaagggcagcatgtgcattggatttatgagccaaacaacgtgtatatctgtggaggaaataaaccagaaactatcattaaattaaaattaactgtacgagggattactattaaacatgatgggccattgtatcaactaatgtgtatgattaacattatattaggtagcaataatataaacgaaatataccatagtatggaagtatttaggggacaataaaggttgtaaaataaagtaaagaag

SEQ ID NO: 871 - DNA, 21004 bp, Ceratobasidium endornavirus C
  source 1..21004: mol_type = other DNA
cgtgcgtacagttagcaggccactgggggggcgtacagttagcaggcaagttagtgtggcccgcgtttaactgatactccaatcagctaatccaccaatgagtgcactcgctcaccccgtacaacacacaacacacacacaacgcactcgattggcaaagaaagaccaatcgggtgcaaaacctcattattcctggagcatcagcgggaaaaagaggaacgcactgatgcacgcattaaatggaaacagaaatgttttcaaagcaatgaacgcctacgcacaacgccaaaccgaaaccaaaattaagggcaggacctcccagcccgtcgcctttacaaagacacaaatgcgtaaaaggggaattcaaaagacaaagaactgtctacgaaagacatccaacaaatgtatgggcccgccagcgaacggccaaagcgactggagcaagaaccacaacaaatacactctcgttggatgcaacacgcttatgctagttgagccgcaaactgttgaaccacaaagcaacttgtttgaaatgcatgccctcgccgtacgcagattattgaaaaagaaaaccaatacaacacgcaacaaaccaacgaaatgcacgaactgcggcccccttgtctggttcgaacattccgatgagcagtgtcccaagaagcaacagccccctaagcccggaatgaagggccaatgggttgatggaatctggacatcaaacaagcggcttaagcgaatgcgcagatggaacaacaaacagaggaagcgaatgtctgtattgaattggaggaaacactggaacgcaatgatggtcaagcagttaaacgcgggacccactttagctagcgtgttgcggctaaattgctcaggcgaaaactacaatgccaaataccgtaagtatttcggcaaggctgctaagtacaccgacaaagaaacttccctgatggacatcctagaaaacacccgaagattgcacgcagagtcaatagcaatgctggagtcgaatgagcccatgaaactgggcggcacgggcgactgctggaaggttctgcccatcccaattgatttcgagtcaattctcccaccagtgacagtcaattacgacaaaaaggtgtacaaaaaattcatggcattggtctcaatgcgcatgtacacagacgtggcagaggccgcctttaacatgaatctaccgcagaaatggatagatgcgtggagcagtccgttggagatctcagtcatccttgacgctattagcgaagcagcagaccaagccgtaataaacgaggaggagggcaaagatgtcgaagtgtgctacaacggggagatgatgccattcctagatctttatgaggcacctggcgagttcaggctgtcaatggctattgagggcgagcagctaaacatgcatattgaaagcatggacggtgaaggagagttctctctgaaggaaatagaagaagcactaataaccatagaagacacccaacagttggacctgccaaacaagaccagacttaaagcaattctgggagttgtaccaggaatattccacaccacctcaatacaaagtctattgaacacaggtgaagtgctggaaacctccaaatggaaggccctagttgagaacagggacctaagggcagctgcattggccctggccaaggtggaccaccatgtgtatagcataccaggatgcggagaccgggagacagcagaaaagatgaacaaccccgacaaagggggttgggcactgggaatgaacgtacagtacactaacgaattgagcccaaacagttgggtgcaagcattccctgaagccgcagcagtgcacataagcagacaaatgttcagcgacagaccagtcaagatatacgccaagccgcaatggctaaatcccacagaccatctaaacgcaaaggataaagcaaaatatagcttagcatttttcaccgagacaagcttgaacgaggccaatctccaaacagctttaaacggctgcaggcaaatggtcgccgtcctgccaacttacaatgaagatatgccgcatctaagctcgaacgaggacgggaactacctaatgaggagagttgcaaccgacttagaagttgttagggaggacagcacccaagtgaccacacacaacgctgacataattagcgcgctcaataagaaggatctgctggtaatagggggcaaactctacaaagtgacaatcattggcacagtttgccatgacaccgtggtgagcttgaccctactagaggggaccccgaaagaattcagcaacatctttgctctagaccacaacagcacggttaaaaggtacacatataccatgcccaaattcgacgccactctagggttcatgatgcctactttcgagactaggacagtggacatcgatgatgagctactgagagtcgtattcacacacaacctgcataggggagacctggatttcagaacattgctaactcgatgtatcgggttcgcgcacaggcgataccacatgaagcactccgtgaaacaaagatcagacctcagcccacaacagcttattgatcatgctctgttggcagcactattggtgcgtagggcttacgtcaccagaaggtggttggctgatctctccaacagccctagatgggcacaagttgcgataaaaggaggctttggactggcgaacttagttctgcaggctctccacgaacacagtggaacataccaaaagttcgaaagctggatggagcaagtcaccagggtatcaggcagcgccataaaggacttcacaaaccaggctgttttcggcgaaatagaggcgtggatgttcagagctaaaacgaaagcttgggaatgttacagcgtgggaagcaagtcactaactgtgtcatgcctacaccatgatgattgcacacacacgggacctatgtcttgtttgtgctgcgggcagccctcgaacaggcaatggtgcacatgctgctccaggcaactatgtcggttgtcacatagttgccaacactcatgtagcggcaaccacaccggatctgaggtgtgcacatgttgcaatatgcccagtgatgaaccaggcacgtgcaaaaactgcaaaccagcaacagatatggagtatgacctggactacgaatgggatgagttcgttgagaaactgaaggcagagggtggcaagcctgcatcgaactctgcccaaccagtgctaccagaaggcatgatcatgccatctggaccctgttcccaattgtccaacggacaatatctccacaaatgtgcactgtgtgacagacactatagttacatacatcccctatgtgccaagaacccaaaccatttccaaagtgcaaaagcctgtccacactgcagcggaggaaaggctcagaaaactgacgaatatggtatccctctcaaggacgaacccaaagaaataccaggcggctggagacctgcggctgaggaagaggacaaggagccatctcccaggagtcgcaacgtcgtggtattgttgaagatggggcacactctttcggaatgcttggccatcgcaggcagcggagaatcatacaacaacctgtacaattggcagggtgacacctcaatagagctgccaatgataccgtatggcactcaaagctgtagagtgatcgcgaccgatttcgaggacaaattgcaaatccaaagaggagttacttgcggactagcggtgctgcaaactctaaccaacaaagcaaacgaagctgatgccacaatcttgctgaagaagtccgacacatacagttccggagatatggtggccttagcggaagcatggaaactcaacctcattcttttagcagaaaaggaaatagtgatcaccaagaacaaggactctgaggtattcgactgcattctggccaacgagccaggacattggacaataggaacagcaactatagatttcaaagacacaccgttactaaccaaagcagggagctgcagcacacaagatgtgacaaaaatgagaaacaaggccatggccaagggtggtgaccctgcggaaatgtgtttcagcgcagaaatcgtgctgtgttcagagcggcggaccatagaaaaaatgttcaaagcaaaaatagaagacggacacataacaaacaacgccagaaaggcgcacagaccaaaggccgggttgttccacttcaagttgccagacgtgttgcccaagcacttccaggcatgcttctccactgagccgtacaatgcctaccagaaagccttggagatggaatggaaacacagcgcgctcacaaacataacctcagaaattgccaacagactactggaggctgcaatgacggtggcatctgcccattgcttggggcaagaaatcaaatcggcacatagggagcatgccgtaaaggtggagtcagattccgcctcccaaacaagctcctttttactcccggcagacggaaagtggatggacggcgatctcattagacttacaaactcatctatcgatgaatttttcaacgtgagggttgtaacagacatggatagacgatcgaaggctataatcccaaagccaaacgtgaccggcctgttcaaatgtaggtacacaaagggtgggtacgtatccgcgttgcaaaccatagcaggcttgctgcccttgtacgccaggagtgtcagcgagggccagaactcatcagcgataccacataaatgtgtaattggcgtgccagggtctgggaagagcaccagaatcttgagcctagccacgagaaacgacctcataataactgccacaaacggcaacaagagaaacatgcgcgataagatgaaggccaaagaccagaagacagacataatggggccattggagttattacaggcggcaacagccaagaaccataaaaattacgaaaagatatacattgatgagtgcacgatggttacctatttggaatatcttgcagccacttccctactcaacaatcacagccaaaccccgtttgctgagaggattgagttgtatggagacgacagccaaatcggcgccacttgcataaccgccagggcccaggtgggcacaccaaccggcttacacaggtttgcgacagaggacaacactgaacattggctggaaagctacaggctaaagaccaatgccgcggaggtggccagcaaagtgactggaaaggcaatagtgtcgaaagtgggaggaaacctcaagataacgaccatgaacgtgaacgatcctattgccgcatatcagagcgcagttaaacaattcaacgggaaggacttcgtcaccctctgcttcaacagggacacacaaatagccatacagaagcgtgactcatccgtcaaggtggacaggatacacggcttccagggacaagaggccaagaaagtcttagtgctacaggagaaaccgacagcaaaaggcagcgtgagcacagacccgagatacacctatagcgcattcacgcgagcgcaagaccacataatatgggtcagcatgggattcaacagtgaagagtctattgaatcaagaataggaatgaggcacaaagtagagagccatgttggccaagctttcaaggacaaagtgaaacatttcatgagcatcctcagacgcaaaccagaagtaaaaattagagacgacgtgctggaccactacttcaaccatgttgtcgcaccaaagtgggagttgaaacacatatcggaagaagtggcccaatcaataagggcccatgcgagccagaaattcggcgcgtcagtcacattcgacgtgcacggaaactcagacgtgatggctttctcccgaggggtggtaacagccgtagtcctgcactgggacggtaaagacctggtggtaaaacaagacacttttaaggccatcaacaacaccagactgcagcaaatccacgaagcattgaagggcgcagaggccccacgtacacaagtacaatgggagacagtgatgcagataacgcgcaagcaaaggaggtgcatggacattgtaatggagtgtgttaagcaaacggaaaacataggcttgctcactagcatcaagtcagaaacaggaatattgaccgttgaaagcgccaacacaattgattgcgcagctctcaaactcgttgggtccaacggggtgcactacttaagcaacccagatgagaatgacacaatagtgtccagctcgacagaggaaaacacagctgaattgttgtctgccatggaaaggtgggtgtacgagttgtgtggtagccatgacgtgaaggccgtgcacagagtgctggcagtcacaggagcaatttcgaagatcaaatccatggcagcttcggcaatcaatgcgaccaacctgatgactgttgacttagatgccaagctaaagcaggagacagctgcggcattcgagtcagaaaaccgcgccaacctgtacgcgtatcagaagatggacacaatagaaggcagccagttttctaagatgcatccagcaagattaaggaagacagaacaatacgggtggatcacaagaggaaggtggatcccaatcagcgaatggaagacggcttctgctatagcgtcgatcacttatgttgatgagcttatgtcgggatggatgcccaagctagtggagatcatcacagcagccgaaactttggttgccggagccgtcggggtgtccatcaaggggtggtcccagcacatggaagacgacagtgcaacagggcaatatctagctaacaaagttgcccagctgagggccaaaatgctcaagaacgagccaaaaccaataacttggacaccaggagcacggttagcatggaatgacctaatcgccatcagcatgccagcctgtggcatgcattacacttctgcgcccaacctagtagacccaaattgggctgcggcagagcaagtagcgctgcgcatggtccccagtcacaaacggatcacacacgtcacggtcaatccgaacgccactctactaagcggtagatacagcgacgccacagccagaccgttgggtaacgcgtctggtcatttatacgatatgagtttggagcccatggaaactctgcttaaccgactaaccaaagccaacgtcgaaaaagtcaacataccagaggccaaagccaacctagagaatgtcatagagaacgccaaacggcaactcgccggagaaggagacatctggtgtggacaatacgacaccaaggtgcaacacagcacgacgcttgtgtccgcatcagcgctaagccagagcggaatggccgagcaaggtgcggaactcttacactatctgaacagtagtaaagaactgctcgttatcacaccaaatcttgacccccatagccgcaggacagtgacagaagttatggacactgatctggaaatgagcatgatgaccaacaccatgtacggggtcacattcaatgcttgcagagcactgagaaccggatttgcaaccgggcgcacccagatgaatggagtggatctctccgtagactgcttcgccaaaaactcggcgatttctatctggaaaatccaaaaagagaaacgcgtgacaaagtactctccactaccagagtatgccaaaacaggcatgcagactgtggaactaccagatataacccctgacttaatgaccagtgtactaacgaagaaagctgtgactaagagaaaacttacaatagacaataggatatacagaagtttgaacttaagagccctgcgtgaaggcaccagcttcgaagaccttctaatggcggctaggacaatgctgcacggcgtcatatactcaccaggaggcaccgcttggaagcaccaatcggactctagcattctaatggacacagcacttgtggtgtttgtcaggtgtagaaaattgctcaacaatgcaataggggcggcacgtatgctggctgacacactaaccgaaaacccgttgcgaaacaccatgggatacgcaaaagacttagccagagggctggctgctcaggcgcagacagtgttaggactgaactacaccgatgagatgtgggaaaaggccttggccagcagcgacaacaaagttctacacactatggcagacatgctacacacatggaacttcaaagtaaacgactatcacagagaaatacttcatggggaagcagtagaaatggaaatgccatttgaccaacccgtgccagccataaccaggtttgccttagcaaacctgctgcactggagatcactaggaggggaagcggaccaccagccgagagtgaggcggtacaccccgcctgccggcagaaaacaacaactgccagtgaaacaacaattgcgtgacgccttgactaaacaatccgcttggtggatggtcgagcctgaaatcagcgatcagtgtgacaggttacagctggaatacgactcgaacccaagtgttaacataggaatatggggcaataaggcgaaaatgaataaagtaatcgatgcattggcaaaccgcaacctgaaaatgtgcaaattgctactcacggacgacaaaacgaatttggtcgataaagcgggcactcaaaaagttatggccaaactcgcctctctaaacacaacgttaaacagcagaaaggtgcccgcacactttaaccaaacagcaactaaggccgtagcagtggcaaaggccaacccagggtggcctgggttcacttccaagttctgtaacagcatcctagaagaactagaagatctagacaatgcaaactggcaagagttagcttcattgttggaggcgggctttgcagtgggcgggctgaaattcacaaaagtcagaaccgcatcaataaacctcaacacctccaacatcgtgatatttgcaattggatctagaggcgacataaggccagcgcacaacttggcgaagcaactgtcactagacggagcatctgtcagcttcgtgtgcccaagcaactcttgcgagcaaacagggtccataaactacgtcactggccaatatgatgttaataaagagttggacaaatggcataagatcacgaattttggccctgaaacgttgagtactatcttcaaagacgagctagacaacaactggatcaggggactagactacgattccctcccgaccacaattgacctggtcataggcagcccagtcagcccgcagggtttgatgtatgccagcagccaaaacatagactatgttgacttctgcccaatgccactatccaacgaagccaccaacacgctgcagagagtgtaccagaggctgctgagccgtgagtacgttctgctgcaccttaaggccatcactctcgatttcaagaagctctctaacatgcactttgatgtggacaaactgctaacgtacccgcgaccttatttgcaagccaccgaggccaaactagcaccggcagagaaaggagaagtaccggtttgcaactttggctcatggggcagtaaatcaatcggggaaacgtgggactccatagccgacgagatgccgctaggggtgacgaaaatagtcacaatgggatccatgcgtgatccaaagactgcagagttcatgctagaccacttggatggtgccgaaaccgtggtgttagcgcaacaagggtccccactgtacgaaggggccctcaggaaggggatcactgtgctaactggcaattacaatttagctgagatacccacctcaaccacagtttggcaccacggcggagcagggacaacccaggaacttgctgccgccggtgtgtggcaggtcatcacaccggtaagctttgaccaaaaatattgggccaataggataacagaagccggtgttggtggcatgttcacacaagacgtgggtgatgtcagcttactcgatgtaaggccttgtgaaccggttttgcccagtggaatggacgtgagggcgcagggcctgtgcagtatgctcacgaaatgctacggtataggtgtaacctgggtgccaaaaggaaacgtctttgacatgaaggcggcgaacgtgctttggtggaaccagctaatcggggatgatttcgcttcggaacaaggcggagtgttcctgcacgcgattgaagacaagccacgtgtaacatttgacccccttattgaacaacgggagctgggagagagaatgacatgcggggcgcgagcgttcaactactactacgaccttgcagaaggcgacctacggttgagactcaagaacattggacttgcatgggcagacttagacaacaacggcatgaccaaggaccaatttacgcagctagctctgtgcatgggtgaaaacgttcaaatatatagtgatggcctgcaaactacaatcatctcacaaccgaccaaagcaattagggcgtattggtggcaaagcagggggcatgtagtggctgtcgaaaccaacagcaccctcggagaccaacaaaggcacaacgtgaccatggcaagcacaccaagactgaacacaaccaaatgtacacaggagccactggccgtttcttggcctactgagattaacggccaaatgcacccagacatgcacgccaggcaagcggacttcgaagaagcaatcaggtccgcgctaagcggagagcccatgaacacgaacaacccagcactaaggtcgtggtgtggacatctaaacagaatcacgacggaccgagttaaatctaactttgccattagccgcagagctgaccacagctggatagggagatgcaccatatcaactggccccggaaacgccaagctcctaaccagattgagaatcggagaactggtggctctgcaaatggtggacggcacagcaacgctgggaatagtggtgtttatagatgaagacgggtggtcacacttagtgacaacaattaatcctaaaaacgcaactggactgtacattacgtgcagcacactgttcatcagcaggggcaaacacacgggaacagttactggcactaaggcctggaacaatcaaaccaacgctgtgctaggtactgacctaccaattgttgataacaacgaagaaagggatcttagagccaccaaggtgctagttgggcactatgatggcataccacaccactggagcaaaagcccggccgctatctaccatgcggaagacctactttttggtgagggtatgctgcccgatgcagagatggtgcaacatctaaccaaatacgctggcatacttaggggtgcggtattcggagaccagaaattgtggacagtgccaatcattgacaaggataatttggcccgccactacattgatcaatatgaagccacaacgagatttggattcagcttcgagaatgagccagatttggaaatgctccgaagcctgagcaatggtctcgttgtagacagcggtatgcacaacctagaagaccacgtggggtacttcaaactgacattaaccacaaaagacttcgcatcaaaaacagcgacacaactaacagagatgttcgggccatctgacgcggcaaacccattccttgaaggtgttaactacttagccacaccagcgccgcacggtgtatactattacaaaggtttgaattggtcggtggctgcagacactgtgaggaagcccatcaacttagacgatctggtaaacggagccgaaaactattacttggtgtacactggaaatgacgcggacgaagtcaggagagcatctgatagtgccaccgcaatatacggcaaaggcaacgggttgcctcagattctaccatcagtagcaaacgtcaaggtggcagcaaacaagagagatgatctggtggtgctgtatagcgacgatctggatgtgctgctagccgcggacaaagataggtcattctgcccggcggacgcagtgcacgggaaagatgtccacctcggaccacctgtaaagggctcacccagcggttggggcttcgatggcagtggacccaacaaattgggattgagcacggattggcgcgtgtcgacaaaagaccataggtgcttccaagtaacactggagcagggatcgatgtacgactttgaccaacttgcccaagcccacggctgggaggacaacgctgcccagaatgaattgttggccaagtacaagactgcaagttacgtgctgatggacctagagttcaacggggaggagttcaccatgacttcgtttgggttcagatcctggagaggatcgtttaggccggccgagtttgtggtcaccagctctaacaattctaaagaaggagggctgtttgacccgagctaccctattggatcaataaagtacagagaaaatgaacggaatgaattcaggaacggaaattcaacaaaaatgcaccacttgaacttaccagatgattggagcaccaaaccggcaacatccgcagcgaatgacctactaaattccctagccaatgcattgtgtaaaataattgagcacaacgggaacaagcgagtgataattacggctaacgcagactggagcccagaaaaaaggtcgatgaacgccacatacatcaacctaacctatgatagccgaccccaacaaggctgggtcaatgtgttggcacctgacgttaatggttacacaactagtttgaggcaattgaggacaatcttatggtacagcccgctgcccgatagagactggttggtaacggtggtcggcggcagagatgactttaatgaagttgccaaagggtcaagagccgatttgccggagacgcgaggagtgttcaaacacatcaaaactgtcggaggtgcacaattgtacttgaataactgcacagggcacgctgcagctggtgcacacttgtgggatcgatgggttagcgacatgcagcataccagccatatatatggcaccgatgaatggttcatggcacagtacacatgcaaccacatgaggaccgtgatgacactcgaccagttcaactatgagccaatggcgtcttaccccagggtgcatcccatcgacatgctaccacactggttcaagaaagaagacaaagagagagtcatgcaaatgcagagcaacctctctttgactaacagtgaggatgacaaggcaatagcgaccaggatatgcaaaataagtaagccgcatcaccccagtgcaacaccattctccagattccaagtgccagccatgcaatacgccacctccatagacgggagtgtcgtaattggaggagcaacctaccagatccatgagaatggactcctaggctccgtatccaatgcgtggactaccatactaaacccaaagaccactgagcaaattaacataacacaagggctgccagagggctgtttagtcatcacaccagatgttaccactaagcccacatgggatggacccatagtaagcataaatgccagccacccctgcgcggaccaagtggtgtccctaccagtacatagcagaggtgagttgctatccgtcgcctattacttgctgctcgcggggaaaggcaagagggggatgttgctgactgatcaaactgcccactttgtagggaccgcagcaagggctagcacgcagccaggccagatcaaattgtatggagttggcaacgcgaatggcacacaagctatcggagtaataatcaccagtgatgacatcaacgtcgcacagcgaagccccagtagggagctagcctccataagctgctggaattacatgggagacagagccttcggtgacaaggtgaccgtggcgcaaaacttaccaaccaacaccccgaggtgggacgtcaggaaatacaaatccagccagaacataaccatggattgcgaaaaagagatgcaaaggtcgctcccagccgagtttaaacaaagcaagctaataaaaatacaagttacaggcagccttttacaagcagtcagaggccaagtggttagcacaagccagttggtggccgaggctactgcgatcatggcagctttgggtgacggacccatggcagaggatgctgctgaagaaatagagctgttaagaagtcttggggcacaaacatggcagattgacgcgaacgccggaaagaacccatcatggtgcagcaactgtgccattttaagagtctcaaaagacagaaacaacaccgacagcgtgtacttgaagtacagaggcgcaaccgtgaaaccggttcgggccggcatgatgctgtcctcccaggaccctgaagtaaatgacaacgtgccagaaggcgtgtggatggacccaacggagagatcatacgatggcgtccccaggtacacccagggaggcatgttgaaccaaggaggagcaacacacggcaaaggtcagtctagtaaagcgccaacggagaacctactgcttgcgtacgcagtggcaatgccggaagatgagtatgaaatcatgatgaaacatccaggtagtgcggggatggagaaatatctagtgcaccaccgggacataataacagagaaagagaaagaaacaataaagaaaatggacgatcccaggatggtaaatggcttactaagggtgatttccagaagggtggaacccggcaaaatactcgtcacatggggccaagccacggtggataaaagacaaatagcgtttgagcaaagcatagtcatttcaggacaccaaagtaccggaccaaaccagactacacgagacttaatactgtttgacaacgggcgttaccaaactataattgtttacgacgagtctgaggcggcagatagcatcaaaaccttgcgaaagagacaattggaaagaaatgacacgataaccacacataacatcaggcactcagcactggacgaaatggctttcaatcaaattcatgactacagaggtgaaattgacgcatctggcagctcagcagcaataaacaacttcgcatacatgccactcacagacccgatgtttggcaaaactgaagggtatgtcacgcatgaccatgcacctgagattccaactgatgacataatagccttttacgaaaataaggacctaacggacttggtaagagtacaagccccgctcaacaaaggagagggcaaaggctataagggtcataatttcccaatgggaataattgagtccaacaaaatagctttgaccccatatccgatttacagcagaccagtgctcacgcgaatggcgtacgcactagaaaatgccgttttcaatgtgttggcaagcgccatcacatatagaaaacacgaactcaatgctgcttatgaagccaagatgttcgtcaaaacgtatggcaatgaggaggcagaagagaacattgctagatggcaaaaaaacaaattgtacttcagcacagcgcaagtgagggagtggctgtccggaaggaccggaatagaagcaatcgaccaggaactgcaagacatattggagcaaggtatgttcaatgagccactgaacagggctaacgtacacgtcaaaatggaacaattgctgaagagtgacccggtgaccaacttcgcagcgcaacaggtgagaataatcgtctggaaaaagaaaggatacgctgctctattctcaggtgtgttcgatgaggcaaaggacagattgaaagagtttttgggcaagagatttgtctacgcagatggacttacccctgaacagctagggaacaggtgcagactggaaacgtgcgaggggttccttgaggatgacctaaccaaacaagacaggcaaacagacacggacacgtcggcatgcgaataccagatttacagaagcgttcttggggtacacgaggacgtggtgcagctgtgggagatgtgtagcgatcacgtgtactttaaaggagatggcataaaaggcaacttccacaagatcagagaaacaggatcaaagacaacagccataggcaacgtgatagtcaacttgctagtgcacaggcgattggtggacaggttgggtccaaaccttaagctaatgttagtgctgggtgatgacaaccttatactatccgacaagttcataaacgcccaagaactgagacgcgagataagaaattattggaacatggaatccaaggcagagtgggaccctctcagcggcgtattccttcgcatgttggcgtgccggaacatggacggacgcgtgcaaatggggccagactttgtacgactacaaaggaaattcgaattcactaacggcgtgtcagaaggatcagacgaagcggtgcaagcaagagtgctatcttacgcatgcatgctagggcccctgccgggggttatggacgcaataagcaactgcgacgctacagtcgaaccagtgccatggtatgaccctgtgccccagtttgaagcggttggggaaaaatattacccaaatgtgcctctggagcacaggaccgcagccgtgctagacaacatctctaggctcacaagcatgatgagggaaaggcacatagtggagtactcctggcaacacttcgccacagactctaaaactagggatattggctccctccccaccggggatcaaacagcaaaatgaatcaggcgaacgccaggttggtttcggtccttaccaaacttggattcgaggtgatagaaaactggagcggtggctggttgagtaaagggcaaatagggttagacgcatactacagcgcaaagctaatgtcaattattgtcagtttagaggctagggtggccaccagtcacatgctaactggcgcggttgagcccactaatatatttgggcaaccccccacatatcaggcaccagcacgctacgtgacggccaaagaagaaggtttaccagacatgccaaattcaatttcaaacgggtctgaggccactgaatgggctgaactggaatataataacaacatggcagcacgcgtgttcggggacacaaagagcactgaaccaaaaatcaggggagccatccctgagccaccggcagggaggcgatacctcatctgcactgctagaagcgtgtggggttacaattaccacatagaagaggttgtggaaatgggaggtgtgttctaccacaactctctgaaaggatggacctttaggggcgagccaatcccaagtaagagaattctggcggcatggcaaataggaacaggcgaaaagatggatttagcagctctccaagccgcatacaccgctgtctccagaacttcctcactaactgagggtttgcgttgttgggcactgtggaaggacacagcgttagtgcacccgttattcaacaagagtttgagggattgcgcagaatatggaatgttgtcgttcgtattgaacagccagtttaagagccggtgggccagtctgttgctcagccaacatgccatccaatcttggcactcatttatcgaggatgggttgcaaaaaccaattggactcactgaggcactgcaacaactaagcccactatgtaaggtgcgggctttatttagattacagttgtgcacgaccaactggtgggagccgcagccaaggaacgcaaggatgtgcatacctgcatggaaggctgatttgcaaaacgtgaacgaggacgtcatgtacagagatgtttggaagcacaccaacagcagaatatgcatattcgacaggaaaacgacgtacgagacaggtttagtcagctggggtgaatacgacagaaacacaggggactgggtgttggactacagccagccaaacccgaatttgcactggatcaatagagtcaagagcaacagcaatccccccagcattgaacaagacgtggtggaactcgtacggcagaaagggggcagcagttgggaaatgcctgccgggtacgatacggagatgcgcaggttttacgaacaactgaaaaagacaggccacttcagtgaggtgcgttacgaaattgaatggtctggtctttattccgccttatattacgttgacaaaaagccaaaagtctgggtggtcatggaaaatgaaaaatgggcggttctggcaataccgtggcaggttatcatttttcacaaggaaattggcaagcacgacgacaccctgccatttgacacaatatcaacaaggacatggtgccgctcaataccagagatcgaccataggctaagcaaggctggcaactctacggacaaatacgtgaccgtcccagcatggcaaccggtaccgactgaagccaagtggatgaataagttcgtccacattaacaggggagtgtcaacttccaaactagctcaagagcaaaccacctgtggacatgcccaaatcagcgggcatagggtgggccagaaatcgctctgtgccacatgcttattggctactgatccgaacacactaccgggcctgttaaatctgcccggcattgcgcctaacacagccgactttatacgcaacaactttacgagtgagcacagctttaacagagacgagcaacaaggagggacggcataccatgacgtaatagcaaaaaatgactgttcctacctcagagaagtggtggatcacaccggaggcacatccaccagacgactatatttgactctacaacgaggggcgcaggccgttgcatatggaatgattaggttcccaatcccagtctgggttgatgagagtatgccagcacagcatctgggacatgtgaacttctatctatccccccctattgaaatacaaaccaagatgtatccagcttacatgccagttgaatttgagaagctgaagtgcccacggagctgggcccaaaaattaatgggcggcagtctgtttgcactacattacggggacggcagcgaacggccagcgcacacagtgatatcaggaacatttttccatgacatgagcaagttcagcagccacttcaacaaacagtactggatcatgactttcgagcatgatgatttgtattacggagctggattgaatggcggggtgcaagtatatgtaggcaacccgagagtcaaagatataattaccagagagctagcattgagcacaattgaaaacggcagtcacatgcgtgacagagaccacttgagagacctgcaagacagaatttcacaatggccatcaaacgactttttatacaatctcaacatagatttagcatctacaaccccaaaaccagctctgccagcaccaagcggtggactgatcacggtgacgtttaacactccgaatgtacacaatttcacgacagatctaattgcaacaggcagtggcccgtcagtgcacgcaaaacacgatgccaccataatgaagcagcaagcaccatttggtagggaagctggggcaagcggtccacacaatatggatttggtgaagttttggtcactttggcaatacagtcaagagtgggcagatgaactcggcggcatagtggaccagttgaacgtactggacaagatgaagaagaaattcctattatccacgcacgtggtcaatgctccaggatatgaaatggtgtgcattaacaatgagccgcaaagcttctgccactggattaaaaccagcatgtcgggcagacaattggcattcgttaggttggctgtattcttgctcgaagatagacagagcagctggaccatctgcaacggacagagtcatgaaatgcacgtaccatccgggggagtgtaccacgtttgtagaccaaactaccatggagctatgttgaaatggtttgtgtgcgacgggatagacattgcgagcaacatggaagatgctctagactgttgctgggaacctagcaagatatatgggtctgatgaattcctgttaaatctctgcatcatagcgcaggggtacacgctcaatagcacatgggaaggaatcggaaggttggaaaatatatgcccatttgggatcaccccagccaatgtagcctatagcaacacaaccaggcttcaacgaataccagcaggccaaaatcaaatagctagagttggtgagcgacaaacatcctatcagttagcttggccagagctaggtctagccagatacgggatggacaaggtgagcatctaccaacatcacttttacagcggagaggcagcgaatggtttcacaccttcctcctgcatgcacggccactgggaccgccacgagagtggcagctactttggaggcccaccaaaacctgggtgcatgcataggtgcgaaaatcgagaaattaggagccaaaccaatgctggcatccacgggctagatgtgcgtgctagctacaaccgacccatcagcacaaaagatctgcaagcgtgggactatctcatgctccagctagagacttatattgacgggctgccaaccaccaaactatacatgactgccagtatgtcattccgggcgcatgggtacttcataaacctagtgcgaggccaaagcaacgcgactgagttcaaaccaggggccatggtgatcaccctcgctaccgagactgggatctcgttggcatacatgcgcatggcagtggccttcctgaaaccacgaaacttggtggtgcgggtaatgaacggcagagtctaccagggatacaaggaagccatagatgcagccaacgcgatacctggcaaatgggtacatatgaacggggtgatccctagccaccctccatgtgggggagtggtggaggtgggctgctaccacggatttgtatccaaagctagaggagcatgtggcttaatggctaggacttacggtggagatgagctattcttggcctgcttggctacacagactgttacttacatgatagtcaacagcacgcatagaaggttagaatggccgaccaccactcaagtgccgcctatgacagtcaagttccttggcggaaacttagatagcaaagggtggtgcgctctccaaggaaccactttgtacgagcgcatacgagtggaaatgaagcaagatgcgccggtcttgttcaagcatgcatacacacctgaaggcaacaagccaacagccacactgcaagagttatacgaagctctataaattacgtgacaaaaagccgggtaagacccagcaaagagatgtgtgggccgcttgccccagcttccctacc

SEQ ID NO: 872 - DNA, 19406 bp, Ceratobasidium endornavirus D
  source 1..19406: mol_type = other DNA
gggcacttgctggaaggcgatattagacgcttgcgaggagcccgacactgcaacttacgatctcaccacatatgacgttccccagaaaggttggctcaatgatgatgatggcaacgaagtaccgtattatgatgaccttggcggtgccccttgttaccctcgtaatgagctcgtgcctattgacatgtattacctcgacaggagcatgccgattaaggagcttatctctgagatatgggacgttttggtgggcctctcagacatggttaaatacagacatgctggtgttaacatgtacctgaggatacgcagggccatgcacatgaggatcatgttgactgtaaccggccccggccaacttcatctgttggaggcttggcgcgacgaggaaccacccgagtttgagtcagcaatcatggaaccgcatggcgaggtgctatgcaccaacatacatgaactttacacaatcttgcatccagagttatgggcttcgtatgaaccttattgccatgacactgaaatggccctagtcaatgctgagcaattgtcagaggaatggcaagcagcagagcaacaaatcaactcattggaggtcaagaataagattcttggtgcaccgatcggggtcgtccgggagcgttggtccacacctcacgttggtgacgaaaggtcccagaatgttttgggaataagggctgtcatactcgatggaacttatgggccgtggggcccaaaagttggcgttagccagctgatgtctctgttgcaaaagaccggcctcgtgggacccagtgcatacacgccaggtacgaccgactggaacaatgcagttgagcatgacttggtagtgatacgtggggccctctcgaggttaatggtcgaaaccgtcaaggtttcccatgacatggaccaatccgctattgacagcctggaaagagacctcccaaatgtcacacttgccaaagtgcctggaatacccaatccccacagcgtactcgccacggtccggaaagtgttgcacaagttgattcaagagagttgcaaggagggcattattgatgtggggggcaaccccaggcacaataggcccatggactggaccatgcgacccacaactttgattgaagatgtggttcggaaaatcacatcccctaacgattcaaacacctgtgagcatatgcttagtgagtgcacctgccaccaagcttcaggcaaacctctcctttttactgatagtatatacgatatcccgccagcagaggtggttgcagcccttgacctgaggtccctgtccaccttctactataccatgaccacaaggcatttcaattttgacgacactgaacaacaggccatgggattcgaccaaggtgtacaagttgttagcggagagacactactcactttaacttcaggtgaatcctcaccttatgaaaacaactacggcaacaccaagttctggcacagtgttgacgtcttgtacaccggggtgagtgtctggcgtgttttcaccatgcacgctgctggttgccacattctgcgcgctggcattagggttgtgcaatctgtagatctctaccgtgaggtgaggctcttaagtgtgggcagtcccgctgagacaataatggtgccagtgatcaagcgccacaccctccttagctatgctgggaccgattacaacatagtgagggtgccgcttaaattgcaacctgatttattcaaccaattgtgtgatcggaacatcactggcacgcttgggttggacaaccttgtggagtatgggctgggtatagcccacagcaaatactcaatggctgacaagtccattggcaacatgcacatcagtgcagaggatgttaagttgcacgcttatttggcaatgatgtatatgcgccgcgtccacggcggcattgatgagctactcaatcaagtcaaccagggtagctttgaacaagtcagcaccaacttagtactgtttggtgctgccgccttacagggtatggctaagagggctagcccagaggtcaggcagttgctcaagaggtacgccaacttattggatgtcacaacgcttcggaccaaggggttggatggtgaaccggtgtgggaccagctctcgctgttcagggcaaaaggcaccacgagacatctgaacatctatgactgcgcttccacacaagatgcaggtgcagccttgcatggctgcgattgccacacacctggctgctggcatgttggggaagacagttgcaaccactgcggcagcccctccgatggagacatgtgcacttgttgtaagatggaacaccacacgcacaaatgctcacacaattgtatttacggccatgccactagtggaatgaccaggtgtaaatgttgtgacgttatagacgattgcaacccttgcaaaaattgtgagcgggagcctaacctctatgatactattgcggctgagatgctggcaccgttggtgaattatatggaaaaaggtgccgtggaaaaagttgtcaacggcgtcaataagcagggcatccctgtccgcaagccgggcggtgtcacgatcgacaatggtggcatggagcatacacatgtttgtgcgctttgtggcaatagctacatgcacaagcacaactggaattacctacaacatcctgagttcgttggggactgcccttggtgtgaaggtgggaaaaaagctaagaaggttggtgaggacaaacgtgtcggaccgatggtggccatcaaagagccagttcccaggagctgggccgaggtagtttccacccctcgccctggccagcaagtcacgccctcgacccctgccgtcaaggcaccaacaacggagccagcccaagcacagccagaggacaggggcgaggcagtcttttccggcccggatctgagcaccgtttctaaactgattgatcttgttgggccgtttgttagccagtgcatcactgagggctctgaagcggcatttgacgacctacaacgaacaccagcaccccagtacaccacgatactgtacgcgacaggtgcgggcatgataaccttcccttcagatagagttcgcgtacgtaatatgggcgtaatgcagaactatcaagacaagaagtgcgttatgcattccttgcgtgtggtttggcaaaaccccccaagcatcatggaaatggagtctacaacgaacaaggacggcatgctgtctgccgtggacgtcatgttgatagctcagaggtatcagcggcccatacttgtactgcatagagagcaggaggcattctgctaccacccgtacggccactcagggccgacgccaaccatcttcatacatgaaatcggcagtggaaactaccactgcgtacccgctgaaggagtccagctgggattgcatgcagggttcccctggcccaactgtgatttgagtcagggcgacctggccgacattattggtcagcaattgccctcatttgatgacctcactgtggacgaacggttggccatgtacgaccctgtgttgaattggtggaacaatgttagggccaacgccaatagcagctcaactgctataatgtttagggacggagtgatctcaaacgtcagtgtacagacaagcaaggtcaaagacactgggttcagcatagatgtgccaacagaaatggacaacgctgttagagcctgtttacgcggcgacgcaaagttcttcacggaggacgtgagtacccggtccactggggcattctccatcaaggagcgcctaagggcggagtggatgctaactctcgctgaattgtgcaatgcactgacaacccctcatgtcggcagtgtaggcacattcatcaagcctctggtgtcccatgataagagaggggggctcagctacttcactgtacctaatgaaatgaagataaagaagtttgacatggtccactttggtggtagggtgccacagccacgcatggtcattgccaccatgatgagcaaaggtggcggcactgtcgtgtacgttaagttgcttgacgaccacacaaagcgtgataccttcatccctaaagttaacagcggatctgccatcagacggttgatggcagtgagccgttgccaggtatcagacgactttgtgcagggcattgtaatgggtgcagaggccaggtacggtgtgcccggctctggcaagtccaccacaattgcatcagagtatgacgaggacacaactgtgactgccatgactagcggcgcactggatggactaaggtctaaaatatcagggaaaaatgtaatttcagttgagcggctttctcttgaaaaatgtcaaaccagcacattggtggttgatgaggcaagcggtctcagtgtgacagaccttgcattgctgctgacagacaaggtgaaaaaattagtactgtacggtgaccccgagcaagtgggaataattgacatgcattccgtcagcgggcacaggacccattacagtgtgatgtcgctggccaaaacaaagagcctcaacctcaccacctacagaatccctaaggctgtaggttacgagatgcgtgacattgtgcctaaactcaaatatggccacgaccgggatggggaggtggtgttggaatggcagcaaacggcggacatcagcatgttcctgacaagatgtgaatcaatgcatgttgagtgcatttacgtgttctattcacagcacttgtcggccgttacgcgcgcgattaaacagtccaactacaagggtaaagtgctcaaggtgcattccgctcagggcagtgaatttaaacgcgtggctgtctggcagatgggtgccacaacactggatgcaggcattcaccttaagaccagttactgttatagtgcggcgggccgcactagcgatttcttgtattggtgcagcgttggctgccattccgcaggttccagcctgagggacaggatcatgaacaccagcccacgtggtcaattccccatggcgtccggcacaggggtgctggacagtgtagcggaattgttgaacctggctaggagaccattctcacaaactatcaatgatttctcgtccacaggtgcagggcattccaagtggttcgtaacagtggccacacaaatccacgatgagataactcacacagctgcaacacgaaggaacaaggtcaccattgactatcaacaaggagggagaaatcgttacactgtcaaagtgtctgaccacctgggtagtgccactgctttaattagcagcaaaattttaatgttagaaaagacagggtcagggccggcggttgacattcttagtgaggtgctgcaatccgtggctgagcaaccattgtttaaaaaccttgcacttgtgcgtgacatgaacattgggccatgtggtgagagcttagtgtcattcatgtctgacgtgctaatcagcacgggtgccaatgtgcttgaggtatcacactcagatgtggacggaaaatccacggggatctgtcgcactcaagttggcacgtacaagttcacattcaccgatgataggttcgacctcgaagaagagccagaatacaacactgagtggccgactgacgaaggtcaaacagttgcaaacctattggtgtacattaggacacttgagactatggctgatgaattgagcagcgcacacgaacccacaggccagggcaccaccccgtatgaacgcacccttgatgagaggggtgcagttgaacggctcaagtctgaactcagtactatcaaccctgatgtagaccttgtagttgaaagaatagccaatacagaacgtgttcagtttgcagttaagattgacaagaacaggggctgggtgaaaggcaaagtgcttcgtgctatcctagaatgggacgctacgctaggcagaatgctagtaataaggtacaaggttgcttacatggccgtgggcaaatgcccttccgccgaggacttggaaaggataattaacaattccttaaccggcttcaggcttcagctgggtaccgagactattccgcaaataaccgtttcaccagaaactggcgttgcggcacaggacccccctcaagtgcccgttgccgaggaggaagagcatatccccgcatcctctggcggcaccggcgcaaccacaagggtgcatgctttgaacgcagacgacgacccagaagtggtggaccagattagccctaacttgatgccggggacggcccgttgggccatgcacataatcggaaaatgcttcgctgacatttcaaagaatccgcagcactacttgagcaagcttgcgataggatcgttcgcaccggtgggactggaggcggaagtgatcaggtcaatggatctgtttgccagggcgttagcacgtgtgtaccccttgcagcaaactgttaccaaccccttgacgaatgagcaggtaacatggaccgcaataatagaggacctcgacacgcttggagtgccgtatgtcaggggtgtggccagcgtttcgggcaggccacctctaactgggggtaggattggcgcgcccttgtctgctaatggcaagaactgccagtgcaaccaccagcacgacaaaaaacgttgctacgtcagcagcacgacgatccgcatcattaggacattagccgtgttgtcacatgtagtgcggggcagtcttttcaccctcaaggttggtggtgttacatataaaggcaccgccgttaaaggatgtactgcatgtgccgggttgttactcactgacactaatgaggtacccctgctgaagattggtgcgcagtatgagaacttttggtacagggacgtttacatcgcgcccacagcagccggttgcctagcagctgcacacttcggtttcgtcatcaccacgaagcacattgatcaaggcacaccgttcgcaactatgaaggagccaaaaatgttaaaggaggccagagcattatgtgaaagcatatttgtcgttgaagcttcacatactttgggcaatcgggaagaagagtcatgggtagttgcagagcgcgtgtataacttctcctggggttgctttgagtatctgattggaaaaaaccaaaccaagggggccagcaccacagcgatgattatgggcggcatggttgacgattcattaggtatactcgatgaactcaccgctatttgcaggaagctagattggaatatgaccagccgccacctggccacacatatggagtgtgactacaccatacaggatgctaagaatcagaatggagatgacgttttctatttcgccaagaactgggatgtaattatcaacggcggctcaccccaattggcagcgtactgctcagccatgtcagatgctggggtggttgtgtattacaatcttgatgggagcacaattaccgtgcattacttgccgagtctcaacatattggtgcaggcagcacacactgcagagttggcaaggtgtaaaggtcacttgccgttggtagctaaggcttacgaggccctcaaaagctttggtgccaaccacgacaccatacatggccttaagctcagtatggatatacataggtcagagaccaccaaggtatggcaatatgtcagggataaagcgtcacaggtggaaaacatgagacatggtggactcgctacaacgcagtacgtgcctcaattgttgatgaacgccgttgatgcccacgaccccactctgtcagctgcattaaggcttgcaggacacaacaagcctttgctttctaatggtgtcgacgctggcattgagcagctccacgatacttacgtccattacaccgtgggccagtccagggtaaccagtgtgactgcgcacccaggcaacctagggctggcaggtcgctggacttggaactgccaaccaccaacagaaattaacaagaaagattggtacttcacacagttgccgatggtgagatccatgataactgacatgatcaaagtgctaggcaataaagggttagagactgacagggggaaaatgttgaatgctctacttcagcacaatttaaagccaatgtttaactctacgtataggaacacggcacaaatcgttaatttggggttgcagcttgctggattaccactgacagaacttagcacctatgcgactggcgagagcacagtcatatttgggctgatcccaaaacagtacatcccttcagatgttgccaactggaatgatgatctcactgtcatcagctatcttgggtcgcaagtggactacgcaatcaggtcagagtggatacagtggctgagagtgggcggagtttacagctgtgcgggctacacatgccacgtggccatcaagggggaactgtttttccattcattggtgcgtgtagtacttaccaaggccgcttgcaccttacctcggtatcatagcaatagttatgaccaggtcaaatccaactttgtgacctacagagtaccaatactcaacatcacagcattcagggctggcgaaaggggcattttcaccagcgaagtggtgcctgtgccaaagaagattaataggttgcttacactcagggcctctaggcctggtacctcatggggcgacatgttgcagtatttgagaacgttgcggtacaccagctattacagcgcgacgggtgtcttcaagagggataagtcttggataaagcaggccataatgtgggcattggcggtgtatattcacgatgcgccgttcttgcaactcattaaagacgcagccaatcttgcacccaccacagggttgagcggcaacaccactattaatgtgttagtcgaccgtgctggggacttcgctaaaggcctgttggcggacgccatcaagagtctcaacctggacctgtccatcacagaagttgccaccattgcagctaagtatgcggacttgctgacaaaccggggtgcccaagccaatgaactgcttggttacatgctggacagtagtgtcagcagaacagaaaaccaagtcactttcacgagacaccataatggtgctatgagggagatcagtacacgtacacttgaccccataacccatgctgaagatgtcatggcactacacaacaccccacagaacgtcgggggcggtggtttggcaattggcaggaccgtgaccatcgaccatgattacaggactcctagtggtgggctggcagtttgcttccccagcggcactgccaatgatagaatggcagtgatggaagtggcaaatgccttagcaccctatgttacactgagggtgcaagccacattaaccgaccgcgacctagttaaggacgcaacggctggaagcaacttagagactgcggctaacgcatgggcacgcaacatcgcaagtgtgagccgccacctgaaggaacacgagggtgagaagcacgggcttgttatttgtagtgcatttgacgtgccgtcgatgtacaagtgttatctctccggtggaatactaattagggttagcggcatggcaatgacgccaaccaacatgataggcgtgctggggaaacccggcgtgggggctaactcagttggttatccattgaacactctcatgtgccggtcatggttcagagcagacgatcagggggtgatcggcaaattccttgaatgggtgaaccaacaggtcttgtatgagatattgcctgaatggtgctgcagcagacatggaaaaccttactatggctggcatagtgacacaactatgaaaaagggtggttgcaaaactgaggtgttcctgtacttgaaaggcagcgcacaaataactgagtcggtgttgagccgcatgggcttaacctactccctctacgacccaaccatgtcagacgcacatagtgtacagcacgcacttgactttagtaaccctggcgctgtcaatttgatgatacatgcaggtggtgttggcacatgtcagagttgcattgacgctgacattcccttcgtgatagtgccggagtttggtgaccaattggaccacagccaatggttccattgggctacgctgcaaaaactggaggagcttgggatcaataaatatgcagagatgcatagacacgaattaatcaagaagacctcagcgagcaggccagaaaaagttatgggtcaactcgtggccaaaaccatgcaaacgctttccgaaacataccctgaaaactacccgccttacaacgacggcagcaacgacgtcaaagacgagttgaccacactgtgggatatggcgtgccaggatgagcccaacgctgccggccatgttaagagggtgggctcgttgatgtcatcagaatataaggaaacaatcgaggcaaaactgatgcgcacccaggatgaagtctttagagcaagggcgagaattggggcccaggtcgtgctgattttgatcaatgatagatccacaccgaaacagtacgctgatgggcaattggtggtgaggatcaacccaacaatgaaagacgcgaccagccatatcagcattcactgtgaacgaagtgaagaagaatggttcaggctgtcactaacactcatgaacttcggagccaccaccatggcgttgggccaacaaccaaatgcggcaatagcacgttggagaaataataaccaacctgggctagttggcatcatccccaaatctgcagtggactctagctggatcactttcatcaaaagtggggccattcacccacgacgagggaagtatgctgctagccccatcgacttgccccacttggtgaaagttatgtgcatgatcagatcagtgcattccagtgagttgggttgtagctacttcctggcaacctcagaagccctttatatcgatgaagccagagccaactgggttacattgttacctaacgttccttcctatcagttgtcggatggtgaagtggttatgggtggattattccatccggaaggcacgttttggacgcatcggtcaggccaaaaagacgacgggcaaccagatgatgacgacgacccagacaccggaaacagtgatgatggtgatagtgacagcgaggatgatacagagtaccatgatgcacaaactgaccaagcgggcagaatacaggcattagctgccagatactcctcagctgaacagcaaccgtctgatgatgagagggtttctgggactgaaggtcctgcacgtttcgatcaaagggctggggcactggcagtcccaccgccgcctaagtccaatttaaccggcctaactgagatagaggccatcatgagtgaagtagagcaaaggcgggaggcccgccattcagggggctcatctagcctcaggacgtgtgcggaaatgagaatcggcaggcttgtgacggaccctttggacttcttttatggtgcagccaagctggtggctgcctcagcggcgcgcctccctggcgaaccaccatcaatcgcgttggtgcctgaaatagggccaaacggcagcctatcattggaaggcctcttcaccttaaccttgcgggaggtcaccagtgccatagaagggcgggacacgatgactatcgcgacattcgcgtcactagtgagcaccatgccagaccttgaagggaggttgcagctgctgggcactgcagaagataaagcgcagatacgagttggcctcactgtgatggcactacttagggcactgtctttaagccaagcagcaagctatgtgtcggcagtcacctggaggtccgtaatcaacgacgtaattaactccgtagcggaaaaaggtatgattgaagcgttcaacgtcgtgtgcactgacccttatgacccagtgcgtgcagaaatgtaccatggtaccaattggctactggaccccacgaaggcagctgaggccatccttgatgagtaccttagccaaggcaaatacatccaccctgggaatattagagccattcgtgtcagcccggaattggctatgtgttttatgttggctgtgcagacgatgcaggcggttgtagctagcactgagcctggcaacgacaccgtggaccccgccgtacaactgattcaatccatttcctctggtgaccacgatgacaacatatcagagttcatcgggcaaactaatgacaccgcggttgatgagctggtagacagcttccacataaataacaattgggtggcttcaaagatccgatcagccatgtacggtttccagcggtcagtgcggattgggaaaaaattccaccccctgcgcgaccatgatggggtggaagccattaaggcattaatcatctcactcgttcaggtgcgtgacggggcccttgcctgctgggcgtggtgcaaccccacagtgcgcaccaagttgcaaagcagtcacaaaatagcggccctaattattgccaagctcggcaggccattcatgtcattgggtagcaatcacccagaaggcacaacattgttgcaggcaacatcacaagacatgtcaagaatcactaacgcatgcagtgatgctagcgcaattgggcatgcacgcggcatggcgttaatgaacagagtagtgcggttaaggatgcatgtggacggggaagtattattcgaggtgaacgacgatgacctggccacgcaagagcatgcagatgcaaacaacatgcgcgggacctttttgttgacacacggcacgtacgacgggttcgttgacggtcgtgacgggtcaagaacggcaagactgaccgtggctaccttccctgaggctagctgccggggcagggtggttgatccagtgttgagtcctaagaatcagggtggaacggtgatgataagcaggtttggcggctgtgactggcaacctgcgtcatggtcgtggccttgtcacattgccattgcagcattacagagaatttcattacagcgaccacacacactgccagttagtgacattggtgaggaagagaacgacggcgagcaacgacccacaacggaaggcagtgcgatgaagaacaacaaaatggtctcgtggagggacggcgtgacagctgctttgcctgtgtcaacgccaccaaccccacgtagcaatttggagatgttgcagctggagttggacttcacggatgaaggcacactcagtgctactgattcaaataacacaactgagttgttggtcttggcatcacacagtatgcataacaaccgactgctcaatgtgatgttgagggagcacaacgaattggacgcactgggggtcaacaccacattggggaatctttatctcatagcttggtctgagctgcatgcgaccatgaccgcacaggagattgcaggtgaggagcgtcaacttgtcgacgccctaatggccatggccagagtgttagatggcgccggtaatgacctgatggcagccgtggaagcatatgagaacaacaggcttacggcactagtactaagggcaggtgaaactgtgtcatttgcgccagcaatcatagatatttgttgctccggcttatggtcaagcaaagctgtcaccaggttggagctgttgcaatcgctaactggtaacagtgatgaacagtcagagtcagacgaacaaatgccacccagtgacgacatcaatgccactcacaccagtgcaacctcagaagatggagaagcattcgcgcctcaagcccttccagatggatgggccacattgccttggcatgttagccacttcatcaactgcctactagcagtaacgccttcaaacaagctggcattgccactgttgataccttgcgtggaccatcagacgatccagctagtgcaaaactgtgaccacccccttagtggcaatagctgcttcatccatcttttgaatagtatatctgaagagacgttgccaattgtggccaacattgtgcgtcagatggagagtgacgggcagtacaacccccttgagatgctagagctgaagacgttagtgggtgatgagtttgggcttgctgggtcagaccccgtgagccctagggatggagaccttggtgagagaggcaatcgaccgcttgacagggtaagacggttaaggtctacattaaaactggttgcattgagagcactggagtcatccgggtccagtgggctagcctccggtggccgggtcccaagtcgagtggaaaggctggcagatgcaccagaccccgttagcacgacggtggcccgcaataaacgggtaaaagtcgacttggaaagtttcaagggaaaagccactgcactgactgccgtagttgatgcggtaaacagtcaaggaaaagtcaagtattttagctacggggacttgtggggaatacccgactgtcaatggctgagaacgttgattgatgaagctaacaaaaattacacgcctttttcacactggaatagcaccggcaacgtgaggattgggtggcccaacggggcgattcaactcattgacagcttagagaatgtgccatcaggcgcttgggtgtgcgatggggattcaacaccaaaagaagcattagtggaaatgtaccatgcgtacgtccagcgtcagaccggcacacccattgcgaaaaaccccaggcgacttaagaagaaagcagacagggtggctgcagggaagcataagttagccacagctgcaagaaaagtggcacaacaatatgagaacacaactgccatgctattaaaagaggtggacgacggcaccataagtgagagcgtttacccattggcttaccaccatcccaaatacgtgcagtacgagaacaatgcggaattcgaggccgctgaactgcggcgagccaacaattggataaagaggtgccgcaattcccgcgggggaaaatacgacttgtcttgggtggtggacctggcagaaatgataccacctgattggcgacaagcgttcgtcgacgagtttaaggggggagtgcccactgtgactgaaaaagcaactgcggttatggtgcaaagcattgggccacagccaccccatcttgacgccgtattaacaatgttctacgattgtgttgttgcttgtagtgaaatggccatgccattgaacaaattgaacaggttggtcagccgttgctggccacgtgccgaaccacttgatttcagtgagtatgacccgagcccatttgtcgacgtggatcacagacatgaagatgctgttgcgttcctgatgctgtttaacaacaaaaatcataaccaaccagcggcccacctagtgagtggtagcaatgaatcagtcgcaccaccatcagaattaggggagcctgaagagttaacagtcatgagtgaagagctgggggaggtaacagtagccaacaccactgataacagagggaattacaccagggcccaaaggctgggaaacgtgagcgcctatgacctcatgtgggaagcgttggagccattaaacggtgttgaaacccccgtggagtacctggaatgggggttgttcgacaaggactccatgcttatatatgccaacgccaaccctcccggcgtgaagtattccatgtacggcagtttcaatgctgacttgttgaaaatgcgtaaagggctactacgtgcaagatcggcggcagtgccaccttacacaaactcagacaatgccagcatatggagttacatggtggcaaaactgcaaggggacaagaccaagatccggccaaaaccagcaacgatggtcaaattcgaggtgacagaggaagaggaagagggcaacgcattggagttgggtgacaatagtggtgaagagcagttctggacgtcataccgggtcacctacgacccccctttctcagatgagtgttgttctttgtgcttcaaccacctcggcctacatctggacagaaaaccacgacacactttgggggacatagtaatcggggcatacaacaacaaaagaaacattggtgtcatcaatggtgagggagtttgcacgctcaccacatttgtcacaggctggaagaccatctatttactactacaacttggccattgcagtgtggccgaaatcgctgggaacagggtcaacgcagaaccagtgtttcacaagagacctagtgcactgccgatagcttattgcggtaatggtgggggcgtggcgtattatgccagcttcattaagcagggggtgtgcaccgagcacacgcataccccttaccaaccattgctcaattatctgttgaacaggactgacacacctgcgatagtgatggagggcctcaatcttaatgccagcaaggcgaaggccatcagggcctcgtcgaagggcaaaaacctgtgggcagtgcgtaacagagtcaacaagccattggtgcacctagaaatcaaacctacagatgatggctacataaccatggaaaaattgttgccgtataggctttatttcattatggatggggaactcagacctgggttcagcttgcccgtgggcgcaactggttactgcaacatttacaccggcgtggcaggtaacaaaccatgcagcctgatcattgacggcggcaccgggttcgttgacacccaaaggccggtcagccaagtggtgggcgagcctgtggatagagctctgacgcatgcatgcagggcgcattaccagccagaccatggagcactagccttggcgcctgggcccaccaggaagctatacgtttgggactacgataacaggggccaccacatgttcgatctcaggggctacttgtacaccatgcctgccgaaaatgtgataataccacctggagtgagcaggcagtggatggaacgcatgcgcggcgaccaattagccataaggctgtcaataaaggctggggcagaaacagtttgcttcgagtgcaattcactggacagaaaaaccacagttaaagcgttacggggaatgacgaacaccgcttggtctactaggggagatgaatatagcaccaagtcactggatgataggcaatgcaccaatcttgtaatgtggctattacacagattcccaaaatcgaaagagggtaaacttatcaggaggctggccgacggccaaacgtatagttacacaaaaatacgggaagtgataggcaatgacgcagtgacggaattgggcctaagccagggccagtatgtgtgccaccacgagaaatccatcatgaactttggttcaactaagggtgggccgacgctggtggaaggttacacgttttcacaatctggggagaggttgcctgacatcgatgtgatggcttcagcaccacaagacaacaagtcggccgaccatgccgaaggagccacatttttctccgagcacaagcaaaccaggatgcaggacccgtgggcagtcagcgtcgtcagggagaggccagcaggcatcatatatctggcgtccggtggaggcaaaacgtggttgaaaacgcacaacccggatttgttcgccgatagtgatgatctggtaaaagtgccagccatcacaaactgggaatcttggacccaaggacattggacagccagaaatgaggaagtgagagcgcaaatgttcgagaacagggggctgtgcgtagggaagcttctactggtctggcaccccgattgtgtgccgagtcaatggcggggggtgaagagcttgtacataataatcaatgacgacaaaggggaaaggctgttcaacataggcaaccaatcattgaaaacaatcatagaacggagaccacgactaccgcacgccatacataccagggagcataatgaaagggtgatacacgaatatttcgacgtggccaacaggaggctacagccaatacgcgccctagccatggctcatatgcaggatgtggactattatgattttgagagtgggttcatcaaccctggggcaaaaccctttataccgttcataccagccacacctcaaaacactaacttgctagatgctgtggacccgcaaatagatgaagtgacagtggaggcaattaacatgtttgagattggtgacctgtctgactgggttgagcgcattgcgcccagggacgatttagtaataaaatcaagagaaaagccagggcagttgggcaccacgtccaaaactgtgatgacaaggtaccctgtgtggtccaggcccgtgtttaccaaggtggtgcactcagtgttcaacgccgtgagcacgaggcacggaacggtcgagcacctgattaagcacaaattggaccccaaggcagagttgaagagatttgcagaagcgtggttcaagccgggctgggaagaatcgtcaaagaagatgaaatccacacccgtgggttatgaccctcaagccaccaagcgatggataaatgagcgccctgacggggtcaaagtaaccgatgatctcatggagatactggatgagggaataactcacaaccccataaacgcatggaaggtgcacgccaaattggaatcgttattgaaggaagacccaataaacgccccacagcaacaaaaagttcgcattatcgtttggcagcggtatggttacgcagccatattcagcccaatttttattgaaattaagaaaaggttcaaaagcatgctagccgaccatgtcctttacacggatgggtacacacctgctgacctctctgcaaggttgagaacggtcacaggcggcaacaggttctttgaaagtgatgccagcaagcaggaccggcaggtcactcatgagttgtcagaaattgagtacctgatatacgacttgctcggcatgtcaactgaagcactgcaactctggaaacacggctcggtcaaatggcggtttgatggggtcaacatgtctggccacctggacgcccgtatgatgacaggcagcagcgccactgcgatcaaaaacgtaataaccaaccttatcatccacgctgacatgatgataaagaaccgagagcatatcaagatagtcttggtgctgggcgacgacaatttgatggtggtggatacagtgttggacttaaggggttacaagaagaaggcggcagagtactacaacatgcacatgacgccacactccagtgagcattacggcacgttttgccagatgatagcttacttcacaccagaagggactgcggaaatagggcctgactacatgcgcctgacacggcggtacgaagtcacgaatggggtgtctgaagccagccctgaaaacctgacagctagggcaatgtcttacgcaatgtggttgggtgatatccctgaagtgcaacagctggttgaagaaaaaggttggccgataaagccaatggcttggtacagcccctcactatgcctcagggcagtagctagcaagcatgacatgagtgaagggcacgtgttggcaaggttggcagctttaattgaaagcatgcggaacccgaggccaaccacgtggagttggcagcattggacaacactgaaataggttttcgcggagaatggtggcgggcccccccgcgccacctgctaactgtacggccctcttcgct

SEQ ID NO: 873 - DNA, 7369 bp, Ceratobasidium endornavirus F
  source 1..7369: mol_type = other DNA
gcgagggaggctgaaggacgcgccagagggtaaaactgggaaagattttatggacgtgatgaagcaagtcaggtttgaattttacactagtgagccgcttctgggtggacggcgatgctatgtcttgccatctgtgaaattgctcatgaaacaaattaacaaattacgatcattgaccagatcagattatattgtgtatctgaatgaatcaattaattcaatcgcagcattagaaaggcatttgaaatggtacatgccatattgtgaattagatgtctttgacatgaaagggtcagaaacactagacctaatcattaatttaataacaaaaatcaacagatgggtcaaagaacaaatggttaaacttaagacattagctgttttgacgtggcaaaataatttcaaaaggaaaattgggaaaacaatcattttaacagcgcccaagccaaacacacctgaaattatcaagttaacagcaaacgttgaagacattgagtaccacggtgatatgattaatcacttaatagacgtgttatcatatgacaattaccacttattgagtgaagaaattaggttcaatgctggttatttgttaatgacattgattgagccagaggccataatgtcgggcctaattgacccaatggacattgaagacaaattgaaatattatgtgggcaaagttgacaggtcaacaagccaacacaaataccatttgattatgtgtttgcttagggtagtgccgtatgacgtgttaacattgatcaatgaccgcaacaaacaattgattgttgatttgggggaattgagccatatcgagcgtttgcaagaggaaactgaagaatatttgccaattgaccagaaatttttagtggagttcgtaaattactgccgatcagccaatgatggcgaagaatacatgccaatgaatggagtgaagttaatgagcagcccactcaatgaccttaatggtgaacagaaatccatattagagaccaaattattgcgagtgatgaatgatgaagtggccagtatgggaaagaacggaagccaccatgattggttaaacaccttgaaatcattcgtaaggccaatggtaccagaaaacaaaaccattaatgaagtattagatggtgatgatgatgataaaccagtgaatcacgacctgaaaaatgaaaatttgttacgcaagtttgtgaagttcatagttaaacattgtggaccgttattgcaaaatctattgaatgaaggcaaatcgctaatggcaataattaaaaattcattcattttgatggccaaggctattcaaaataaattgaattatattagtgacatgatggcaaattcaaaactgtttaagaacaaagatagagccaccttcaaaacactaggcatatcgaaagtgaaggcaacagttctacttagggaaatttacacaccaactgaatatgagttacaaatagcaacaaagtgggttatggcacaagataatgtcacaggatggatgaatgtggcttatcaagtagctaatatgaaccagaacaaccaatatgccaacataagggcttggtatatgcgttgctcacaatcatttggtgaagttgaggcattaaccaaagaaaatatattagacatgatggcttcaatggctgaaatggatgtgagtgtggtaacatcaggaaggcgagcggatacgttatatgcattacatggcattgttatgttaactaatacggaagaaggccaattgctgaggacaattaccacggccaggatctatggcataaatgataccaaattcatcacgtgttacaatgaaaccactcgccaagtactcaaacggtttagcggttatgatttcatgaatgaaagagacgccagtttagtattgatggacaattatcacaagtatttgcaacaaatgcattggtcagctaaaggttattacaaaatcgaatattggctgggcaatggtattggtgcaatcaggaatgcatccagcaaaattgtgagcaaattgtctggattgatcatgaaactcattaatgtcatgctaatgggatgtgacacactgaaaaattgggttggagtgctgggcagtaatctaaaagcaacatataaatgcatcattgaatgggttaaacagaaattagggatcaattcaaaagacgatgatgaccaagaggtcaagccagtaccaagaccacgccgttcatcaactggcagcagctcaagtggtagtgatttcacattgttcttgaacagtgataactcaagccagtatttcactggtgaaaataccccaacaggaaaagacaaaggtaaaggtaaaatggtttacaatgatcaagaaacaagtgattatggtcaatataccgctgatgagattgctgcgcaacgattcgaggcccaagagctattgtttgatgcgatggtcgaaaaccaaaactacaacgaaggcacaagtgacccaaaaaccaaggccaaggaggctttgttacgagaatatatgaagtacaccaccaaatcaacatcagatgatgaccaagatcatgaatatgaatcaaatggtattatatttgaaactgatgacacagaaattgaagaccaaggaggcttattctacactgttaagaaaatcatgaaacagatctttgattgtgggtatcagggagtggcctggttgactgacctgttgaagaaaggatatgaattgacctggtgcaatctaattaaaatattcgatctaatcaagtccaagttcggaccaaagaagacaaatgacatttatgtggtatttaagcaacgaaataatgcaaaccacatgcatgttggagaaacagaggaagatggttcatgttggtgccaagcggcatgtgtatgcgtggatgcagagagcaaagttattggagaaacgcattcgaccatgttcaaagtttccaaaacgaatacaaccaattgtgaacattataacaacttgaaaggcttaacaaactttgaggcacttggcaaaggtttcaatgccattaaaaccggcaaactactaagtgtatccataattaatggtaaagttcagcgtggaagggaccacattcacttcaaagaccaaaccgttgtaacattagttaccagtgggaatactcaaattcaattgatcggcacattttacaaacaagataatgtgttacctactggagacatcatgacagagtgcttcaacctggctttgcgatacgaaaatgaaatattagttggaaccgctaatcatgaaactgctggtaatctgataaaatcaaacaccattaacagcataattgatgaagtgggaccgcaatcaagattgtttatgtacgacgacggaatgtacttccaggcatacacaactttcaacttacattgtcatgaaatgttcagtaaagcagcagttaaaaatcacaattacaaccattttgacgcgactaccatttggccaagttacatgcgcgattcttgtgatggtttagatttggccacaacatcagtgcgctcacattacgcgaggaacagccatgtgaggaatgggcaaatacattggtatgagagcaccaatggaaattctgaactgatgggcaatgaaagccgcaaatcgctgagcttcgcgactggagttgaaatgtggcacgatgataacttcattggcctgaacatgcgcggtaacttgcattggtcagtggtgaatgaagggccactgcgtattcctgaattcaaggcaaaacttaaaagcaaactgattaaaattaatgataatgaaccaaatgttgaatgtgagagcgaaacgtgtttcaatgccatcatgatgtcagcggcaatggttcctaaagatcagtgtgttaaaggcacggctaaaagtgttagcacatttaatggtttaatttcactggcaagtgcaaatggcatggtgtgtgaatgtgaattaaatggtgtgggcagtttgttggcactgtcaaaccattacatcaatgagcatgatattgggaaatatctagctttaaattgcatattggttaaagataaacatgtcggcattagtgaagttattaatttaactgagataactgaattaaatgaactagacatgatggttaaccaaaacccagtcttagcaattgctgctgaacaagctagaattattgaaccaacaatggaatcaacagtcatggataacttcgttggtgaattccctcctaagaaaatttggaaaggatggaaattggttgaaacaaaccaaccaagtgttaacacattaaaattaatacaaacgatgaagcagactggtccaggtgaatttaaatattcatacgatgtgcttggcaacagaggtgaagtgaaaatttgggttaatgactaccccaacatccatgaatcatcagagttgatccttgaaactcatgatgggatcaaagccaaattgacatcaggttcaacacggaaaatgtatgccaccaaacctgttgatgcaacattgaaatttgccataacaatgctaatgaaaactatgggcaacaagagaactagtggcaaacacccattgttagtgattttaacacaattgagggattggttcaaacgacagaaggcattaatggctttgaggtgggctgtgcagaattgggattcattgattcatgtgcgccagactaattacattgatattcgtcaagaaattagaaacaaccaggtgttggctgtgtggatgaaacattgtaacaacgtttaccatgaccatcataatattatattgagagatttaagcatcggtaacatgctatattccgtgcacatgaaattggttggcaaagaaattgtggttagaacatattgcaatgtaagattaggaggaaaaacatataagtctacacatgttcaagatttccttaagccatacaccctggtagaaacgaagttaaaattaaaccataaggtcaagaaaacggttaaaattaatgaaactagcagtatgggcaacgcgttagacgtttatgcaaacaaagtgctgagaatgatgcatgaatatgatgatgatgagaataacaccttgagaacgttaatccgcaacaacccaattcacatgcaaatgaaaggtggccatgtcaatcatgggaaaaggtttaatagactaggcagttcatcagtcgacaaattaacgcaaacattactacaaacttctttcactaatcatagattggtttgttattgtttgccaagtggtgctgggaaaaccactttaaagaacaaacatcccaataaattcattgacatagatgatgttatgcgcccggaagacttcgtagatgttaaaaggttccagcttgagcagggttggtccatgattaatgaaatttataaggaacgtcttctcacatttttagccggtaggacgtttgacaaaaacatagctgtcctttgtcatgggccttcacaggttgaagacgttgctggagaaattcatttcatcataccaaattgggtcggggacaagccattcagtcaatcgaacacagattcattaaataaagattttaaaacctgggaagataaggctctccacagtgataagtttaatactttcgtgtatagaccggaaaatcaccaacaggtggaagagtactgtttgaaaaacatgtcaggcagatcagtgacttttcgtgagcataatgtcaatgatttagctgaacgactaattgatcaaaatattgctgaaccgttttatcaatattccgaccacacaaattacgttaagtatgtgctcccagctgatggtaaagtgacgtcacgcactaattaccatagcaaaccaacaatgcaagaatttagtgttataggtaggttgcccgtggtgaataggccagtggttaacaaacaatcaaaccaattatttaatgctattacaagccgattgtttgggaaagagaaattgcggaaaaataatgtcacggtggaagaatattatgaatttgctaaagaactatttgttgacgaagctgattcactattggacatgtttaaagctagcccaatagttagcatagaggaagaggttctggcatggctagagaaaaaaggtgggaaagtggcgtacctggaacaatgttatgagtatgctaagaacaaacaacaagagttcacatacaagaaaatgaatgcccacctgaaagacgaacgcctcatgaaggaagatgtgcaacatttaataaatcaactggcaagggtcattgtttggcacggccaagaaaaagctatggtcttagcgccaatggtgtcagctgcgaaagaacgctaccacaccttgctggataggaaaaaatgcgtttatgctgatggaatgagtccattgcaaattaatcaacatctaaagaaagtcaagccaactgagtacatgattgaactagatctgtctaaacaagataggcaaactgatttgccatacatgaaatttgaacattggatgttgaggcaattaggattggccgacgttgtggttaattacatggatgaatatattgaaggcttcatgattaagacaatgaataaaattagggctcatctgggcaccactagggcaactggtggtgtcatgaccggattaggcaatgttttgcgtaaccatgtgttattgggacatattaagcagacatatgatttctaccatgttatgatcttaggtgacgattccttaattttcactgatgttgatttcaatgaggaggtggtaagaaaaattgcttccgaattccataacgtcaaggtgacatatagtaaacgacatgatagtggaattttcttgcaatatattgtggccaatgttgggggaaaatacattatggcttgcaacccaatgagattaatggaaaagttttgtgtgagcaaaacaattaataacgattttcgtagtaaagttggttcatacctgtggatgctaggaagtgagcccgaaattaacacggtagccaaagttttggacttaccactgcctgaatcacaagggaccacaaaagaagagagaaggctagcgcaatcaatttatctggaatgctctattttacaagttgatgacttaattaaggacatattgagcatgatggtcaatccaaaagttttccactataaagttatcgtttggagtgaacgcataatttatagtcagaggcccgattaccgaccaaccacaaatgaggcaccgagatttgtcaatcttgaaaattatcatgagttaattgacaggcaagatgaaattggcaaacatcagaaattgtgggacgatttcaatgaagtcggattttaaatgcaatcagccaatgcttgcgcaatcaaaaatgacctagttgtaggt

SEQ ID NO: 874 - DNA, 19293 bp, Ceratobasidium endornavirus G
  source 1..19293: mol_type = other DNA
aaattatattaaagaagatggcaatataggtgataaaccacacaacagtcctgttatatacaagcattgtatcaaagtgttgcagggcaaattcaaggacaacaaagtgactgtgcaacataatactgtgctgatcgagcgtaacaagccacctatgatatatatggaggatggaatccaatatctaaccaagaaaatgtaccggcaccatgaaatagacagatgcactggtagaactgaaaaactacaaatgttcctctgtaggtgtggcatggcctcacatttcgatctggaaggatttaaanntgtcaagtatgatgattccccagaccaacagccgcaaatcgtggaaacattgacacaagtcagatgcccatattgctatacgcccctaataaccactaacacaagccaggagaatgcatctagcgatcttagactggttgagaaaccagttggcaacccaactgctgtacttgagatgctaaggtcactgtttggaccagaagctggccccaaagggccagtgtgggccacgcattctgatgcacatgaccaaagactggttgcaatggtactagctagattagacttcaaacaggttacgattgaagggatattaacccgtgaacaaatgggtaagctgactgcaaacttcccaacaataattgttgacaccgtagaaggtctcggcacattaagcgactcgctatggcgggcagagctaaaagcgtgcatcactctggcgcttgcccaacattccagcggttgggcacgtaatagcctaacggaaaacacagacattggtttagccagttccagcgctaatgctgatgtaacattagtagaatttacagcaaaccataaagatttctgtaatacaacctacattatagttcccaggtgcgtgcccgacggtatgtacgaggaaggagctggctcatgtagcctagtagcaaacacttatctgacccttgcgccagggcacacagaaccaactagcgtggacaggaatgcatatgatgccttaatggaaaccgattatctactggtaaacactggtagagacaccactgtctaccggaaggacattatggcacaaggcgaatactggcagctgttgcgcctggcccgcgtagtaggccagaatctacaccagtttgcaaaagcagagagacaagacttgactatcgaagtaccaatgtttgaccaacgtgcgttaagttcaaaattcggtgtaagcgcactaacaatgcgcaaaactacggtgcaccacaaattgttgaaagctctaactgtgcgagggttggggaatccactagttagttatcagtctatgttggatctggcattgggattcacatggcgccgcatcaatatgcatgaccgcacgctggctaacacagacataacaccagagttagccgccacacacgcgtggatagcgttattattgaccaaacgtggggcggcagcacgcaatgccactgcagaagtcgccgtctctcggccaggcatcaactcatttgcactgcagagcagcatggcattagccaatatgctgatcaagtctgtaggggcaactttaggcatcactaccaccgaatgggtctctgaagtggctctggactggacaggtagtcgcgtgacagcccaacaagcctcagctgcccttgatgagctagcagattggttgctaaagccaagtgtgtccacagaacgggtagcagagttccaatcactaacaccgagtagaccagcctgcaaccatagacactacaagtgcgaacataatggtagtaagacatgccaatgttgtggaaagcaagcaaacaacgacatttgcgaatgttgtgaaccagcatgttgggacacccacacttgtacgcataattgctacacagtaccgcacacttgtgcaatacagtgccagcacaaaccaggcagatgtgaccactgcagcaagaacggatgtatagagaatggcaaatgcaatacgtgtaggcaacatgatagtatcgagagtgttgaagtcgatatacacgattgggtagcttggctagaatcaacgaacaatgaaggaagtaataaaggcaataccaaatataataaaaccaaacctaaacgtatatctcatcgaatgcatcaatcgctaccgccaccaatcatgcctgatgcagtggaggtggatgatgaaacagctaccaagagttggcctaatccacaaattggaaccgaaggcaacaaccactcgcataggtgtgttggctgcggaatgctatatgagtgtaaacgtgacaacacgtgtcagcaacagtttgaaggcgattgcttacacgttaccgctgataaaccagacgaggtgccagaagaagaagcaaagtatgcagaggtgcgagtcaggttgctagcacacataaatgaacatcaaataacagcattagaagccgagtctggtagccggtggccattaccatctagagaggaaggttcgctgcaccagatggacggctggcccattggcaccacagtagaaagtgaaggtttgtatgcagttggggatgatgaaaccccgaatttagacacatctgcagcatgtgctagggaagtggctaggtattgttggccaactatgcaatccaatataatatcagtgggtctatcaggagcaacagcaacggaccaagacattatcaagtttgccgaaaaacatagcctgaacatcattatgataacggcacttaacaccaaaataatacgcaacaatctgtcaaactgttacggagtgttcatccatgatagttacaaagggggttccgatggccattggtacaatgcaaagatagttcaagtcaaacgacctgccagcttgataacttttgccgaaggtgtcaataaccaaatgttaaaagcattggccggcaaaataataggtggcatacccaaggaaagcagcggcttgacatcctacgaaaggttgctattagaactaactatccattcttcccacaaagccgaggtgagtattacctataatgatataggtttgatgcacaccacgaagggaccatacctagccaatggtccgatacatgacccacaaagaggttacgtacacatgagaataccggaacgcgatgttttgctagttgaacaatggctgacagaaacatggtcactggattctgatttgatgaaaccgggtacttacaaccacatgagctttgataacttggaacaagtacgtaaggtgcaattaatgggcgagatgatcaactacaaaatggcaagcagcgggaatgtcgacttctgcaacggcaggtataagctgccgaattacacttaccaagttagtacggtgtcaaaagtggacatgggttatgcttttagtatggatggtgtattcttgaagtcaggagattgggtagtggtgaatgatggtaaagaaacattcacgtgccaaataaaattaaacccgaatttcaaaggtaagagaacgttaggggtgctactcactagccgtaaattaggtgcctctgtcaacatcggttacacagcaactatcagtgccacgtctagcttggtcaaaatatgttctgctatcaattggaaagtagacttggatggcttcaggagagcagtagaaaatcctgtgatatcggttgaagcaccaggaggctggggtaagacaaccgcaatcatcgataaatggcagccgggacagatagccttagcttggacatcggggggtaagactgcattgcagacgcaggcgcaagctgttaagaaaagacatgtattgatacaatccgtggaaaaagtaatggccgagggcttaccgccgggagtgactgaagtgctattggatgaatcatcactaacatcactgtatgacgccagtttgatctggaagccgggtgtgaagttccaattctttgctgacaattcgcaggtaggcgtagtggatttcagccccatggcaggactaaggtctccggtcggggtgaccaaatttgtcaaaacaggtatagccaagtacaaccatcaataccgctatgctgagccactatgttcagagttggcgaaggtagtgcccggcttaacatatgccggacctgacaagagaacacatttcgaggtggtgaatgaagacgctatgaacaggacgacatatagaaagttaattaatatgcataaaccagacatagtactggtcttttatcgtgcacatgaacaactactaaagagttgggctgaaccgggcgccgtgacgattgacaacgtgcctaaagttaaaatagtccaggaacttgcacgtgtacattcattccaaggtaacacgagaccgagagtcatggtcttacaatggagaatgggcaacacacctggcatagaaacacagtcaacctactgtttctccgcagcaacacgggtgtcagaacaattggtttgggtatcagtcgccatgtttgatcaaacaacaccactacatgaaagaattggaacagtgagaggcagtggaattaactccaattggcgatcgttatcttgggacatgacaatggccaagttaagacaaagcttaccgcaagcaccacaaggggaaaaactagatgaagtgctgagtgttatgaagaaatctgcacccaaatttgaagaacaatacggggtaggtgttagtttagcaaaggtagacaacaaggtgtaccttgaggcgaggaagttgggcatacacatattaactcttgagataaatgagcagttagatgttaatgtgcaacacgacccgactggatcagtgactcaggctgatatagctgtgatccgccagcagatattggacagcgagcgtgcagtcgaattgtccactgtggccgtcaccgaagcatggtgccaaaaccacatgatggcataccacatagcagtgcgcgccgcagatgtaggattcccaatagatctaagtatagggccgataaatgtcaaattgttaccgaacgcggctgataaatactgcaagatgaattatgaaataagggacggtaaaaacagcgcattagttactgtggctagagacccactgcatggacatctgatacagtttggtctcactggtaacgcggaattggcatactcaattatgacccctaacatggaacaatcacaagtgtcagaggctttacaaaatcttttaggtagacgaatagatgcacatagatttgtgttggcacacatgatcgaggacttaggattcactgtcctagctgcagctatgaatttgcttaactttatgggcatcagcaaggacaaagcagacaaacttgtacaccagtcgtatattaacaattcacaacaaattgtcagggagatgaaagaggccgtaactaaccttgaccaaaccgagggcacacacttggattggtggaaagcgacaagtcaccagcccgtgaaattcatacgcactccaacagaaccgggaccaaacgtaggcaggtacaaagtcacgcattacgcagcctggcatgatgcaaacacatctgagttggagtgggtctctagtgaccctggcggtgaagaaaaagaacaacaagtcataaagttgtggaggcacgtaggacgcgcagcagtaaacggcataggctttaatcttttagataacttgggcctggccgtgagcaaagtgggaggcctgccgcctatagaagggctaatcaacccaattagcgaccacttagcccgaaacactgaggttgctagaaagataggaaattacatggcggcggctgcgcaacggtcctggaatgctgatccaggtccgttgtacttgccgcgcacttgggacgaggatgcatgccgggacatgttaccgggcagaaagataaactggacaagtgagttggtgccagcaagtcggggccggccactactatgcattgcactactcaatatgtatggcaacttgggtcaaaggcgtgtgatgtactgcaaccacccccaaatagccaccgttgcaagggactggaacataacggttgcaaaaccgggcaccagtcaggaacactcccctgattggtccgacggtcaaaaacagttgattaagacctgtgaggctatcacatcaatagaacacaacgatgcccctgaacgcatgacagacgggttacggctgctacaaacgaaaatgcaagagcagctagtgagcagaaccaatggaccgctggcaagggatggcgcgataagaccggacgaattccagggatgcctgatcgggccagatgtcctgtggcatgaggctagcattgaggaactactccgtaagcatggcgagctttattgcatgctaccaatgggaaatgactggcaagaaacgacgctggaaaattcaacatacctagttaacgtcaattcaggaattaccatgcccaaacagttttggcatgactctgccatcacagggagtctcctcaaactgagcagcgatttattattacaggcacagttgtgcggcgccagccactcgatgtttttggtgaagttgactgatggatccaaggagccgctatcctggtttgcagaagacatggtgggcccgtatggggctgagatgctgattaaattgcctgtcataaaattgaacccgataacgatagtacgcgaagccgctataatcgagtggagagtggtgagggtgccacgcagactaatgcgtagcttgtctttaaggatgttacgagaatcaatgagcttggaacaactagagacagcaggtagaatactaggatccacgtacgaaatggccacccattacgttggtgacaaattcaaagtgtcagcccagaccatggctgattgcgtgctcgcagcttacctaatgcacagacctttaatgacagaattccgtgctatggctgacgtgcttaatagaaatgctggcaatcaggtgtcaaagtacctgctggatatggcacagggtgccactgccagaatatcagacctgttgggaggaacatccagacctgaagacctagccagaatggttggttcaattatccaagggccgattggtaaaattcttgaaaactatgccgatgaaatggctaacttgcatgcgcaggtattagtacagaaacctagctacaagctctacttctatggcagagtgctaaacttcaccactgtacacgatcagccgacaaattacggctcagagtatcccatatatagggttatgcaatatgttccagctataatacgtgcaactttcaagaccccagctctgaacgcacctgcaccagtaccaagaccaaatttggcatcgttgggcacgagactacagcccgatacggcaactgggctgcaactgtttagcaatggtgtcatcaactgggacgaattggtatctggggtgattgacatcgctggcaaagacttgacaccagatgctgcgaaagcaacgctagaatttgagcaagctttggacacagcgttgaactcaatacaacagaatgccaagatgcctacacacttgcgtattggagctaggcaagcggctaggaaaaccaccatggaacagtctctggagcatttggtgaactttacaacaaacaacagcgtcagcaatgccaaaaatttgatagatagttgcaataaaggcatgataacgaagtacgcatcagaaatgactgtaggactgctatacatcggttcaactggtgacatgatggccacggcacatttaattctgatcttagtaggcttgggtttcaatgtagtctgcgcttgtccgttggcccatttacgtggtctagtcgcaatcatagatagggtttcggtgaaagcaatagctgaaacaatgcatgattgggatgacgacgaagagtggaatgctgcggccagtgataaaataataatcaagactaggggtggtaggagtgtgcggctcatgggtctggagtatgacacaactgcggctatacatgcagctaaagttttcaccaacatgaaatttgacgagatgaagaaactgatgcaggaaaaattagtgcactgtacgatgccgctagatcgtaatgttcgcaaagcattctccacgtgcgacttcatcattgggaatgcagctgcaccgcagggtagattgctagcagacgggatggctaggccatacctacaaatagcctacttgccattcggcttgacattcgcacgggcggacagcttgcagcgggtgttagacttggtagtcagcaccataactccaggatttgttatcgctgcagctagtgggcaacttgacagagaagctagccaattgtataacctcgcagattggtcaaggcacgccatagacaatcctgtactaacacattattgttgcccaaccactagctttatgtcattgaatccacaatctgagcccaacaaagggcctatacttgcaggaaggttcccatgggaggcaggcagctttgaaggtcccacgggtaaggttttgtttgtcactacgggtagcatgcctgggaatgactacagtagtattggggatgcaagtatgatattgcagtcatatcaataccacactgtggtgttacacacaaagaatgaagaggatttaggcaaactagcgttatcatttacaaataaatctcttaccaagttaccaaatgatagttctgacctgcctgacacattaaccgtgttatctgacggagactggttatttatagctgtgacgtcactcagattagaaaggtgtcttaagcatacagacatactactcagccactgtgggcacggcacctataactgtgcccgtgaagttggcgcatacatgataaatgatccccagattatggaccaacacctatgggcgaatgtagctgaacttaataaatttggcgtgccatggagtggcgaccgcgcaaggctgttgccgagggtcagtagtctgttgatgaacaacgtggaaccagtcatgggcgaatcaatggaagacaaagcccaacatcttggtgcaatgatagcatcaacactgtcatcaaacggtatagaggtgaatccatactacgaagacttatattatgatgcagatgctgatatggcggacccttggaattcagccaatccaaacgcacaacccagggacgatagtggatggggccaaccatataccgagggccagcagcagccggaattccagggctggggcccggtgcccgatagtgggattgggaacggcacccaggcacaacctgaattacctgaccatcagacgactgtagaaaatacaggtgaatggtacccaccggtggccggcggcctaatactagcagacaaagctaatatgtcattagccgaatgcaaggatctgaggatcaagtatgaccctatggacgcgcagcaggctgcgggcacagcttcttgcgcactgtggtgtttggcaaaaacactatacgacaattttgagcccgaattggaagatgtagaagacctgttcgaaacggaacaagactctgtgtctgctgaaagagacttacagtcagtcataaacaacctgacgggtctagatgttagtgaggtagctgaaggaggcctcgaaaggatggatatacatctactgttctccatatttggtttaaatacatatgacgccaacacaaagcaactatactgtccgtttaagacacggccaatagtagctatagacaccagccaagaccactgtaagttagtaacttgccatataatgcaggacgacaaaccgctacagatgtacacgaaaattaaccagcagcctatttccgaaaattacatttatctaggtgacaagaaggtcatgctgaagaccgacacaatagaatttggacgtatgtgcttaggatcaagcatgtgggacctgagtgacccaaacttacgtctagagttacgcagacaggtgaggaatgggcgtctgcggatgcgtggtcacaagttggatgaccaagcaggggaaccgaaagttttggtcttcaatgccctaagatatgagaattgctatctgatagagccgttaaatgggcataggccaatggtaggtaggctttatggcgtgccgttagtgaacggcagtgtgtccttaggctgtgtggtttcaaacacgcaaacaggtaagtaccatctggttgttgagagtgaagtcgaacccattggacaactgttgagcataagaacaagattattcgcaaccactgcagaaagtagaaacagtgacaaccgtcttgacttacccataactaacagtcagtcaaggaacgcggtcgagaaggcactaaaaagacctgttgtgcttctgtccggcaaggttcaaccaccagaagctaacgtctacttacataatgctgacaactatgtacatcacaaccaactgagcctatacacacagttgagagattgcaacgtgcaaactatcactggtgaaactatatacgttgatgatctacgccacaaaaacccatggaccaacgtgctagtcgaaggggaattcaggttaggcttgcccactcatacagtaccgtacgacaactcagaagccgaaccacaaagaaatgcagctgcattgaaatggtgtgatgccgttgcactagaacacgcaaacctaaatgagaccctatacttgctcggtcacgatgctaccagtcacgccccagctcatgaagggccactatcaatcattactgcaataattagggatgacaggggatccaggaattccctactacaggtgctgttcgctgcccgagggacacagctaaatgatttcattgataggcatccacaactgaattgggctaaggatatggttgccattaaaacagatacggcacaaataggaccaatagttgaatacccgttcatagcagacaacagctttatatacatgttaacagctgacggctggtatatgctgagtgtgcaaaaagaagtgccatatggaccggtttcattagtgccaagtgttagcgtgccattccttggcaatggtgaaccgggaacggtcaactgtgggacgaatgttagggaaatactaacagccatagacaaacagaacacagaggcaagtgtgggcacgcgacagattggaccaatatatctgagcgatgtcttcaattggttgaagagcacgatggaccgaagtaaaatatttaaagtgctaggaatggacgtgctacacctagtgagcaagatgtatgcagatggggtagacgcagaaacctgcttaatggtcatgccagcgacatcagacaaaaaccacgacctgcgtggcaagatgctacgactggctggagccgagataaccgagtgcccctcacatcctggcaactggtgttggatgctagatggtaaaacagtgtggttagtcagtggtcagctagcttacatggactgcccaggacatgtgaaagcttcggatggggtaccaacacgctggaataagaaaaccgttactcttaagtatacccagaatgatcccaagttctgcacgtatcatgggggatcgggggccaattgcgaaagttgtaacaatgttgatgttattgcccttttacacctgcagactatggcagaggttttagtgaaatacaacgagctagttacaactaacgagcgtatagggttcgaaatacctggtcttattgtagtacacggcaaaccaatacaggccgatgtagtcgaacaaagcatcataaactccacagcctcacaagcgatattgaacgttttaaaaaatgcgttcttccccatacacaacaaggatgtgggatatagggctctacaacacactgaccttgatatagcagatgtttccaagtggcccaacatattgtacaaaggttatgtagcagccgagatagcacaagtatgggttgaaggttcacgactcgacattaatccagatgaaattacaaggtacacgctacataagggtgaaacaaatagactgacccacaatgatagagtggttgaagtgaaaggcagcttgcaggcattgtgtgggcaaatatacaagcaatttggtaccaccgatttctatgaatttatataccataacgggcaaaaagggggacagcttcatggtgctgacgtggcaactttcattatatttaacgcagttgcggttattgagtatagatctacaatgtcattccaggactcagcggttccgattacaatattaccagaagaatggtgtgttgactatacaggcgtagtccacctagtgcatgcacgcaccatcacggtgattaacaacaaacccgtgctgcacttcgatatccagggcttatgtacagccataggtgcaagactggaatatggtgacaaagaaatagtggagatgcaggtagacacagtagtcacgttatgcaaactaagagccgcgaccggtaacttgttccaagtcgcactgccgcgcacattgcccgctacatacaaggaatggtcaactggcgaaggcaaactatggttaacgccaaactcaagtttaaaacagataacggaagcagaatggaccatacgtttccccaatggcagattagttgccacaagagtgcaagctgctgattatgatatacactatgccaattgggattgcaccagggattataaaatcactcgggaaggtatcagatttgcgaacccagcgtgcattgttaaacctagcacagttaaaggattccagagctacagggacactatgaatcagttcgattggtttactacagatcctttcgaggcaaagccaaagttggaagaccaaccacgagaccatcaagtgggtttcaagttgcaagaaaccaaaacgactggccggcccatggctggtgccatatgcatgccacccggtacaggtaaaacgtacttgtgtaacaagtaccccagcatattcgtagaccatgacgtgctggaacagcacgtgcgacagaccaaggaattccaagaggcattagctgtgagggattgggcggccgtgaacgcgatacataggactatgatatgccccaaaggtaaagtcttactaacatggacaccggaaacagtgccttatagttgctacagaatcggagcattagctttaaaagaagacccggtggacataggcccagacagggccaacctagccgctatgtgcaaggcagggtatgacggatatgagctacttaacgacagggtcgcggtcgagaatagggcggtgaaactagcagaacaatacctggatggaaaactagacggtatcagctcacttaaaactaactttgaagacatgttacacttccaaataatagatagcttagaagcacctgaattagcagtaagatatgcaaacacaaacatttataatcacacaccgttcataccgtctctcactagcgagataacaagagcaatgtatgacagggaagaaccacctatcgaagtaatcgatctgtttgagaatagggacttgacacagatcataacatacaaaacaccacgcacatttgtcaacaagcaactaccgactagtttcgagaatcctaacctcattgttagcgtgcgcaaacatacattgacaaagtacccgatatattcaagaccagtcctatctaagatgatatacagtgagattgaagccacacaactacgtttccacgacgacgtcaaatttaggaaatacaagcttgatccagcacatgaagctgcagaatttgcaaagacgtatttccacagggattggcaggagagagttaaagcaatgagtatattgacatggaaccaagaccagcttgcagcatggctgagggcacgaccagcatcagcaacattggcacaacacatggaagaggttgctgctagcttgtacgatgacagccctgtagccaaattaaatgtccacataaagatggaagctttattaaagtccaaaccaatattagtctgggatgatcaagcccgccggccgattgtgtggcaagataaattcgtgccatatttgtttgctcctatgtttctgcgtgcgaaggacagactaaagcagttacttaggccagagttcgtatacgctgatggcctcacaccagccgagctgagctccaggtgccgtgccgttaaaaatgggtgtaagttttacgagggtgatttggagaaacaggacagccggactgacattgacactttggacactagcttctacatctatgaacacttcttaagaatcgacccgatagctctgagcctatatcggactggcactggggtctggtcttacaaaggaaagttcgtgaaaggaatttcccgttataaagtgcagtctggcatggttaccaccgccttacaaaatgtcatcaacaacttgttggtacacaggaggctagtacaaaggatgggcaaatctatagagctgtttatggtgctgggtgacgatagtttgatgttgcataatggccacatagatgcagaagaattaaggttagaaatcaaacaatacttcaacatgttatccaagagcgaccatttcaaggcacatggtacattcttgcagatgctggcaaccgaaacaggaagtggcgtgatacaaatgggccctgatataattaggttacgtcgtcgtttcgaagtgactaatggtgttactgctgacccagtgggcacggcaaatatgagggcgttgtcatacttaatgatgctgggcgatggtaaaaggcaacgggaaatagcggcaaagttaggttatgaggaagagttaccagtctggtttaatatggatgacaatatcagaggcttgtgccaaaagcacgacatgactgaggtagaagttgagaacgaattgcatactttattggacatgcttgaacacccaacaataactgagtaccactgggaacattatgcagatggtttctcctttaagaaaaaccaaggcgatccatatattgctaaggcaggcgcagaccatgtacctgggtccggccggttttaaacaattaagcctatggatgagtaatgatagaataatactgttaagatctttattaaacggtgaattacgctgcaatactatctggaaccgcaggcacaagcatgaagatctagtggcaattgtgaccgggatacctgagatagctgaaaatcacctacccactaaacctgggttgtccaattggccaatcgttaaatacaacaacgatatacaagggggccactggttgttccaagtttcacaacacaggtgggaagcgacgcggcagcgtgataaatcgatgatacacagaaacccttggggttgggcaggcgtgcaacaacatttgacggatggcaatgtggagaccatgattgaaaactgtgtgcacatgctgaacgatttactaagtgacaatctgaatagcagttattggataatgacggctagcgtggaatggcacactggagtggatttcgtcgtcaatctagtgcaaggcaaggaaaaagaaataaaattggcccacgtgcataacaacacgtacaacttatacgtgccagtaggagggcgtgcattggctaatttgcgttgtatcgcgctgttatcagacttctatatgaagtgtataattaagaatggccgtagtgatgactacttctgcaataacaatatattgcatcaatacaggccagcatgtaacggtctgagcatgtacggaccaatgctacatgactatgcaccggaccggcgagcacctaacctaactataccgctaatcgcagcaaacctttacgaatacggaatagacgaactggtggcagcgagtagcgaagcagccattaaccttataatgtataacaacaaatgttggcaattaaatttcacgggtgttgcagcattgaactttaccacaaatgttaaaaacataatcatagcgggacacaaaggcgtaaactggccgaggaatgtgatagaagttaacatggaactgacatcattacaaatagcttgcaaaagtgcacaacctggaaccacgctttacagatacgttaaagagaatttgataacccagtctgaattcggtgcaccagttgtcgctggtagtgaagttgccgttgagggaacaaaagaatgggctttcatatggccagttattggtgcatccgggttgcagaggacaccactggcgcaagaaagtgctaacgcactctataagcgtttggtcaacgtagcatatgcatcgttggacaaccaactgttggatggaaagccactgccgctggtcaaaacaatgagttttggccctaacgataacacatggggcacaattgacacatcatatagggaaatgttaatagatactgagcaagccaagcgcatgaataccatttcatctaattactatccatacatccaaccgtctgaccaatggtttgattatactactgaatcaacaatgatagatttgctgcctggatcgaacctaccgataacactggaaatggacaacgatggggaaggtgatatacagaaattattgagaaagtacggacagattaatgaaatgttcatagtggcatgccccgggaccggcaaaaccacacattgcgctaacattataggggagaagttcactgataatagccagccaatttatgcctggcaccccaatgacataccagagagatacccgatatcagcttgcctcactttaagcttggacgcattgatagcgaggggggtaagcaaacagaggatacaagcacactccgaatcggtcatgttctgtttcaagaaaaacataccagtgtacgacgtaagtggtagacatatattggacacacaatttgacgagtcccaagcattaagtgaacgtcaatggttggagatgtggggttacactgaaaaccaacaaccactaccactaaatccgattgaacgggattatgtaacagacatgctagacggtgaaagatactggatgggtgttagtaacgtaagaatgaaatgggttcgccacggaataaccaaatggccagtagatcagcttatagttgatcagcgcctgccactcctgccacaatcagggaacatagtgtatgtcggcccacataggcgccatagacaaacagcattattgatgacagctgggtgggacaacgtaacatactacatctgccatgcacttaaagaaataggagaccatggcgacatttacaacagtcatattgatacgattgaagactggccagcgggggcaaaagtggttgaatgtggtcacgagtcccacgtgtgctgcgccgaacattggagctatgagaacacaatggaggtggctgaacacctaactttccacaagattaacagttaccacttcgcatccgccaagctggagtgttatatgcgagatgatacggagggcatttatgagttgggctatgctgaagtccgggaattagttggagctcacagagcgtggtggctggagataagtgacgcaccaagcgaggatatcgtgcccatcgctgactggttcgaattcaaagaaagtggcgttgaaacgtttagaaagttgattgctgaagccatagcacatgctggtttcggatgcgatgacgacaattatgctaagagcgccaggagcacagtggcctccttaccggctaaggtaccattaacacttaaagcagggcgcttcaacaatatctcctgggacaatacagggcatgtatgggttaacaaatgtggcatgaccaccttcaatgccagaggttttgtccatgtggtgggagccatactagactgcatgtatggtgttaaacacccggcactttcaaacattgctttgaaaaattgtttaaaaccgattagtgaatggttcatatacaacgtgtcatgttgtgtgggagatcatacaaggggttcatgcgtggtagtaggggaattaggagattattatataaacctggcaccaagtgctgaatacatttggacactgggtggtattaagaaaacacatgataggcacaacacattaggcttcggcctacagggcaatccagcctccatggcatggccagagcatcatcatgtatggtttggaagggacactacagaggatgaacatcattggagtaaatttgtggctaccagtgattttgaggagtggcgataccagctagctagaaataccaatttcaggcatgaacatagggacgcaggcaactttttaggtgcaagggaaggattcttcgttgttactccgttagactgtgacgtctgcggacacaagaaaaccgtaacagtgatgtgcgccgcatgtgtaatattgggccagtccgatataacgtcagacaaggtaccaagcgtcacaacttcacagggttacatgccgctaatgccagtaaccagataccctctcttacatccacaacgcaggtatgaacctcacaatgtttattatcagccaaacaccggtgtacaaccaaagttccagctgatagatggatgtatgtcctatgatatgttggcatatcaacgtgagttagtcaaaggaataagggacgaaacgttttgtgggctacacgggacgaacgaagctgctttatttatggacttacaagaattagatgaaaacacaaaacagattgcagccatgttgaagtttgccatgacaaggctaaacattagagttgtcacagcaaccagcagctatgggaacacagactacaactggataaacctattgcactccaaccgcaatcacataactagagctggcaactgctatagagttgagtgcaacattaggcatggacgggaattggccatgtggcgtgtggtcgcagctcaattcgcgaataagccaacactcattatgaatggtaggaacttcctggactggagccacagggtgcctaggttttggcacactgtcaatgaaggatataacaccacttggtcaagtgatgtggtgatacagaacgtaactttgtcagcagcgacactgcatccaggctgggctgggccaaatacaaaattactgctgcaaatgtgccagcgttggggctacatttatggttgcgatgaagttgctgtcaagagattaagcgttgtgcctacagcttgtgcaataataggtacaattgacaagttagacactgtgcaacacccagatttgtggaataatagtttactcattactgacagtgtgggcagacggttactgaaagtgaaaactgggtacaacatacatcaaatggctaagattagacggctagtagcttaaatgcaacccttagatgggcgtgcgggatgaagtatat

SEQ ID NO: 875 - DNA, 14266 bp, Ceratobasidium endornavirus H
  source 1..14266: mol_type = other DNA
ccctggtggttgatgaagccacagggctcacacctacggatctcgcgctggtgttaaccagcaatgttgaacacctagtactatacggcgacccgcttcaagtgggcatcgtcgacatgcacaacgttcacgggcatcgtgtccattacgggtgcatgaacttgtccaagaacgtacatcaccacaacatgacttaccggataccgatcttgatcggtgaagaggtgcgtcccatggtgccccaattggcatatgggcatgacaggcagggcaggatagaattgaaatattctgactcaatagacatggaactgattttctcggctgttagggaattcaagatacaagcgatttatgtgttctacagcaccactgccaatgccctcactagggctttgagggggacagatttgcaggtggtcgtgaacaaagtgcactccgctcaaggcagtgaattcgaccgagttatggtgatacaaggtggtggggtcaaggcaggtgctggcctgcatttggacaagaactactgtttcagtgctgtgtccaggacccgtgagctcatcttgtggtggagcatagggtgccatgacaaagccagattgcgtgaccgggtgatgggtatcaccactgacccacgcacgttcgataggaaagcggccaaggcggcgcttaattaccagatgggtgcaccaggcgctctaaccctcgctaaggaggtcatgaaagccattgagaatagacacatatccaccaattatgagaatcccatccccgccaaagccagcccgctcttgaaatacagcttagagaaggtgcatgagctgctcaagcaattcttgttaggacgtaaaggtggcgatatcaaatacatacacactgacgatagtgcggtcattcaagtgcaaccacaaggcgagccgtccttccagttcaacattcacccgctcagaggaattgaacatttccctgatgactacgcggggcccaatctaaacgcgttacaaagggtgctgaaagagacagtcgacactgacaggtttttgttgatcaacaaatactccattgaacagttctcacgcgagggccacgaaaacttcaccagcctcttcattaacttctgcacagatatgatgaacgccctctcaatgacagtggtggatgccactgcctctgacaccgaaggtgtgagggccactgctgtcacaatatccaatgatgaggtcatcacactgtttattacgggtaatcaatttgacattgttaaaaccaatgaagtcgaaggtggcattgaattcgaaccactggctgtgatggagtctttcgttaagtatcttgaacaattgcaggctgtgttacaagacatgaacgggtctgacatgattgcaagtgaggatgatcgcgccatgaccaggggcactcgccacaccttagaccctgatgcagctattgcagctgtgaggcagcggttctcaattgacgactcaatttctacagacatcacgtgcactgaatcaggtgttgtcaagcgatacaatgtgactgcgagtaaaagcattcttggctggccagtgcaaatgttagctgctgttgtagagctccacacactgagcggccaagtcgaggtcacacatttcaaggcccatcccatggtcaaaggtctcgggtacagcgtcgacgggcgcagtttcgccgctctcatcgccacactcacaaccgcacgaaccgtgcacctagaagttccccccgtgtcaatccccactctcacggtggaggacactgaggagcccgccattgggccatctttaccggctgaactctttaaccaggacacttacactcttttgagcatgaacccgaaccgcgggactgccggcagagaagaacagccgcatcccaacgtgcgccctgattcattagtttgggcttaccatgcgacaaggttggccactcgcgacatcctctccaatgttggtgagtacatcagccaaacacaaatgggcccgttccagcccctactcggtgttgaagccgttaacctcgcattacgagtgtggactaaggcttttaccacggttttgccgattaagaagaaggtttacaaccccaacacacaggaagaaactgtttgggagtgggagattacccacgccggggacctgagcatgttcgggctcaagaaaacaacggggatgaaggtcggcatttgcaatgacaccgaggcactggctggcccagcatcggttaacggtgttgaatgtgggtgtgttgaagaattagaatggaaaggtgttacaagaactggccattccctcactaaggtgtggttgagccggaacactgttcggctaatacgcactgtttcattctacagctcacttcagttgggcaggccgttaacaatcacacttgacggtgtcacatttttggccaaaaccggggggggttgcacggcatgtgcaggcctcgtcgtcaccgccctgaacggggatatcctactcacggttaggaagcagtacgtgcaattctttaggcgtgacgtcaccataggccagagtgacctcgccttgttcgtggcagctgctttcggattcgacgtgagggttaaacacatcacctcaaacaatcccctttcagaatccgtgatgcccgagcaactacaacgcattagagagctcggtcgcaccaaaatgtatgcctcagaagtgtgctcatacttaggacgcgctgatgatgaagctttggtgttggcagatcgcctcgccaacttcactatggccatcattaatagggcgttggatggtgataaagccaccaacctagggcgtttgatgtcacgttatgctgttgaccaacagtatttgcttaaagccatcccggatgctctcaactgcctcggactgcagaccgctgaacaagatctcgccaattcacacgaacggtttgacaactatgtcattgaatgccgaggtgacagctattccgtctttgtgatagctggcaccacactcaacagcggcgacaaccttctcatgtacaaccccgcaaagaagcctggcaattcattcgatctcgatgcgtatggggaaacgcgacctacatacaactgcaaaaactaccaggagctgctgtgtattgcggtgcaacgacaaagggacttgatcagtaagtacacgccttatttcactgatatactcgagtactacacatcatacggtgctaattatgacctaataccgaatctgaacattagtataaaagaacacaggtcagagcgaactagtgtttgggatagggtgttggagatggcagcaaaggtgcagaaaacgtcaaagggggggcttcgggacctacaatatgtgcctgagtgtttccttgaatcagtgaatgcacacgcgccttcgatggtgcgtagtttgaacatgttggcacataaccgacccatcatttcacagagcgttgacgctggggtggaacaattgcacaatttgtatgtccgctatacagtcggcgaccaacgtgtggcactagtcaccgcccaccctggcaacgtcatattgtccgggtattgggcttggcaagtgcagccacctaaagacctgttacaacgagactggtacatggcccaggttaacttattgcccgcgatggtacaatcaatcattaacactttatcatcccacgatgacaccaatgagaaagctgggttcttaaaacaagtgttgtcaaacaaccttaaaccactcatcaactcatccaacagtaacaattgcgacattgttaacctgggactcaacttggctggcatgtcactgcggtcagttagcgactacatgtgcggtgagaccacaatcgtttatggactgctacctcggcagagcataccacaatctgtcgccacgctatctgcggatggtttgtccataatgtacgcaaagagccgcattggatatatgattgagccggccatggtagcttgggccagacagggcggttcatacttcttgccaaatggtgtgcactgtcacatagcgattaaaggcgaactatttttccacagtttggtcaggattacacttacaaaaaccaaactgcctaacccagagtactatgtcaacacacatgatgccaacagcaatgacgcagtgcactacaccataccagttataaacatcacagctttccgcgcacgtgaagaaggcattttcaacaaccaacaagtcagggtgccaaccaagatccaacggctgttgtcactgagggctgccagacccaacaccaacttccacgacatgctgcaatatctgcgtacgttgcggtacaccagttattactctgccactggggtgttcaagcgcgacaagtcatggattaaacaagcagtgttgtgggcactggcagtgtacctacatgagggtgatttcaccaaccggttgaaggagctgactggcatgttgcctggcacacaattgtcaggcaacaccaccgtaaatgtgttagtcagcaggttacaagacacagctatcggcctgatggccgatgtggtgaaatcgctcaatttggacctctcgatcactgaagtggcggacgtggccgccaaatacgccgcactattgacaagcaggggcaaggaggcacagacgctcgtaacaatgatgcacaacacttcagttcagcggttggggtccgcattacaattcatgcaccatggggagacagcacggcctgtgatggaccggacgctggacccgcggttacacattcggcagcgggttgacgaaatcaccagacccacaccagcagcaggcgtgatatccgcgcaattggagcactcgggcaccacgatgtttgacgtcaggagccattcgaacgggatccacgtgtacacgctttccggcacgcccaatgaccgggaagtggtaaggctagcggtcgccaatcttaacgaattcgtcagcatgcaaaagctggtcactccaatggaacaacgcgacttggccaaagcagcgttggctattagaactttagagggcaccctcaatgaaattggcaccaacatacaacactgtaaagcgttggtggaggggtacaatggaccaagagtcatgttaatggtgtgctccgtgtttgacataccttctgcctatttggctttcaaacaaggttccaccctgataagggtcagtggcatgcgtctggaccgcaccaacttgctaagcgtgttggggttacccggcatggcctcacaatacgtgggcttagcacctaccaccgtcatggcacttggctggttccaattagacaacaccccagacttgagcaaattcctgtcctggttggatgagcaaagaattgtcgaattcctacctaattggtgcgccaaacaccacggcgcgaaaacagctggatgggcaccagtcgaaaccagtgtgacgcggccgggcaccgcagacacctacctatacttgaaggatggcgttgacactacgatatcacaattaaatacagctggcatcagttacacacaccataaccccggcacaccggcactgcacgcgactagacacatgcttgacattaaatcccctggcgtgaccaaagtgattatacacagcggcggcgtcgggaccatccaaatgtgcatcgacaacaacatgcctatggtaattgttcctgcctttggggaccaacaacagaacgctacggtgttcgagtgggccaccatggaaaacttactgaagctgggcctcaacgagtacggcaacatgtgcaaaaccgaatacttaaaatggaaagtgcctgctgagaaggacgagtcttgggcagccctaacagtcttggaattgcacgctcgcatgccccgcaagtacttcagatcactgcccgacaatcaaccggctataaatgagctcactgacgcatacaaggctttcattggtgcgccaccagcacatttcgcatcggcaagggattacctccaaagtgtcctggccaggcactacgcacccaggggtgttgatcaactggacagagtgctgtccgaattgcgtgacatcatcaacagggtgtcaccgacaagaacagttatagtgccccccacaaccagcaggcgttccatcgacagagaacttgtcattaggattaaccccacatcagccacgctcaatgtggacaaatataacattaacttcttttgtgacgttgacgaagtgcctttctactgcagcttacttttgaacgctggcttgccaggtcacgttgttcaatggggcgtcggcataattcagatgatctcggtctttgacagttcaacagctgtgagaaatttcactgtgtctaagggcgcaagaggctcaactgacatttctgcattcatgcacaatccaccacccaacagcttgagtgaactgtcagtgtacgtttcagtgtctacagacgctcggctaatgggtggcattgcactattccatcatgtggggcctgaagaagcagcagtctacatgaattctcgcgggcgcgcaatgtggcacaccaaccaagggggttactggcgggtcgactacccgcggtgcccagtgatcaccgttggtggaagaccaagcacgttggacttgcgggcttcgcggggcaggacaggccccgccagtggcgacgacgatgacgatgaacaccccgaacctgggtttgatgacaaagggggaggacccagtggcgcagacgacggtgacgacagtgattctgacagatcggtgtatgaggatgcggaaagcacgcctaggactggagcatcaacacatacgatgggagcagggggagacggtgaccatgagcaaatcgagcctgaaaacaacctcacagtctgggaaaagtttaaactgcactttgacaagtcttcagaaagcttaagtggcaagccggcgccggttggtgacattcgaaacacaacacctactgacgtggtagccaccgccccgattccgcagataaccgtcgcggaaccaccaatcttccttgcacctatgatagtcgatgcgctggaaggcaataacgaagaggccttgcgtggtttacccggcagtgcgagcgaaatcttcgagaccaccccaccatcctcgccccggttcagttggcagttgggtagcagcttgcggcaatgggacttgcaccaccgggtcccagctattgtcgacggtaacctttatgactatggtgcgaacgggttgcggctctgggatgccactggccaccaaaacgggatgctacgtgaagtcacacgattactgagcgcaagcacgttgagagaacacagcagcaaattcaatcaagggtcacttatgaccacaatccttatacatatcagtttcatggcacagtggtgcaacttaaccaccatcgccggcctcagcggggcgaaggcatatagtttggccatcgacagcacgatgtcgacattagaagagtatggcataaacggcttggtggacgacaccattttcgatgacgcaatcgacgctatagttgagggttatatttgggatgacgtgacccgtccggttcgcaattacacccacaaagaagtaacactagagttggtcacacgagccatcatccaccggtacacatccatacaacatgccagagaagtgagggctagcatccaagaacatcacgaaagcatggcagtgtctaggatccgagtttgggaaatcgaaggcagcccacagtgggtggctttcaacaagttggtcaatcacccggtgacattgactgttggagccgccgcggaggaaatatatggttttgaggaggttttgggagagttcgtggactccctgttcgaccatttcacggggccattcgagcacagatacaacagaaagagattgttgacacataggctcgaatcatacattaatgagagccccaaggatcccaacatggtagagaacctgagcaacaagacagctgcgtggatgaacacgtggaccaggcatggctacctacccatccatgctgctgatgatgaatgtccggaggggagcattgctatacctggatgggcgataagcgacgtcgatgaaatagtggctgttcttaaaaacgcaattgacaatagtgttgggagggtgagcttcaaggtaaagcaacaatttggaatgatcgggactattgacatccagatgccgccacgtgaaacggagggcttacaattgtggatgaaactaggtgcgcctgttctcgaggggcgaggcgcactgacgcatgaagagttcatagccgtcgctcgttcgttgggcaataatgggccagtaggccatggcacgaatgcggctgttgacctcagcttgtcaaactggtgtgacgattcaaagtggtgtgggagaggtcaccgcccacagcagccagcactgaccggcatggccactgagggagcagacgatgaggtggtgttctcacatgaaatggaagcacgcgggaattcaaaatacacactcaatgattacgggatcgagttaggagctggtgtctggtcagtaaaggaacgagacaggtattacaacatgaacatcatcgaacgagcctggtctgatagtaagaacttcataagggaccttgtgttgcgcggtgaatgcacctcggagtcaaccaccgaggacgccggcacaccagttggattaatagtgagagacggttccaggaatgtatttgtgtacagagaagacgcgccgatgaggtgggtcatccataaaccacaacacccgctactaaagcaccactcaacgtgcgtcacagtgaacgcacctctcgggtcaccatcagctgatgaagcacaccggatgccggtgctcaccggcacggaagccacataccttaatgaggcgcatgtaccaacccaaagaaggagcgtgcagctctccgtacaccgagcacatgcaggcatagatcctgtatggccttacttgggcgacagaatcacatcacaattcgctgaggcagttgaggtggtggcgagcaagggcaaagccacgtcgccacagtctttgtacaacatggcgatcgagcgtggtgctgccgcattagaaatggcaccaacagcattgcacatacatctgagtgaacaagaagggtggccaatgcacgatgaacaggcggataacgcgccctcaaacactctcagtcaacgcttttacgattggatctcagaattgaagaaaagtgttgatgattcttcggcggggtctgccggcatggctgcatcattgcaacagcgcgccttcggacagcccatgacagctggcgaccccaacccggggggacctaaccttgggaccgcatcattcaagggtctggcctcccgcaatccatccttcgccagaagcctaatccagatggccgttgcaacccacggcacgtgggtacttgacacattaccgtcttcactggaacacctagcgcatgaacccattggtactttgcctgccaccgcgcccgcacagggtggcaccacacaccccggacaaccatcagggagcccacaaccaatcaagcacaccagagggcgcaggcatgggaatgagaggagcaaacgttcgaacgcgcattcagggagacataagagggcccaagttgcgccaccagctgccaagcaagcgcgggaagtgggccgcagggtggcagtttactccaccagtcggtcgcaaaaagtcggcaccttacatttggaacactacaagcgtgatgctgtagcaacaagcgagaaatgcagagatgagcagaggtctgaagctatgcacgagttgcgtgatgcgtttaacagcatgaattatagcacagcgaaacttgcatcgtctatactaacaggaaaagggatgattgatgacgatggctggggagcacttgaagcagcatacagcggtcaaagctgggcagccccaatggtatacgccgctgggttggcgatggaaattaaatggagctggaacaaattgaatcggtacgcacgcaactgggtcaagaagatgaagaaaccagctgaagcggcggccaccatagctccacccccaatggcgccgccttcaccaccgaagcctgggcccggagggaaaggggcacacacggggtcggcccccggaacgagcgctgagtcggaactcgtaagtgacaccagcaccaagagggaaagggtgtttgaattcagggagaaagtgttcgattcacaaacgtctgatgctgcatgcgttgagatcctagaagagtatctaaggggcactgacgtgaatattggtgaactaaccgagagcgaggttgagcaagtacccgacttcatgcctggggaggaatccgtgccccgtaagtcacagttgaggcggctcaaaaaagcgcattacgccttgcaaagcttgcactaccgggcaaagaaagaatataatttcaatagattcagatcgttggttgagatgatggatggcggcgtgcccaagcaagaacgaaccaggcgagtaacgttcgtcaccaatgaagaaagtgatgaagaggcaacaataccgtcacaagggcaatattccgagattgagtgctatgccacctacaacgtggtgtacaaccctccaacacctgaaggctgcgtcaccgcgtgcttcaagcattttggttacgacgtggaataccaaagaaaccacactttagaacaaatatacatgttgtgctacgccatgggcattaacctgcactaccacaatggcaccaccgccacaatggtcaacatggggcgcgtgaaaacggtgcagtttttactaacagacgggcactgcgcatgcattgagttgcagaagcattcacgccccgtaacacacgacttacaaactaacgcgagctgcttgccagccaccacatgtaagctcgtccctagtccaagtgtgatgatccgtgaccgtaaagaaggcatgtgcacggggcacacacaccacaatgtcgttgcggaattggactacatgttgagggtgactgaaaacaagccactgccattgttgacgaaagccaatgacatgagctccatacgtgcttcctcggccggacgcaacctggggctcatcgctgccaggctgaaccggccagcttattacacgcgactgcaccccagggctgacggttacctagcggaacacgaactaccaccgtacaggctagtgttcgtgcttgacggtggtttggtacctggaatgacactaccaaccggtcccactaagttcgtgaacatatacacaggtaggcgtccacaagggtcaccgtcgagggtggtgattgatgcaggcaccacatggaaagttctcaaaatgccacacgcaaccgtgatctccagcccagtggatcgctacttatcaagagaatgcgcagaacactataagcccactgaagggcagaaagctatggcccccgggccgaccgccaaactgtacgtgtggagttacgacaacagacggcatcacttgtacgaccttcgaggttattttaactccatgccagcagaaatgctgatccttccaccgtccatcacaactgagcaactccagctgataagagacccaccggacgggcgacggtactgcatacacgacggggctttcgcactgagtgtggacttcctagacatgaagccaaagcagttgaccaaatggatcaacaggaaaacatctatcggggcaaggaatgtcaaggttgtgggcaattccatcatcataaaaggtgcacaaccctcattggacatcatatccaactcgttggcccacatgttcccaaacatggataatggtaggctgaccagggcatttagggatggcgagaccctgacgagggatgaatgcaaacaagtgtggggtgacgaatatgacgcgagcatagattggccggaagacacatgccttgtacaactgacgatggacatcagccagtttggcgcagaaacagtggacggccacaggtggagcatgattgaaggggcgaggccagtattccgcacgcgtggtgcatcatcattcgtgcagggcatccagatggcaggtgacgtaaggaatgaccagaaagtggaaaacaccccaagcgtacaatccactttctttagcgaccacgggaaaactaggatgggtgacatttgggccaccagcatggcgaggaagacaccggccggcatagtatacttagcatcagggggcggcaagagttggttaaaaaacaacgacccagacaccttcactgatgctgacgatatggttaaaatgccggcaatcacgaactgggaagcttacacgcaagggcactggacggccaggaatgaagaggtgagacgccaaatgatgcaaaatgcgcccctagccgcaggtaagatattgttggtatggcaccctgactgtgttcccgctcaatggcgaggcattaagagtttgtacataataatcgacgacaccgaaggggagcgcctgttcacaataggcaatgagagcctcaaagcattggtggcacggaagccgaatttaccgcacgtggtttgcaagagggaggagaatgggaaacacttgcacacgtatttcgacttggccaacaagcgattacagcctgtaaacgccatgctcatggtgcacatgcaagatgtgaactcatactcatttgaaagcacatacatcaaccctggtgcaaagccattgataccattccttaatgcaaactccgtaaacgtaaacatgcttactggtgtgcagccaatggaggatgaagtgaccgtggaagccataaacatgtttgaaattggtgacctgagtgactgggtcgagaggaagggacccacggacgacatggtgatcaaatctactgagaaacctggccaagtgggggaaacgtcaaaaaacactctggtccgatacccggtatggtcaagaccggtgttcactaaggtggtacactcaacatttaatgcagtgagcaccaggcacggcacagtggagcacttgatcaaatatcaattggacccgaagaaagaagttgacacattcaccaaagcttggttcagaacagggtggcaagaagcatgtgagaagatgcgccagacccctgtgagctttaacccccaagccaccaaacagtggataaatgaacgaccagacggggtgaaggtcaccaatgacttgatgcaaatcttagaagaggggattagcagtaaccccatcaacgcatggaaagtccacccgaaactagaatccttgttgaaggatgaacccatcaacagtccaccagaacagaaggtgcgcatcattgtatggcagagatacgggtatgccgctatattcagcccaatctttatagaattaaagaagcgcctcaagtcgttgctggccccacacgtcttgtatacggacgggtacacgcccgcggaccncccaagagcagttaaaggattcagcagattcttcgagagtgacgcatccaagcaagacaggcaggtgactcatgaattgtccgaaattgaatacctcctgtatgaaatgatgggcatggacccacaagctctaaggatgtggaaacacgcagaggtcaattgggacgcaaaatcccagggcatgagaacgcagttggacgcgaggatgatgaccggcagttcagctacggccattaagaatgtcatcaccaacttaatcatccacggtgatatgtacttaaaaaataaggaccatatcatgttggtgctagtgttgggtgatgacaacctaatgttggtggacactgtgctaaatctagaggggtaccgcaagaaagctgccgaatattacaatatgcacatgaccccaaagtccaatgacaactttggcacattctgccagatgatcgcttacaagacggccgagggtacggctgaaatgggccctgattttatacggcttgcgaggcgatttgaggtcaccaacggcgtatcggaggctagtgacgaaaacatgaccgcccgcagcatgtcttatgctatgtggcttggtgcaatcccagaggtcgagcagctggtagttgaaaagaattggccaattaagccactagcgtggtatgaccccatgcgttgcgctcacgcggttgcggaaaaacacgatatgacggtgccgcatgtcttaaataggctaaacaagttgatagaaatgatgggtgacccgaaaccacacacttggacatggcagcactggacaccactcaaatagttatcgcaggtaagcagggggggccccccccccctcag

SEQ ID NO: 876 - DNA, 11602 bp, Chalara endornavirus CeEV1
  source 1..11602: mol_type = other DNA
gtaccgagatgcaagcacaagaaccatatgatgatgcgtgggggtgatatggaggtcgaccaaactgctgcagcttaccatggtatgttaaccacaaaaatcaacttcaagctcaagaagaaaactggtctaaaccgcagcattagggacctaccgattgttggcaatgcctcaaagaaagcagaagcagaaattgccaataataacctgcgggtgaaaaagtggattgaccacgagtaccatggtcgcccatcagcactcatcgagcatttgaccaagattcaaccacacccaacggtatccacaacgccagacgccagacgtggacacatccttatcaggtgcgcttgctgtggtgcttacacagcatatggcatcaacaaaccaatgagcgccagacccggcggcggtaggatgatgcgtggcagaatgcgcggacccatgaggggaccagcggcatcaacaccagccgcgccgcccacgcccatcacagccaagcagatcgccacagccccgtcagtatcctggttgtaccaaggtctagtcatgagcatgctaatgaccaccaatgatggcactgaaggattgatacctcttgcttgtttcaactgtgggcactcttacctggatgaattgatgaggtatgtgcacatcctgcagggggtggagccgacagtgcacacaacgattagaggtacattattagaatacttcttgaaggccaatcaactacagggtgctccacccgaagcattcactaaatccacacaactctacaacgacatagccaatagaaaagtgaatgctatgttgtcaaaactaaaccccacccacctcaacttcatttttgcactatctgaagagacggtatcatcaacattgagtcaccgtgcctacttgagtcataatgcgaaagcaacaatgttgcaaaacgaaatgaatgctctggaagtggaagaacttagcttgttcgcggacttagtagacactctgggcaaacagattattgtgaacccatcaagtcaagtaactttagcatccatgattgatgtcacaccagttgggttcgcaagctcatggttctcccacatcaacttgagttaccaatcaaaactctcgccaccaccagatgctaaacaaatacttattgcgaccgatggagtgaacttgagtgatgtgataaccaacggtcatatgctgctcgtccctaggaccaccctattatcgcacaatgacgggatttcagctaacagtgtcttcactgaagtcaccagctgtgacataccggtggcttgggacaagaaagcaatcacgatattgaacaatgcagcttcattctcaataggtggaaactggtatgatgctcacaccgttgcttgtaccaacaacctccagattctgaccttcacacaatgtgacagaccaacaggcttgcgcagtatgttgaatgacccaaatgtagaagtcaaaattcccattatcgacattaccaacccactcagtaccttgggcgtcatcggcaccacttgggagtaccgcaaagtcaacatagatttaactagaagactcatcacatttgctatctcaggtgaaaagtcaattagtgctatcggagcgtacatggcaggattggtgtccacgaggtacgtagttggaaaccgttcagtagaccttacccgatttggcatctccgatggtgtcccagaactaacgatggcctgtttactgctgatgaacaggaaggttttgtccacctgggatgccaccctgttgaataacaacatggatataactaagggcagcaaacaactggttaactacttgggttccaggttgttggaattgttagttaacttagataaccccatctcacaacacgtcaaatcatacttagaaaacggaacaatctttgaggcgagaatcgcggatctagcaagagaactgaatttcaccgacatgttgttgaacaacactccatacacaattatatcaggagcgaacaccgttgatgtgatcacaagtggttcggtggccatcagcggctgcgtgcaccacaaatccacgtgctctcacgacactacgggcaaacggcagtgcgtgtgctgcggtatgaccatacttatggggaccctttgctcatgctgtaagggtaatcacacgtgtaaccacaaatgtaatcacaagtgctcaggtgcttctgcccacatctgcacgatttgtgcatcaggcaaccactgtttgaacagatccgtctgtgagtgctgtggggtcgaatcctgtgcgccttgcagagtttgcaaatctgaattggaattctcaactttcacaatggtacccaatactcggttagaggaaaccaagaaacacaccaacaaacaatcagaacttgccaaggaattggttggaccgtcacgtacccaagtggacttgatttcctccactaccagacgatctgaattgcacactagtggtaataaagtatccattccacttaaatccaccagcggtggcaccccagagacgtttgaaacagccaagtccgcatcggtcaattggaaatcgattgtagtttacaacgagagtgacgtgtttatacccacactttcagtgaaaggcgatttcgcagccagtttcaagcatatgggtaaagagcacgtcgccgacatcatcaacgttgaaaattactgcggattgaaagccatcgctacagctacaggcactgattacaacagtctcaagtaccagtacccagaactgtctatgagtagtgccgacgacttgaaaagagtagtgaaagctacccaactcaactgcataatcatagttaacgcctccagtgggtacatctgccgccacagtaccatgaatgacaattatggagtgatagcattaactgacgccattccggagctacagcagtctggtcattggattgtgactcacttcccgggtcttgatggacaacctaatggattctactaccccatggacttcggataccctttcaaatcactggacaactacaacattacgcaacactcggatgcggagaacgtggatttgcgagctcagcttgtgagagcttccgtacgtgcacaacaaataggtgcgacaaccataacgccaaccgttcaaatgatcaaccgttccacttacctcagcaatggagactcccataacatagtggatggccacattcacattgagttgaagcctcaccaagcaacaatccttgcacaccttgaggataaaattcctgacacggcttggttgggagaatccgccttctatgaggacaaatgggatgaccttgaacaggcagtgaatagcgccttgaaactaacagtaatggaactgattcgttgcagtagcaacctccgctccaattacaaacctgacgtcggcggtgctgtgcaactagttcgtaccgtcaacgctacgaccctatccgatcccagcctcaagacacttgacgtagtgtgttactgctctcacggcaagtggtacaacaccaccgtcacgaagacacccaatggtgcaacggttcaaatcgcagatgctagtatttctgaagtttacccaacgaaagtatctatagcgagtttgtggcgtagaatttgcggacttctgaaagcctacaacaacctgggcaatagtgcctcctgcaagtttgtcaccgccgttgatggtatcgcaggcagtggcaagacaacgatgatccaggccctaccaggtcttcaaaatgcgacaattatcgcaaagaccagggcagcactatcgggactgtcatcaacaccctgccacaaactgatgtcattagaatcggcatcttacaccaagatcaactctccaaccattgtagttgaagaggcgggcatggtgttgccgacggaactattgagtgtgttggatcaaccgaatatgcggatccacttgttcggagacagtcagcagatagggttggtagacatgcacaccacacctgggttacgtggattcgagtcgatcctacagcgatttaaaactgagaccctaacaaaaactttcagattcggaaacccactcgcaagggattggatcagtaaattctaccccacgatagaaacagtggaaacgaatcagaccacttacggctactctcgtctggattccatagaagaaacagtttccgtggcaatcaactctaaggtggacgcgatctactgtttcttaagtcacactcagcgggtcatccaagatgagttggcagcacgctctgtagacataccagtgttcaaagtgcactccgggcaaggagctgagtttgacaaagtgttggttgcgcacatcggaggtggtgctagtcactccggagtaatgtaccaaaaatcttatgttgtgacagcgatgactagagccaggaagcatctcatttgggtcactggaaacaacgggccaccatctatgcagtcattgcaacgcttgttgctaagtggtagaggcgcgtgggtggatgtcgccgttaatgccgataatctctcattgactaggcaactgtcacaattggaagtcatcggctggaatgcagcgctcaacagcgcagttttctccagcacaggtggctggaacgctaccgtgcaaccggattgcattttcatcacccaacagactgcggttggtctcatcaaattccatatcaacatgcaagggttgcattgtgacaacctgctaacttcactcgccaagccaatgatacaacacaaaatcaagaaagcgctgtcacaatggaacgtgacagaatccgcagacttggtatcagaggttccaatcaaaacgctggaaatgcccggagccttcccgaatgagaggaacttgcgcaatgacatcatgatcaccaaatcgcaattcagcctacacacactagcgaagctgtacactttgggtaatatatgtttagcgggttggacaaccagaacccccatcgaactcaacatcagcggcactaaagtactagttaaacactttaatggttgtagcttgtattgtggtttcaagttcgagagtgggggtcagacctgtctaatctcgagtgcacatgacgagaagtgcaaagactccttactgttcatgctaacaccccacatacgggcggtctcaggtgataagggattaatggtcaagattatgccttggctggaatccgatgactgggcaggtgtgaacacgtcgctgctactaggtgcttacaaagaacgggtagcaaatctgtggacgtcaataggtgatggatgcagcacggataaggcaggattcacgtatgctagcaccaacaaaatcacattgcaaagtttggcagattactcagaagtgtggcaaacacccacacaccaacaagtaaccaaacctttgcttaaatcaggtgacggttatcgttgtgcagccacaggagtacaactcagcacattccgtgccctaaccatgcattacgcaggagtgggagctaatgaagacctggagctttcccgcgcgaacatgggggtggcagatcgcatattggagtctcgttacaaggcgatgttgtcgggtgtgcaacctataacactacctagtaatacattcaactaccacaagttggctgttgaaaaccaccttggtgccaaccacattacagtggcaccacgcacggccttaagtgcccacagcagtaacatagctaaaatggctattgtgtcgatcttaaataccatcctcaacaaaccgttgattaccatagcaccgatggatgttgtcaccttcgtgcttaattaccggaaaggcatgcgcttgtatgccccgatattgaacgttatagaacgcgaggtcgtaaccaagttcgcaagacaaaagtttgaacaattatccgcagccctggaacgatccaacaaaccagaggaacgtcaagccattaaggaccaagctgattggttcagagacatcaacaatctaactacgaactcgacagaaggtctggtcctaacggaccctcgctatcagcacttattcattggtgaggtgttggtggtacaaccgttcgccatgagtgcggacactgtactcgacgttgataatggcacctggtcacacttgggacccatggaaccagccacaccataccaaaacacggatgggatcgcactgatgcacattatgaattacaaggtgtgtgtcacaccacctcgacacgctcacgtccgcttgtacagagatatggaaacaatgcgccatcagcgcagattcgccgcaacccgtggtcatctacgcacgtcgactatgcctgattacatttacaaaaagatgatggcccgtttctttgccgactttagcaccactgttaatgacctagttgcctacggacgctctctacaacagacagtgacctactcaagtatcggcgtgcacgctaggagcttggacgaccccacccaaattctagattacgcaatcattgtccacaacattggtaaacgccaagtcaaaacattacaactactggatagcttgagtacaccaaagacgcagatgaatccggaagtgctgtccaacactttcaaggttctctggggagcctttggatcaagcatagtcaaactactacaaagccgaccggaggtagaattacttaacgaattggccaaactggctgtatctgaaggagttggaaagaaattgtatgacttggcttccgacgtcgaaatttacgaaatgcaaccgaagaaatggttggtgcacatgtcgaccccagaaccagatgacttgactggtgatagcacaaatacgtcggacgcacacgatggtgaggatgagtcaaatcaacaattacaaccgactggctacgcacccactaaggcagaccccaacatggcaccaacttcagaatccgacacggataaagaccccaaaaccacccacgatagaagtgacgaatcaacttacgagagcaccaaagagtcgtttgattgggcaaatgaagtggaggaacacatggagcaagctgaaatgcgcaacgccacagcaaagccagtcagcaacgttgccagatggacaccacccgcccactgggaaaaggcttccagagagccagcgtggagcgtagttgccaaatcaaaacgcgtggaaatacccgacaacaaaccaactcacatatcacacgcgaataaattcgaattactgggtgagatcgggcggccagagtctaccgctcaacaaccaccaccgcaaaagacacagccacccgtactcacaactcttagccaaaccactaagggattatcaagagaggaagtgctaaagttggaagcaatggtggatatcccagctgcatttggtaacaaccaacctactgacgtgtgtttggtttacactggtagcactggggatagtcagccgttgaatgccatcgctgcggtggcacatgcttgcgggctcacaaccaccgctcttgctccagctgatgtctcattgcccgacaccatcactgttccgctcatttacaccgacacttacaatcatttcactgacagtcaagtgcagaaaacttggatttcctggcatcatatagtgaaacactcattggatgtacttaaaaaatggagaactcaagatcgtaagcacaaatatgtggtctcattgtttttcaacggtttctccagcttagtgcgtggtaccatagataacattaaactgattccccaactggatcaaaactgggacggatttgccagcaggacgtggcacaatgacaacttgctgacactactgggtggcactagagaactgcaattccagttgcacttctgcatcccggcgggtatgtcaactacgacaaacaatcttgggttcgccatgtcgaagagtgacttcacattgagtcgaactgatgttgatgacattgcttgtttgaggttcataattgcaaacaaacaccgcagagtcgtgttaatcacttatggctctatgagacctacagatctatctgatcgtgtgcggaaacagatttcggaacacgacggacaccccatcatcctggtttgcgacaaattgccagaaacagaactccagcagttctgtcgagcgggtgacgtgcttgttgtaccgagatgcaagcacaagttaatcttccctttggtttccaaagtagtatgtcacggtggtgcgggcaccatgttgaccgccatgctcgcgggtgtagatatggtactcgatccatgtgcgtttgatcaatttcacaacaagagcacgatggcccaattgtcacacaacatcgtcaatgacttggaacacgaatacttccatttccaacaaaacgcgtctgaaatgctatgtggcggcaacgtgggtgcggaggtagtcacaaccagaacaccaacaaaggtgactgcgatgctggacagggaaccggataaactggtgtccgtgcagaataagatggtagtgtccgtggagtcggtacccaacacatatgtgggtaactgcgtcatggcttgtattggggattgcatatcaaatgcaacagtgttagcctgtgtagcagagaacttcgaatccagacctataaacacagcagaggacgtggtgttactgcttgctgtgtcgggggtctcgggtacggtcatacaccaagatagggcatggtgtgtggagtgttgtgtggaggacgaagaaggtatgattcggtgtgatttgtggttgaataacggcttgacgcactgtgaattaatcaagcaatgtgagttgaaagtgacggcaccttccccaacattaatcaggcctgacttagtgtttagcgcactgggcaaagagcccatgcacatgttggttttgttactgaaccaccagtggtcaaaactgggttattcaacgactgaattcgatactgcagagatttcaccggcaatggtcatggactgcttgcacagctccttctccctgctcaccattgagagttctcgtattccaggtggttaccaagtgccatcgtcattggaagtgggtgtgttgtacttgtgcataggcgaccagggtagctgctttggattatgtgtggacgcaggaatttcaacatcgggtgaaatcggcaccgtcattataacttcaagcaatattggtgatcacatagctctggttagcgaagtaggagagacaaagttgcatcaattgtcacatgcttgcgtcctcgatctgtacactaacattgacgtcaaatcgcaactacacgaaagggcattaaccgaatcatctttcatatcggacgacgactcggtgacatcgaggactgtggaagcgcttgacatctcgcctacccattacactctcataaccgatgacatcattgcgcagttggatgcgggtgcgcctatcgagcgggtacccgagggtgatcaaaagaccaggggtttcattcttgcatcccatgcgattggagtgagtgagttcaccagaatagacagtgagatatttgctaagttgcccgacgtggtggggaaaccacaagacatcctcttagcgatcaggggtgacgagataaaacagttgcatggcaggaaagccactgcttcattgtctgtagtaactgatctcctcacattgcaacaagtgcgttgggtgcatgattacccaatttccgattacgtgcggattaggaacatcagtgaactcagtaatttcctaattacgcgggcgggtgcgaccagagatcacatcaacacctggatggacacaaatcaatggacggtgatggatgaactcaattcgactgacatcacaccacaagatggtgttccttcaatcgccctagtcaacggataccacatggaaggtgataagtgctgggtgccgttgctagaccgcattttcacggttgtcaaggaaggacatggtttcgcgcccacatctcagcaaaccagtgtacaactggaagacagcagattcatggctcacaaattcaacgagacacacgatgccacggacaccgtcggggtagtgaaagaaatcctcaacgtttcggccatgattccatctttcagtgatagtcaacaagcaccatacgccggtgaaccattcttcttgtctcaacacgaagcgagcaatcaagtcatagaagtagtggatattatggataacaatggcagtgtggaggttatgaaagttgatgatttaccatctgccaaaaccatggattactgggataacacagaactgatcgacccagtgataattttaccatcaaacccggatttcaaaataacaagccggatacaacctattcgcactaagatgagcagatatgtgaaaatggaggaatggccggaagtggcacgtcagagccgatctaaagcatttggagaggagctgaacagcgtatcaaagcgctatggtggttatattgattaccaaaccaccccactaaacatagaggatgaggttagtgcttttgtcaaaaattacttcgtcccacaattcagtagtctcagtaccatgtggatgagtaacccagtgcaagtatcaccagcaggagttaacaactggatacaagcgcactcaagtaaggatatggttttgaaatcactgaacaagctattggaagatggttggggtaaaactggcatcaactcccttgaagtgcacgggaaaaccgagcaaacaactaaaatggacgagatctcacgctggtacgacgatgtcacgacgcggagcatcgttgcagcaccatacgccatttcagccattttcagtcaagctttcatggaaatcaagtctaggtttaaactagcattactgcctaaagtgtgttacgtggatggtatgacccctcctgagatcgccgcaaaggtgcgcagcactggcggttttaaatgggcagtcgaagatgatctgagcaagcaagacagacaaacctcctgggacatactgaagattgaacaacgtctgtaccacctgttaggtatggatacagaattggttgatttttacatgcagtgccacaaagcatggaaatggaaaggacacggtatttctggagtttgggacgcaatgcgtctgactgggcaagtcaccacagcgctgggcaatgccatcacaaatttggttgtacacaaccgattttacaagcgcaacgcacactcggttaaattgatgatgatactaggtgatgataacataatactgtgtgataacatgttggatgtcagacaccatggaactgaagtgaaagagttctacaacatggttagcaaagtaaaacagaacgaaagagtcggcggtttcctatctatgttagtttacgacatagacggcgacgttggtctgtgtcctcatttttcaagaatgagacacagatactcactgtgtaattacacgtattctccaagggagatgtcagataaagtgcaaatgcggacactgtcttatgcttttacactcggcggaatcagtgaagtgcaggccatagccaagcgtataaacccaggggttaccctgcccaactggtatcacctgcaagcggccatagcagccaacaccatatatgataacacgtcagagtgggctaccagagcgaaactgggcaaactaatcgaaatgatgcagg

SEQ ID NO: 877 - DNA, 15020 bp, chieh-qua endornavirus
  source 1..15020: mol_type = other DNA
atctttcgttcgtggcaaataccacaatttgtaatggagacatcccccattatgagttgtataccaagtacactgatagacgtttcgcgggagagacctccattttggaggtctctccttaagaaactaaaattaaagagcaaataccacaattataagtcaataaatagagtggtaaaaccatccatagttagaagagaattttctacaaaactacaagggtggataaagttgcctagaaattgtcaaatgacattaaataaaaacccgtttgagacaagtttcagaaaggtatttaaagaaaataaaaatttgatctttgataaaaataaaattaaattggtaccagccataagaggagtaaggaagttcagagacacaggtggttcaatcgctgcgaactttagatttgaagacccccttgccggagtaatcaactttgaagcattacatccactagatatagccaaagtttattacaatgtgataaatgatggatgcgagatttggaagcagccacacagaccaatatcagattatctaaaccttaccaagcatgagggaatagatgatgaggatgaagaagaggaaatgtttttggacagtaataatctcgacaacaatttaatcatcagggtagtcggaccaggaagaggtaattgtacatctgatatgttggaggtgttgagtaaattagttgcgagatttggaggttatgagaaatattacaatacgtatttggagacacaacacaaacatttcggatatttacagcgtggagatgatggaaaatattcattcgaaggagtgaagttcaatccattaaagaaatgttcagtctgtaagtacatgaatcattacgatgagttaattagaggtttgaggatggttcattttagtctgaaacattacaggccaaaatccaaagtagtaacagacgattttaaaactatttacaataaaggtgacataatagaagatgtaccttggagatgtggttattgttttgcagatctcaatttacaagttcacacccaagatgatcctcttcaaaccatagtacaatatgtagtagatcatctgtttgtattgatgggagatttagatcaactgttaaagatgggttacggggacatttatgacgacatagatatagctagtaaagagcggattaaatccactgacattgcaagagccaacgagtatttctaccatttgcaacgcaaaatcatacctgttggacaagattttgacatgtctcaagcaaaaactataactgatagcataggtggatgctttttcaaaatgcaaagtaagttgaatagtgtcaaaccagaatttatcgctgaactatctgcattaacagaaatcatcgaaaaatcatgctcaagtaaaccggtggccagtattggtcaaatattacccggaagtagtaaagaaaatgtgcataactggatgcacaactcaacatggtatcaaccggacccaggcgttaactgtagtaatgataagatatgtggccacaaacacaactacataatttatggaggacctggaatatacgctttgggtctatcgaatgtattggcactggttgatgaacaaagaagtttacagatcatcacccccatcaaaacaaatcaaaatgtgatggccgatggaactggagcattccaaaggactgatgagtatttaaacttttacatagatggaaactcaacaccattacgaatgaaacttgacacatacagtataattaatgactaccaagtattaaaattggatagcaagctatactacgtgttagaatcacaccggttaaaattaaccaaagttatgacaatagttggaccatttaaagagtcagtaccctaccctcaaaaattgatcaaacatgatacaggtataaaagtgacattacatctaccggacatacagagtttcatgggagaattcacaggattgaattatgtagaacaagagttcgaactaaacgtttcattattcaagtatctgtgcttgcgaaacaccactggtaaagttagtcacgacacattgagatcgtatgcggtagggttctcattgcgaagattcgtcgtacatagtaaagtgatctcaaatccaaccatagtgtatcaagacatagatattcacgttattttaagtagggtgtgtatgatgaaactaagaaattgttttgacattagttatgggtattctaaattcgcaaaactgttaggaccgttcagatgctggctgggagacgttgaaacagcaatgacatcatccttcctgggactcattaataaattaataacagacgctttaggtctggagtgggatgtggtgttgaaattcatagatgaaataagactgcaaacgatggttgatggcatatcttccaccaatttctgggaaaaattattgtcattggcagagaatataacaacagaggatgttaaaatagtggatttggatcaaggtgtcagtgtgttcgtgggaccaaacataggttcatgcaatcatcacggtgataagtgtcatcacatcgatacaaaaggtccaaatagatgtttatgttgtaatatgccaataacagaatatgagttttgtgagtgttgtacaccatccaaattatttccagggaatttctttgatatagaggaccgaattaagaaagaggaaactgaaggcatgcaactaactaaaagaaatcctaccagtgaaagagtgatgaaactcttgataggagaaatagaaaaattgtccgctacaaagactgaagaagttaaaagaagataccaaacagctactgaaaagattaaatcagggttacacactgtagtagagaaagttaggaaaacagtcgtaaaagaggaagggccaagtagtgctcaagaagttggcgtagagcaagaagacgaagttgcatcatcgatagagataccatccaatgccgaagggtggcaaagagtcacaagacggaacccaagagacccacagagtgcctccgataggatggtaacggatatgttagatcaattacaaccaatcaccataagtgcagatagtgctgaagcgatacagattttgggttatgattttgttcaacactgcctgaacactgtggaatatgaaaataagttaaatgatggaacaaaaaccttatacacattgccccacattccaatcggtgatatcataactcaaaatcaatcctttgaaatagtaagtaaaatcaccattcctaattcagatgctatgacatgtgcttttgatgcttacaagtatgggtatccaacagctaacttagaagaaatgatagcactaaatggaggaccacccccactagataatcacgtaataatggattatgcatctgcaagaagtgaaaatataatcatattcggtagtacgggaagtgtctggatggcaaggcatagtttaacgtcaaacgatttccattgtatatggtttgacgaaccagagttggatgggattggacatttcatgcctgctataattagaagaatcggaactcaacccacttgctttgttcacacattacctgcgagtcgagatgaaagaacccaactaatcacattacagtatggtagagagtggtcaatcaccaacccgcctccaaactttgatggaaaggagaatctattaatagaattgacattttataacttacacacggatgtgtcaacaaatacttcaacgaatttgctgcaagtagtcaaatcaggagaagaggtaatcttgacaaacaacaaagaatctagggtgcatgccactaacagagaaaggattcatgtgagtttgccttcattcttaaccaaatatgcagacagtttgtcactagcattaaaatttgacctgacgaacgaagccatagatccaatgagacatatctctgatgaactaccaagtaattacgattatgaggtcgaagaagaatttaaagagattttacgcacatttatacgagtgcgtaatttaaaggctggtttggatgcaagagacataaagtttgcctacaaaggaaaattgacaagttggtacggtaaaagtaaattcttaatgccaactagcgagtcacacaaacttaaaagatatgatgcagtggcaattaaattagacaacaagatagaactagcttatgtattaggtttagaagggaataatgtaatcttggacaagacgatgattacagctagggaagtgacaatgtatgagattaaggaatccactggtagtaaattaagactactagtgggcctatgtcaaccaagattaaatatgcaacaacttaaagacaagttagctaaagctcaatatgtcacaggaccagctggtttcggaaagtcaaccatgatagcgaatgaagccaaaaagggggacttatgtgttgcaatgacgtcaactgcagtgttatccttgagagataaatgtaaaccagatgtcactgtgataagtttggaacgagcaatatatgaccattgtaaaacaaacaacaccttattcatagatgaagccactatggtgaattggatacaccttggttatttgtgtggaccagatgggaatataaaactctacggcgcggaccatcagataggtaagaaagatatgagtgctacaccaggagtgaggtataacataacaatcaagagtttcctaagtcctaaaaatattaaacgagagacgcattcttataggataggagaaccaatgatccagttgttacaaccagtagaaccaggaatgaccacacgggccaaacacaaaactacatacaacattacaacactagatgattgtgaattcgaaaatattaagaccatagtgactagattaaacccagacatcataatcaccccttattctcacaacagaaataaaattcaatcaaatctaggaactctgcctaataaagtagtgacaactcattcattccaagggatggaggtgaacaccgcattagtggtgttgagagatgactcaaatagagctagagagttgaatggtaaccccgaatacttgaattcagcgctaactagggctaagtaccatacagaattggtaatatatggaaattacggaaccataactgacttgacaccactggtacgcagattaggaggaatgaggataccaactcttcccacaacaaagatcaaagtctcagcctcaaaacaaagcacagaattagaaatagatcaaacaaccggtctgccgaaaactattaatatcagatccatgcatttattaactagtgacatggtagacaccctaaacacaatgggcataaacaatagtggagtagcattaacatacgaaaaagttgagagaggaactagagtaactgcaaaacttgggaatagtgttgtaagcacagtcactaataaggaaggggaaatagacgtgcaagcgaatgcatttatcaagagaaagatcatgaacaacctagacacgaatatagagataccctcaacacctgagcttgataaattaacttttacagacgagaaaatggttacagttaattttagattaactaacaaattaagagagctagcttggatcatagataagggcaccgaaaataacatgcaattcaagataggaaaacatattataaaaatcacaaaagatagtggttgtcctctattttcaggagcaacatttgaatgtgacgaagagaagttaagaatatcgaatggatggtatagtttatttgacaggaaagtattcttcgattccaaaacaacatacgtcaaattgagtccaatactaacatggttagatttacaagtaccagagttgttttacaagaccagtagtgatatagattggttagatgtactaaaaggagacatggtacatgctttatggcagttccaagagcgtttaactcaaattcatctatggtttttgaattatctaacaggcgatcccagtccaaaatgttactttaacaatgttaaaaatgtggctagatacaataaattaatgaggtccatgggttctgaaccaatcacaagccaccaatcagtggtttaccatgaaaacttcattatgaaatctgtcacaaggtggaggagagccaccaaatacacgcttggtagcgcagaccagataatagctgaggtgagcacaagggacgctgggtgtgtatggagaatgtttgctgttgaaagtctagctgacatgcgacattcatatccaaaatgcaaaggaataggaggaacagattttgacataccaggactactaattccgctacacaaacatatggctaaaaatactgccgtacatcaattagttagtagtaatctagcgaaactgaaagaacaaattcaaccccacatgcatgacttgataaggatggacaaacaaggtttgaagttaattggaaattacatgtcccaaaaatatccaaaaatgactctaaccactggcagttatgaattaattaattcaccaatagagatagcaatggagcagattatgttaaacatgatgggaagtttaacaaaggatacaccgcggcttgtggcttatagtggatatgtcccattgacagtagcaatgttgggaaaatattatatcaaattagtgatacctgaattagaagaatatggaaggttttactacgatattagtaaacctcaattggattcaatgatagcacattttaatagtatcagagacaagaaagtagatttctacaccagcagaactactaacttagaaagattattgatgggtacacgattgacatcattatcacccaaagaggtagatattgcgttaaacaactgtaaaactgtatacgggtggttaccaatgttcaaaaagagcacagacaattatggctttgaccataaatccaacctaatttatttcaaacatggaaaggtatctaatccaataaactcatccatgttggatggaagtcttagtggaaagccaataatagtaaataataaagataactattatttagaaatgtcaactatgactgaagcatttgatcacaggttagtacaaataacacgcaaagaaatcccaatagagagatatattgaccgtaggatagggagttattcagagatgaataacataattaaaataaaagtaccctggatcgacttagacctcctcagggtgatgtccgatcgtcaaatagtaactataaaggaactgacaatcaataagaaattgctacgaaatatactacttagattgatgacaggggaagattcacatgatgatgcactgtcttatgcaaggactctagaatccacacaagtgataacagaaggaggcattgatgacatgagttcaaccaatatgttaacaacattaaacaccacctggtatgccatatatattcataatgattacttaaagaagtttaaaatgttaatatcagccttgaacagtaccagagggcatccgttggcagtaggattgttagaacaattaataactggattcagcaaatttttgggaatgataggtgaagtagcacaaggtctatgtgaaacactaataacaaaattaaataaagatttcaatttaacaaacaggatggccgattgtatagatgaagctcaaaagacaaattggatgccagatgttaaaaacgtgtatttcaacaggttctattttacgaaagaaggttcaaacgatgtgacttcatggtttgaatcaaaaccagatgacaagccagatgatgataaacgtaaaccataccaacaggatgatgctagtgaggaggaaaatagttatttcaacacccaaaaattatcaagattcaggcaaatactagcgacagacaaaccaagaactttctcacatccacaacttgacgagtccgtattacaggaaaaagcggaagaagaaggagatctaactgattatgaagatgttgaagtcacagaacccaccagtttaccagaagtaagtgatgatgatgaagagcaaactgaaatttactgtgaaataagtatagaaaatttgctattgatggaacaggaaataccaactatacaccaacgacgggaactacaaagaaacattagaaaattgagtgcgcacaaaagattaaaccaagatgaaattgggaaaataatctgcaaaaccaaagaattaatcaatattggccaaacaccagagcacgtactcgctggggatcttgtagatatgggaatcttaacagaaaaagagaaaaacactaaaaagcacaaggttatagaccacgatgcaatcactgtcccaatacacacaggaataacaaaacccaaactgaaatctatatttaacaagtggcatatgataccgaagattatttggacttattggcactcaaacactatgagtaagttggtaggtcagtgcgtcaaatcagtacaagtggcaaacccagattatgaagtgattcttctcacagaagaaaatctatccagattcatggatgtaagcgaaatgaacaatattaaacacttgaaacatgagaatcgggctgattggattcggctacaagtgttgatcacttatggtggtgtatgggtcgacgcgacctcaatcggaatcgataatttcgatgagttgttagaaatgacggctttatcggcttcgggagtaacacaagtaagtttctcagaaaaagatgaattcgtcaaattatttgaaaattggatgataatttctacacctcaaaatccattactgcatatgtggttatcccacttaaagacattgctgcgattaaatttcaaacatctagacgctctagatgaatatatgaacgacaactatgagagatatgacaaatataagaaacgtttaggacccgagagccgcttatatttgttatcatatttgatagaaatggttataattggtatgacaagaatggagccaaatgcaatattagccgatgatagattagttgatgtacaccacgaagtgaaatggcaagagtggaatcaaattccatcaatctacttcttcaaaaatgagaggcaatttaaggtgccaataattaaaataatcagcactcataaacacataatagagtattgcagaagtatcggatttgcagctcacaaagattcgtggatgtaccaactagagagaatgggtcatagtccaattatagtagaccatgaaggatatgtagaatgcctacatgatttagtagagaaattttacccgacaatcggaggtagccgtcaaggtattagaccacgagctgatttacaagttgcaattcaaaacaagttaattaaagtggtggacaattacacggaaatatccttgaacccaggactggaggaaataatatcaatcatattttcatgtggactcactttcgtaaaacctcgaaaagaattccagaaatgtttaagagtgctaacagaaaaattaaccaatgagacattcggattgacaacagtggtagacattgtacaagatgtctttaaaatcacattacgtgaattctttagaccattgatcaacaacatggttcctattaataggacaatgcaaagcccaccaaatacagaatatatagtggtcggggataaacgaatgccgaagattatttggtcttactgggatgaaacaatagttaacagattccaggttgacatgatagataattggcattaccacaaccaagattatagaataatcatattaaacaagacgattttgtcgagacaattgagtaaacaaacttacgaattgataatggcacaaacccctcagtaccgatcagattgggtaagactgcacatattaagtaaactgggtggtgtatgggtggacagcactggtatcttccaagatacaatacacccattagtaatgcagactttacaacacgaatcaggtgtgtaccaggtgagtatacagtcacggactaaatcaccacgctactacgaaagttggttcataattgcttcagaaaggaatgtgtttatgaaccattggtttgagaacttcaaaaacatgacaaatcatgtcaaaccaagtggaagtaacgccctagattggatggagaagaattttgggcaatattatcatgatgcaaagaatttgatagtaccaaacttgagggtctatttgagagtgtgtttggtaggggcgataacatcgctgcaactgaaaattgaaccattatcattatgtgttaatgaagggagactaactatgttccatgatttgccaaaatcaaagtggttaaatctatggggcttactgacggaagaaccggcagtagagtgtaatgtcacatttccatttataaagtggatagggatgcaaagaaacataatatttagaaaatacaaaccggatttcattccaaaaccggatagtttgttaggtcaacagatgtttaaaataacaattccatatgatgtgacaaatagtggtggattgagttatcctggggaggcagttaaaagagagagagaaccaaggataaccatttctcaataccatcaagcaaacatactaatcttgtgcataggtagcgcgggagacataatccaatttttaacaatttatgatttgttagaatctattggtaaatgtccagtgattgtcacacataatgaccatgataatctggtgcaaaacagacgtcaccacttcttaaatgtaactgctaaatctataatggaaacaattgattctaaactaacacgcatagaaataggagcggacatcaaaagttatcaacaaatgcaagaaatcacaaaggaactggacgtgttaacaaccaattacagaaataacatacaattcttgattattaacagcgcaataccaaacttgagttgtttctccgaagaagtaggacataaaatcatagaaatttcaaccttcccaaccgaatggatgtttggggacactactagtgaggacacaccaggaattggattgaaattaaagaaatgggtatttaaaaatttaaatgatagaaaaattatgattaaagagcctagaaggtatacatattacaattcttgtagtcaattattatatcctgaaggagaaaactttataggtcctctaaccatttggagtcacaaagtgaatagtgatcagataaacttaaaagacaatgaaatattcataacatttggtagttgtgataaagctatcagtgaggaatccaagttgcacttgtttaagaacctcgtgtcaatcggctacaagttgttgtatcacgacccgtatagaatttatgtagtgggaaccaagtttttcaatgaggtaaacgaaatgcggggcaaaattagagtgattgagtcgtttgacctacgaaagataacaggaaatgacaaaaccatgataaaccatggaggacatggcactgttatcgaaagtctgttggcgggattcaaactaattatacatcctgtgatcgcagatcagttccactgggcgaaaagattgaaagaattaaaactagctactatgttaaccgatatagaaagtttggaaaactgcaaagacgcggtcacagaactaaacaggttagttgatttcaacgaaaaattgggagcgtttttgacaattaacacgataccatttttaaaccagatagataaaaagtacttggcttataatccagggcacagtttgaaagcgctaggatctatttgttttgtagaacagaagttgaaattagtaagaggtgtttacaggatttcaaaagttatgtattctgtgaagttcaatccacaagtagcggaccattgcgtcttagagagcaccctttatcaactttctccttatggattagaggagttttataggttcaacaatctaagtgctaataaattgaaggagcctgctgttacagaacaagatctaataaatggtgtactcagtttaggaataaatttggcgattatttacaataacggcacaggtattgtttatcgtatattcccaggggagtatttaatataccatatagatcgtagcagaattccttggcatgtaggggtaccagaagtggcaggatatgagatgggtgatcagatagataatttagctccacctgtcaaaaacttgcctgaagacgtgaaaacggaaagagacaaattgttattagatcataccacgatagaactaaccaatcccagggtgttggcattaaaaatggggaagaaatattttaagaacttaatggccaggatgcaaggattcaatttatgtgaaatgggcaacagatcagacattcattgtttgaaattagatttacgaaggcatggttttacccacgtaggtgattgcaaaggacccgatcacccattaacggttgggtgtattacatccaaccaaggttggatgctagtaaattggcaagttaaaaacaatcaaataataatttatggtgagcaaggaatatattcaacttcaatcttggtaaacttacatatgcaaatgcaattaaagtcagatgttaaaaccatacttcaaccacggttggaactagttagtttaaataaggcaactaagcaacacaccataatgaacaacttagtgccaagaagtagtgtgatttacaatagccacatgaaaacctataaattagttgtgagcgactatgacaatagagatcatcacatgttcgatgagctgacggtcatacagggagcgacggaggtttattttcatagcaataggagagttacggtcaaagaatttgaagaaagtcataacaaaggattgaatagattggtgttaagacaaggtctattaggatacgagcattactttgatgacgtttatcgggggagattaattctaaatgtcgcgcctactcaacacgaagacaaaggtaaattccatacagatctgaagttgacgaaagataaaatggaatttgtaaattattacttttatgccgaacgaggaatcatgttcgccagagatgattggagaataaacggaatagaaatattggagtcaagaagggtgactgacatcataaatacgtcggtcattctaacagagggtgaaaaattaaacttgaatgcagtaatttctaagcatcgtacgtgggaggtagcaaggatgaccgacatggaattcaaaatcaccccaatcacccacatctttgttgatccgacaggtgtaatacatctacaaagttacatgactctgcttcgaccacccaaacaaggtggaaatgacaatctagaaagacagtggtggaagatgacacatgagaagccaaatttaagcaaacccgttccaggagactggtggggattacgtgaaaaatcaattgtgaaaccagttaacaagtttttggatgtcatggctatgaacgagttgcattaccatgatccaacgactctgaacctcaatttacaagtagtggacgaagagccaactccgatggacatatatatagctccatacgaagctgtgtatcctggaagtttgttagaaccattgaccgattttccagataacattgccatgcaattgtgggaagacacagatttgacaaactggttatcgttatacgcaccattaaactcttgcgtaatcaaatcacgagagttacccgggcaaataataaaatcggagaaattaactatgaataaataccccatacggtctcgggcagtgctcactaaagtgtgcttcgaagaaggtagaagtataataggtagaatgaagtcagtggccttcataagaacaaaaaccccaaacccttacaggttagttttgaatatagcagacacttacttccgtagagattggcaacaattaatttcaaatttcagaaatgacctgttaatcatcagaccaaaagatgttcaaaaatgggtttccgagaacaaagattcccaaagaatagaaaaagagttaatagaattattgtgtggggagttaatttctaaacccattaatgatgtgaatgtgcatctaaaactggagagtttgttaaaagagaatacaaccatcatgacaattcaacaacaagctcgaataattgtgtggcaacgtaaagcagtgtgtgctatttattcgaatctattcgtagaggtgaaacgcagattaaaagaaatattacacagaaagatagtttatgctgacggactacgaccagacgaattgtcagccagagttaggttggctaaaaacgtggtaggattctttgaaaatgatctaaccaagcaggacagacaaacagacaaaccaattatagaagtggaaatgatgttgtacgatctattaggggtacacccaaatgtcatagcatcttggaaggaaatgcacgaagtttggcgcttcaaatccaatttatactggggagaaggtgaaggcatgagacttacagggcaagccactactgcccttggcaattgtatcactaacttacaagtacatcaacagttcacacacaataatttctctatactgcaacttggtttgttccttggagatgatatgtgtatggtgttttctgaaaaaccggataccaccaatttaagaaaggacatcgcaacagaattcaatatgcaaagtaaagactcatggatgatcaatggtgccacattttgtagcatggtaatgtgtcgaacactgtctggggcagaattagccccagatgtcgtgagattgaaattcagatatgaagtacccaatggggtacacgaagctacagctaacaatctgttaatgagaaaagcgtcctatttaatgatgttaggaaaaggacctcacgttaacgacacgattaaagctctaaatttgccaataaaaccaatatcttggtataatttcgattccatggtgacagccgtgggacacaaatacaacatgtcagatgatcaagtgagaggttattatgacgaattaatacgcatgataagaagtgatcaagtgtactctcatgtattcagacatttttccaacaaatagtttcttaagaagtgcagggttataacaccctgacaccccgc

SEQ ID NO: 878 - DNA, 12895 bp, Cluster bean endornavirus 1
  source 1..12895: mol_type = other DNA
ataaagacccgcagcccaatggttttatcagccacgtcgacgacaatctgttcaaatacatgcacccttcaacttaggtgtgtgcgaaagcacacacctaagttatataaaaatgaatatcagaagaaggatcaaaccatgaagaagatggtaaaaaggtgtgacgtcaaagatgagaccaaggtaaaattacatgatgatcttgagacttattttaacacaagcaagcaaataaccaggaatgggatgaaaatggtagtttgctgcaccccaatacagttcgtgtttgatgatcctttgttgtccagcgcgttgcaaccagatttcattgccacttggtggctggccaaggaacaagggatgcaaaattatggattaacccctgaacaattcaagccctttgtggacacggctggtttaagtgtggaagatccagctaacaacttgacacacaagtactattatgaacataagaaagacggtgttgagtgtgtttctgtggacgaaggaggccaattgggattaatggaatcagccctaaacaagattattgcaaagtacggcgggttgaaaggtatgcagcataaatgtatgttagctagctggactaaagtgccagtattggcaaagttaaacaacaaaatcgttccattttgtgtggacaatgagaccatcggccacaggttgtgctgcaactgccacaccatgaatttatattggatgccaggagagaatgggttagatgatgcttggtgtggctgctgcggggcagatttgaactacatgatggtgacagaggcacccaccccgggcgagaaatctaatgacactggtgagcacatcaataatggaatgggggctgaccagttagaacaactgcagcagttgaagtacttggatggtgcagagttagatggcaaggtgcgagaaaaagcaattgagcacgacgctcgaatcatgcgatcgatgatatcacgaactacggggactgtgatcaaattagagccagggatgaccgaatctcaaactggagttctgaagtcgacattcaaccaatatgtgattgtggtgggccaaggcccacccaatccacatgcaatgttggccaacgaacgaaggtgcatatttagacttttattggacctcagcggcacaaatagaccccacgtagatattggtggagccagactcggaccaaccactgatcaatacagatgcatggcacccattatgggatggagggatgtagaaagagcctcagcaaaagtggtgcaaggggacgattgctgtcacagactagccaattgttactgtgatgtggacaagcaaccatcactgatatctgtcgattcactatatgacattgatcctttggagctcaaagagtacatgctgaggagtggatcagacacaatattctactgtttaagcacagccagcgtccctgaagacgccaacaatggagactttttattcgagcaaggtaagtggtccgttcacgaatccaaattgataagttgttatcacggagaaaatctaccatatgttaatgattacagaacatccatgatgtggacacacagtgatgtcattgtgatgggtgaatacagctttgggtgttcaacgatcgaaacagttgggaatcacgtgatcagaatggcacggctgactcgcaatggacccaaaagtttgggttacactaaacgtgtggttgaatacgatgtggtgaaatctattgatgtgccagtcataaatagtgagtcactcaaaaacatattgagccccagtttgttaaccaaacgaaccatcaaagtggatgccaggttgctcaaaatgttaatagtaagagatttaacaaacagctgcacgtatgaagatatggtcacatatgcaatagggatagcgcacagtaaatatcagctagcatccagaatgatatcaaataattacatcacagctgatatggcattagatcatgcgttattggcgaccataataagcaggagagccacatcttacactaacagattaattcggcagacacaattggtaaatcaacctatgcacactattaggacttccagttggtcagatctgtggcaaattctgtttgggtgttttgtggatcaagcaattatgggcattgatgaagcccaaaaccgggtgcacggacaggttatgagcaaagttatgcatttaattgaagaatggatgcatagtgtgaattgggatgatttgctaaacttttctttgcaattcggatggaaagacctgaaggtggtgacgtgcaaagagtcatacagcgagccagattcagtgcaaacctgcacgcaccactcacaaaattgtttgcatgatgaaattaatggcaacaaattatgtgcatgctgtttgctaataagggtggctatgggtgagtcaaaatgcgaatgttgtaaaccaagtaggtgcacccatgcttgctctcacttgtgtgatggtctagacacacatcacacatctaaggggggaaaaaccaaggtgtgtgaatgctgcaaagtggaacattttggtagcaaatgtggggtgtgccaagagtttgttcacgagaaaacggtcaacattccagtaatcattgagcatagcacgcgcgaccaaccaaggaaggaatggtcagaaaagcggtacgtgaaagcaaaattagttccggacgcagtgaaattgctgccagggaaaactgacaaacaagaggtgacaccgttggtggacattaacaagatgatcgaacagaccatgcaggaacggaatgcaacgccaatgccttctagcaaggccacggtggagatgttagctgccttaacctccgctgtgcacgccaatctattcagtgaggacaacccatgggtgttgacagagccaggagattcacacattactggtttcccaggctggagtgaaataaaatttgtgggcatgggaatgactgtcatggacaagtctgattttgaagtagtggaagtcacgaaagcaagtggggaaggtttgttgtgtggcaggaactgtctgcaaatattattgggcacagtggacaatgatgcattgcaacgtttgagtggagttaaaaacaattactctaatttggacctcatgaactacctcacaatgctaaacaaaaattgttgtattctaatggagaactcagctgtggtaaatagggtggatgttggcagtgacgaatttgcctgcatagttcactcttcatggtttggcaacgagatcggccattgggatgtgtgcaacatcagacacaaatcatgcctcagttacgtgccgctattctatccttggatgactagtcaggatgtactgacagcaattgatgtgaacgtgtatggtggcacagatattcacaacctggacgcacagagtaggctggaaattgcatgcatgatatatgaatcctatgtgggggctaattcaaagtacggtctcaagataagcgcgccacgcgtggataaggtaggtaatgagtatctaatcactaacaacaacaaaaacctacacgaaccgggtaaatatttgttcacattcaaagtgcctgaggaatatgttgctttgatcactgaaagtttgaaacccaccatgtccattaaagcgtccaagttgttccgtgatgcttttgatcgcaaacgtccaaccaatgcattggagatgaaatcactaatggatgattggttgaaacaacgcctgcgaaacatatccagcagtttattgagtatgcaaggtgaggaaggtgtggaccggcaagagaacgaggtacttgttaaagtgtacagacataacggggtcaattatgtggatagaattgggcagttggccaagttgaaaacatctgatgtgtgcttgataacttctgggaacgtgaaagaatggtgtgtgatggaaatggcagggaacaagctaatcatgcattgtaacagggtgttcaagtcaggggctaaaatccatttagtggtgcccaaaataagcgtgtgctcggaaatcatggggttaatggctttgttttcaggccagttgcaatgggaaaaactgatatccctgttgaagaatggttcatgcgtgctgggtccagcaggaagcggaaagacagaaaggctgttacaaatggcaggcagcaaagtgacaattttgactaaaactttcagtgccagagaggaaatcaagtccagactgcaagttaaaaccccagtgttatcaatggagaaggcaactatcaagaaggtagacagcgaaatagtgctaattgatgaagcaaccatggtgtcgatagaggaactggctttagccatcacagatcgcgtgcaaaagttgtatctgtttggagacgaattccaagtgggaatgatagacacggatcaacatcacggagtgagagaggtgtttagtgtggcatctatggttgacaatgtagaaagactagaggtcacttaccgctttggcgaagatgtttgcaaggtgctgcgcaatttgggtcaaaaggttacgtcggcgagcaagcacaacacaatcattgaactggtggatatgcctgacatcgatattgaaagattgaatagtatcaggaaaagagtcaacccggatgtggtattgtgcttctacaccagaacaaaacagattctggaaggaagaatgggtgccacccctgtgttcaaagttcacgagtttcaatcaaaatcggccaatgccgtgatggtagtgcagcataaccccgcgtcaaagtcaggaggtatatggcaggatcccaagtattgcatttcagcagtcaccagatgcaagaccaagcttatctgggtgtcggtagacatgccaccaggcaaaccattgcatgtgcggtgtggtgggatggggccagtgggcaatactggtgggcttcaacaagtactgtcaacaatgttccgacggtcgtctgcctcattgagccgccacaatggcgatgaaccgtttgtggttgaatcagctaagcagcatggagctgagggacgaagaagttgggcagagatggtggaagaggatgatcaaggcgcagatattcaccagctgttacaaggaggtggtgatcatgttgatttaattagtggcgctttttcgtatgacgcacagatggcaaattacaatgaacgcccattcatcatcaccagtcaatccaacgtgatgaagctgatcaagcggtacctggatgaaggcacatcaacatacaagtgtggtggagttaagatttggagtaactgcaagagtcaccctatcagcatttcagccgtgctcatacgaggcgacacagtggttgtattaagtgacgaggcaaaagcaatcatcaacaaagttattgacgagttgggagtaccaaggacaatgaaagcttttcagagtcatggtaacaaaaacacttttaaggagcatgtatcgaagaccatagctcttgctgcgagtcaacgcaaacaagagcgaacactaattaaattgatcaccgatgaaattgtgaattgtgaggagagcattaaattgaaaaaggtgcagctgccagtaggatggaatatttcatccatggaatccaggattcagcgagagttgccaccagggttgaccacgaagacgaacggcaatgaaatcattgtcaggggtatgttcgggatcaaacagtggactttacgagtggaagatggtgaactcaagtggtctgacgcagacattgccatgatgctgtggaagtacagacccgaattaatcatggaattgatgatgtacaggctcgctagcagtattgaccatatagccaactcaatcatgactgccgaagacctcaaccaggcagaaaagtctgtggatctattgcaagagcatccaacattcgagcgagccttggtgcttcatgatgatgatccacgaaaattgcaaatagcactgactatggatgccattcaccaaggctgtttgctacctggaagtataaatgtgacagattggttgatccccgtgagggaggagtttgatgatgcatattttgatgtgcatgtaacagatagaatggaagaaacagtaatcagcatcattaggcccggctgcaacttagccacaatatacacgaactttctaagaaatgcagtatatgtggcaggtgggttgatcaagcaaaagttgatcgcatcattcaaatgccggacgttgcaactgtgggaagacgtgataaagcaaaaccaatttgacgtagtgtttaacgaggaccttatgtcggggttggaatatttgaaatggaaagaaagaacagtagatatggccatgcccacattgaaccagactctaatgcaggatgatcacagcgtcttgaaattaccaaagtcaatcaatttaacaaacgaatcacgcccgtatgattttaataaacaacacactgaaaagccaagagcaccaatagatatcaccactgacaattgtttgtgtgggtccaaactgggcatcaagatttccgatgttgacttgaatgtttggaaactatcacagtgttccggattagcattgatgcgaatccctaaagtggctctgttagttcagcacgtacgaattggaggaggcgtgtttgagtggaacacgccgtatggaatggtggcattgacaacgttcggcggttgtgctttatgctgtggcgtgattgtggaattcaatggggaggtggtattagtgatggacaggttgcagtgcacgaagccccgtcattacgtgatcagaaaggaattcttagaagttgattcaatgctggctgactgtttactacacaggttcagtttgatagagccgaattgtgtcaattttcaggccaccaacatacgtcaaatgtcgcatgccatgttgtatttgcccgatccagtggattcactgactttggttagtatggtgacagagaggttgaacgcaataggccgatacacttacaaaaggtttagacatctagagtggcgccacacagcaggggtattcaagaaggataatgaggtgaccatccacttgctacagagcaagctgggtgatgagtacaaactggtggacaacgtcaagattgatagatgcatgagactgtggcccagtccagttaggtttcaacacaggtctggagccctcgttaatgtctgttacactgggagcgagtggtggactgatgacctggtgttggctaataaatttggaattacgcccatgagttatactgagttaatagacaggtcttttgatgaacggttaaaatcgcatggttacaatcacctattagaattcaatagcagaaaacaaccgatgggggccaatgaaatattgaattacagcttggattaccacaaagcaaacaaaaccaaggtgagtgcaattctttctgaaaagatggaagccgctctgtctgcgcaactcaagacattgggtaaaactatatttgtgtctgaaaaacaatatgctgaatacggagcactcttgaaggcggacctcccgaattgcagtgtgagcacacatggcacctgggtggctagtggtggctttgatcaactggtagaaatggtagggattaagtacagttacatgaaatttcctgatggtgaaccgatattgtatcttggtgaccatcccgaaaatgtgttaattagttctagttgggctatgcacaccgattttctgacgagtcacaacaatgtctatcatttaggtatcagcagttgtaaccaaataatggataagttgtggcatatttacagtaaagctgcagaacgagccagtcaagacccaacttatgaaatgtccagcactgacttaaaggtgtggcacaacgctcaaaaatacaaacaaacaggaagttgccaatgggtcaacagctccctcgaacgcacaaaggtgaaggcaagagtgctttggatgggaatgtcatggatgacattaagcacccaacaaataggggaagaaatcaaacggcggggggcctcaacctgttgtttgttgctacctagccaagaccatagcggaatgtacccatttaacattaataaattcggaaacagctggatggcggcatacaaaggaaacaattggcccattgacataaaccaggacacgtggaatgtaattagcacaaaaccaatctacaggtttggagacgcacgtatggtggtgcatcacgaaggtatggtgttggggcacgtcaaggtacgattgactgtgttgccagaccagttgagaggacctgattatcaatgtaggatgcaatcccttatggcaaatcaaaaggttgtgttctctattccaaacataggagccaagcgagaactaggtcgtaaacagcaaacaagattgattgaggtggaccaaaacttttacaggtatctatccttaaaggtaaagctgccaggctgcaaattctctgacttgttgccatatgccaggacctacatccaaaccacattgtacacacatcttggagtgaacgacaggttgaacaacttggtgagttactgccacgaagtatgtgcttgtgtgtatcttgagcacatagggaaaactaatgacgtttatgagaccatgcgtcagatggaaaaattctggggtctacaaagtgcggactacaaagagtggagcaaagcgtacctatggtccaaaatcagtgaatttgcctcattaatagacccagttggaatactgtcacagttattcaacacaaacaaaatacgtgaggccgaagagttgttctttgaggcactaaaagaaattcggcaatttagtgcacacagagtgtacccagagttcaaaatcaccaagataacatgcgagccgggtcacagtgacggtgatggtgccaatgacccaccccaaggagatgatggcccgccagcagatgacagcaagtcccgaaggcaattcggggatgcgggggccaaagcaagtgagttcactgaatattataataccataatggaagtcactaaaatgattacggattactttggcaacacttcgtcgactgttgacgacgttggtgaaaacattgccagcgatgataattatcaacccgttgcaggcagcaatgaatcgttactgagtgctaatgatgatgtcaatgaaacggtgctagacaatgagttggaattgccaatcgcagaatcaattcgagaagaggaagagcttcaattaccacaacacgatgatagtgagggtgttctgagaaaaatcgatgcacacacgatcaaacattctgtgtttgtgtcaccaagtgacagttatgacaagccaattgatgaagttaaccaagcgggattattgaccggggatgccgcaaagtcaattgagaatttaaacatgaccattcatacacaacaggcatttacagaagacaaacaactgacacaaagtgagcaaaattcggcaagtgtcattgtgagcctaatcgatgaatgtttgggcgccgcttccactattgtgccattgagatacggtgatggcatgttacagctggatgacacatatgaagtcccaacagataagatacagtacaaaaagtattacgcgtatgatgccaaacatgttactgagtttaatcccagtgcacagggagactgtgtgatgttgtgcttggaacattgggcaggagccaacaacaagcagatacgtggcactagtgtggtaccgactaggaactggctgaatgaagaccaagttgtaatgatagctttgtttaacaacgtcaatgtttcgatcacgtacaaaaggaaaactgttttgcacaagtttagtgacaaatgggatactgtgaatatccatcacgtggtcctgagaaatcggctacatcattgtgagttgataaaatttttaaatgttaactatgaacaggcaacatcgggtcaatacagactgacgggaaagaatgttaatgatatcgttaatttgttaaaaagttgtggtgacgccaacgacttgccagtagataaggtgatgaaccaccttagttgtattgccactggtacgcttagatctatggattggttcattaaccatatcaatgaagcagacgggtggggaggactaacgtcaatattggaattgtccaaccagttaacagccgccaagaggaagcaagtacccatgctaacatgtgacgtgcaagttggggagaatgtggtggcattgagaatggatgataggaccattgccgttggtgactgtttggcattatctaacggaaccagttggtacatgagttgtgtgttgtgccaccagagaaattggctaatatgtagtaacccagcacccgcagagcgaaattggttgcctgtttgcgtgcatatgcaatacaagtggctcagtcagaggacgcaaaaccgagtcatagtgcatccggggatcgatttaaataaatgtacatgcttaaacaacgacactaagagaatggtggctcaatggtctacttgcccgcccaacatgagtgtggggcgaaccggggcagaaaatttgttgataggacattatgataacatatctcatcacaagtatgacgaccgacacatcctggagaaatacgatccatcacaatgggtcggagttggttttggttttgatagtaatttggtttccgctttgttggacagaagcacatattacagaacgtgcatcgtgggtggcagcgtgcgtgtggcaatcaaattcgaagaagtaagattgggcagcattgtaaaacactgggtgacgagtatgatggcagaatgtgtcagggttggcaatgagatacgaatgagtaagaccgagtggctcagagttaaacccaaagtgtgcgtggccatagagaagtgcatgcaagtggacggacaaattgtgacttgtaagaagattaaagattgtgatttccattgctccaacatggaagaattcagtagtgtggtcggtatggaggtgacagacaactcaatgaagctgttagaacaattgttccctgccaccgtgcaatggaggtcagtaaaatctgtcattgacgtgccagatgtgaacagacacattacaaacagtgtagtcagattggggcataatagattctatttgagcgactcgttgtccactatcaccattatgaaaacaatgaaaggtggaagctgggttgacgtaacggaaactacgacgtacaatgaagatgatcgttggtggggaaccgcaacaggtgtggtggacaaagaatcccaggttagggctattttgggtaacttggtggttgaaccattgtctgatgcagaagtacacacattaacgcaccctgtgcaatgtgggacagatgtggaaagggctctgatcagttgggcagatgagattgattgggatagcagttatgtgcccggaaatgtttacacaggtgtgactccatccgaagtgatagatttgtggactgtccatgacatgagtggttacatcaccaaatacgcccctacatcggagatgtccatagtgtgcaaaactgtagtagctaagttgatgaccactactaaagtgacactgagtcaataccccgagcatgccaggcctgtcttcacaaagaaagagaaccaggagttcaatgccatatcaggtagattgggcaaggaggtggtgtatcgaacagagaagttggacccaatccaagaagccaaccacattgccaacacattcttcaggccagattggaaacaattaagcttggggtttagggcgaaccaagttacctactctacagaagacacaattcaatggttgaaaactagacctgatgcttgcaagatcacgcaagagctgatgcagatattgcaagaagggttggttacacacccaatgaataaaatgaaagtgcatctcaaattggagtcactactcaaagatgagccagtcacggatcaccggcagacaaaagcaaggattttagtgtggcaaatgaaaggactatgcgcaatcttttcgcctgttttcaaggaagccaagcagcgactcaaatccgtgttgggcgttaaaaccctgtacgcggatggcctacggccagatcaattggctagtagagtggcacaagtcccaacaaccagctatttgattgaaaatgacatgcaacagcaggacagacaaacggatgagactttactgaacatcgaaatgcagttgtacttgatcctaggtgtggaccaggctttggttggtttgtggcgttcttgtcatgacaactggtattttaggggtaaatcatgttctggttacaaacacgccatgcgactaaccgggcaagctacgacagcgctaggaaatgctatcaccaatttggcagtgcattggaggatctgtcaaagcttaggacgagattggaagtggttttgtgtgttaggagatgacggaatattgatgagtgacaggaaattggatgcagaggacctaaagacatatgggaagaagtactgtaacatgattttgaagcctaaagtgtcaaaaaatagtgcaacattttgttgcttcacgatttatcggactagaagaggcaactttgcactagggcccgacccaatacggttgaaacggaggttcgaggtgacgaacggcgtcagccagatgaccaaacaaaacgttgaggcccgtacgatgtcttattgcatgatgttaggagacataaaagagacatccaacgttattaacaagctgtcattgccaatcaaaccagtcaagtggtacgacgttcaggagtgttttaaagcgagcgatgaaaagcacggtgagtacatgggttgcagcgaagattgtgtgtcccagttgtgtaacatgatgattaacccagttttatatgagtacaccatgactcactggagtgagtcacagtgagaagaagggtgcccccccc

SEQ ID NO: 879 - DNA, 15039 bp, Cucumber endornavirus 1
  source 1..15039: mol_type = other DNA
gctcccattacgtgtcgtattccaagtactctgtatacagtttcgagggagagacctcctttttggaggtctctccttaagaaactaaaattaaagatgaaatacaaagattataaacccattcggaaagttgttaaaccgtcagtagttaaaagagaattctctacaaaattacaaggttggatcaaactaccaagaaattgtggaatgagtttaaacaagaatccatttcaatctagttttagaaaagtattcaaacagaataaatctctcatctttgataaaaataaaatcaagttggtacctgcaatacgaggtgtcaggaagttcagagatacatgcggagctgtagcatcaaacataagatttgaggatcctttagctggagttgtgaattttgaggccatgcacccattagatattgcaagaatttattacaatgttataaatggtggatgtgaattatggaagccaccacacaaacctatatcagattacctcaatcatacgaaacacgaaggtatcgatgatgaagaagatgaagaagaaatgtttttggatagtaataatttagatgacaatcttatagtaaagatagtgggaccgggtagaggtaattgtaccactgagatgctggaagtcttgaataaattagtggccaggttcggaggttatgagtcttactataatgtgtaccttgaaacacaacacaagcattttggatacctagagaaggatgacgaaggaaagttctcattcgtaaatgccaagttcaaccctttgaagaaatgttctgtatgtaaatacatgaaccattatgaagagatgattcgaggtttgaggatggtacattatagtctgaaacactacaaaccaagatctaaagtggttactgacgaatttttgaccatttacaatgaaggggacattatagaggatgtgccttggcgttgtggttattgtttttcagatttgaatctaaagatatcaatgcgtgaggaccctttgcaacagttaattaaaatcgtaaccagtcaactgttcgtgttaatgggagatattgaacaattgttgaaaatgggttacggtgatttatatgacgacttagatgtttccagtaaagaaaaactaaaatccgctgatcaagtgatcgttaacgagtatttttatcatttgcaacgcaagattatacctgtaggtcaggattttgaagcggcacaaggaaaaaatattacggatgtacttgggggatgtttcttcaagccgcagagtaaacttaacagtgttaaacctgagtttattgctgagttgtcaaccttaacagagctaattgagaaatcattcgcagacaagcaggtggctagtgtaggccaaattttaccaggtaattcaaaagataatgtacacaattggatgcataattcaacttggtacaacccggatcctaatgtaaactgtagcagtgataaagtatgcggccacaaacacaattatatcttatatggtggaccatcactttatagccatagcttatccaatgtattagctttagttgatgagcagcgcactctgcaaatcatcacacctatcaaaacttcacagaacacattagcagatggaactggagcgtatcaaagaacaaatgaatacctaaatttgtatttagatgggaatgccacaccattgcaactgaaactggacacttacacaatcataaataactaccagatattaaagttaaacgataaattatactacgttattgagacacagaagttaaagttaaataaaatcatgactatagtaggaccattttcggacaaagttgagtatcctcgcaagttaatcaagaatgacaatggtgttaaattgagaatgtacttaccaaatatagatagtttcatgggaggttttagaggtctgaattatgaagagcacgaatttgagttaaatgtctctctatttagatatttatgtttacggaatacgtccggtaaagtcgggcatgacacactgcgatcatatgctgtgggttattcattgcgtagatttgtggttcatagcaaagtagtgtccaacccgacgatagtttatgaggatatagatatacatgtaatactaagcagggtctgcatgatgaagttaagaaattgttatgatataagttacggttacacacaattctccaagaaattggggccgttcagaagctggttaggagatatagagagtgccatgacttcatcatttttgagtttaataaataaattgatagtagacgctatgggtttagactggaatgtggttctgaactttatagatgatatacgactacaaacgttagtggacggtatatcatctaccaacttctgggagaaattactggcaatggcagagaatatcaatacagaagacgttaaagtggtagatttagatcaaggagttgacgtatttgtgggacccaacattggttcttgtaatcaccacaaggatacttgtcaacatatggataacggaagcgagcaaagatgtctatgttgtaacatgccaattacagaatttgaattctgtgtgtgttgttccccaaaccaaaaagaggatggcaatttctttgacattgacgaagcgattaagaaagaagtcaaacaggagatggaactcaagaagactgacccagcgaagaagggggctttaaataaaattgttgaagagatagagaagatggtcgcaaacaaagatattaaaaccacaaaacctggttccagtacgggaacatgggttagcacagttaagagaatggcttcagatataaaagagagcataagtaaaaccactggaaagacaataactggtgaagacgataaagttgaaagtaaattagtaatcatccccggaactactgctgacggattgccagacgaatctgttgtaactccgcctagtgaggaaatcccaacctcagcagccggatggaaacgcgtgacgcgacggaaaaataacgatccacaaaacatgtcagatcaaatggtagctgaattgctggacaaattgcaacctttaactgtgagttcagacagtgccgaagcaattcaaattttaggttttgactttgtacaacattgtctcgacccaatgatgtacgagaatatgttaaacgatggatctaaaaccctttataccttaccacacatgccaatgggggaatttggtagtcaaaataccatttttgaagtagtgaccaagattgtcatacccaactccgaagctatgacctgtgcttatgattcgtatcgatacggttaccctactgccaatttggacgaaatggttgccatcaatgaatcaccaccaccgttagataatttcacattggtaaggtacgctgaatctagaaaagaaaatttgatcatagtcggtagcaaaggtagtttatgggtgtcaaagaatagtttgacgtctaatgatttccattgtatttggtttgacgagccagagtcaggaggaattggtcacttcatgcctgctataatcaaacgagcgtcaaacgatcccttataccttacacatactttaccaggtagtagggatgaacggagtcaactaattaagttgcattatggtaactcatggtcaatagctaatttacctcaaaccttcacggggaaagataatttgttgattgagttaactttctacaatttgcacacgtatatgtctaacaacacctctacgagtttgatatcaatcctaaaacataataacaggatttacataaccaataacaaagagtctaaagtacatgctacgaacagagagaaaatacacgtagaagtgccatcattccttcataaatatgcagacaaattgggcctagctttacaatttaaattggctccggatgacgtgcccgaaatgagacacatttcgaacgaattgccaaacagttatgaaaaagaaatagaagaagaagttattgaaatactcagagcattcataagaatatcaaacattaaaaacggattagaggccaaagacattaaattcccttataaaggtaaactcaccagttggtatggcaaaagtaaattcatgattagaagtgacagcatgcacaagatgaaaagatacgatgtcttggcaatgaaatttgacaataaaatagaacttgtgtatgttttaggaacggaaggagatagtgtcatattggataaaccggttataactagtcaagaggtaacagtatacgaattgaaagaatcaattggaagcaaaataagagctttagtgggtttatgtcaaccacacatctctttagaagctttaaaggaaaagttgaaggttgcaaaatacataacaggaccagctggttatggtaaatctacaacaatatccagacaagcacaaccaggtgatctatgtgtggccatgacatctacagctgttcaagccctgagagctaaatgtaagccagacgtgaccgtgttgagtatggaaagagcattttatgaccattgcaagactaataatacattatatgtagatgaggcaacaatggcaaactggcttcaactcggttttctatgtgggccggatgccaacattgcattgtacggcgcagacaaccagatagggaagaaagatatgagtgctacgcccggcgttagatataatgtaacactcaaggatttcctaagcaaagaaaatataattaaagagttccattcatatcgaataggtgaacctatggtgcaactgttacaaccgatagaaccaggaatggtaacaagagcggaacacaagacgacttataatatcaccacactagataacagtgaatttgaaaacatcaaaacaattgtttcacgtctgaatcctgatgtggtgataaccccctattcagctaataagataaagattcaatcgttattaggttccatgaaaactagggtagttaccacccattcatttcaaggaatggaagtaaacacagcacttgtggtgctgcgtgaagatcaaaacaggtcgagagagttaaacggtaatcctgagtatctaaactcagctctaacaagagcaaagttccacacggagatagtgatatacgggcagtatgggacattaacggatctttaccccttgttgagacgcgtgggtggtctaccaaccgtaaagaatgtgctaggaccagctacgaaatcatcaccggcaaaggtgggggtaaacgaaatagacaagactacagggctaccaaaggagataaatattaggaacatgcacacgctcacgagcggaatggtggataaactcaactctttaggaatatcaaacagtggggttatcctaagctatgagaagttaagtgatggaactagagtagtggctaaattaggtaatagcacagtgagcactgtgacaaatcgcaatggtgtgattgatatacaggctaacagcttcataaaacacaaaattatgaataatttagataccaatataaacatcccaacatcagcgcgagaagatgaaacaggatttgatgtaaatgagttaatagacgttagttttaaacaaacaaataaactgagagaaatggcttggattattgacaaggggacaacaaaccacatgttcctcaaaattgaaggagaaatagttaaagtaacaaaagatagtggctgtccactcttctcaggtgctacgtttgaatgtaaagatgaaaaattaaagatctcgaatggatggcagagtttgaccaaacgacgtttatattttaacagtaagacagagtacgtacgtctaagttcagtaataaattggttagacttatcccatgctaagttgaagcacaataaaaataaaccaatgggatggttagaagtcatgaagggtgacacagtgcacacgctgtggcaattccaagaaagattgacacaagttcatctatggtttttaaactttttaaccgttaatggaaatccaaaatgctattttaacaacgttaaaaatgtggcaaggtataataaaatggctaggtcactaggattagacccagttaaccatcatcaatcagtggtgtatcatgaaaatttcatagcacagtcaaccacgggatggtggcgacacaaaaagtataccctaggtaacggggatgaaattttagccgaggtaagtgtaaaagactcagaggcagtttggaggatatttgcaattgagagtttggccgacatgcgccatacctacccagagtgcaaaggtatatccggcaccgatttcgacataccgggattgcacatacctttacacaaacatatggccaagaacacggcaatacatcaattagtgtgcagcaacctggcaaagatcaaggagcagatacaacctcacacacatgacatcatcagaatggacaagaaaggcatgcatatggtcagaaattacttgagtcaaaaatatccaaagatgacattgaccacaggcagttatgagttgccaaactctcctgtagagatcgctatggaacagataatgttgaatatggtaggaagtttgagtaaagatagtaaaggtatagtggcgtacagtggctatgtacctttgacaattgcaattcttggaaaatactatattaagttagcaattcctggtcttgatgaatacggaaggttcttttacgacatgagtaaaccacaactcgattcaatgttagatcactttaacgcaaatagggcgaaaaaggtaaattggtacattggaacggacgtaatattggaaagaatattgttggggactcgcctaggtgggatgactccaaaacaaataaacgatttattaggtaggacgaaaagcgtatatggttggatgcctatgtttaaaaagagcactgaacattacaactatgaccacaagaacaaattagtcaattttaaaaacggtaaagtatctaatccattacataacgagttatttaattgtagtctaagtggtaagcccatattagtatcctatgagcataattattacttagagatgtcgacaatgactgaagtgtttgaccaccgattggtacaaatcacaaagaggccaattccaattgaacggtatatcgatagaagaattggggcttattctgaaatgaacaatatcattaaaatcaaagttccatggatagacctggatttgttaagggtgttgtcagacagacaaattataacaattaaagagttaactgtgaacaaaaaattgttgaggaacatcctattacgactaatgacgggcgaggatagtcatgatgacgcattaaattatgctcgtactttagagtctactcaagtgatcacagacagaggtatagatgatttgagcacgaccaacctagtggtgactttaaataccacatggtatgcaatatatattcataatgattacttgagaaagttccatggtctgatattggctgttaataaaactcaaggaaaaccaatagccgtaggattgttggagcaacttatttctggtttcagcaagttgttaggaaaaatgggctcgatatcacaagaaatatttgagaagtacataacgaaattgaataataacgtgaacttaaccaacaggatggctgattgcatcgaggaagcgaagaaaacaaattgggcccctgagatgaggaatgtttattttaatcggttctacttctccaatgatggtttaggagaaataaacgcttggtttaaacccggagaaggagacgatggtccagatggattccatggcaaaccatcaacggataacaaagatgaagtatattttgataatgaacactttgagcaagagaacgcatctagatacagacaaattctttcctttgatgagcctaaagtctcagaatcatctcaaaaagcgacctcagaacaaatcatcgagtccactacattggaagatgaagattctgaatttaaagacgctatgagtagtcaagaggatatcagtgatgtagatgaagctgatgaagatatagcaattaacattgaacctattaattgtttaatctcaattgataacagtctctatttagaacaaaacgtgaagaatattcaaactcgtaaacatatctacggctacatagatagattatgtcaatataaaatactatcacaaccagaaattagaaactgttttgagaaaattcacaaagacttattactaaacgaaacatatgacttcaactcatatcagccaatagtaagtgaggggattgtgacttccgaagaattacaggaagtgaagtacaaaattgtgcagtataattccgattatatcagaacgaatgaagaatggacctcaagaccaattaaagtcatacactcaagttaccatgctatacctaaaatcatttggacttactggcacactacaacagtcagtggtttaattaagaaatgcattaattccatccaagacatgaatccagattatcaagtggtggtagtaactgatgaaaacctaggtacttatgtgagtagagagtatccggggaaaaataataggggtttgatggaaacaaagtccgattgggtcagattgaatctcttgttgaagtacggaggtgtctgggtggatgccagttgtataggtatcgattgtttcgatgaatacatggaactagcactatcatcaccgtcaggagtcttacaggtcagtacttcagaacaaacggatccgataaagatactagagaattggttcataataagtcccccgcataatccactgatacgagagtggatgataaaattcgaagaactattggtcaaagacataaacaatttgcaagatttggatgatcatttatccgggggatatgaaaattatgaagttattaaacacaagttagatgaacacagtaggtactacctaagatgttacttggtggaaatgttggtaatacactcaagcggaataacaccgtacgcattgacagcagatcattcaagggttgacgtgcatcatgatgtcaaatgggaagaatggcaaagaataccatatatttattcaacggcacataacttatccatgaaagtgcctatagtaaaaataattgacgtacacagacggataatagacttttacttgagcgagggaggaatcgtagacaaaggttcatggttggacatgcttgcaaatagtacccatgatgtatgcacatacacggatagtcatttagtggacaaaataattgacacaacggacaagttttatgtgaagttggacacggatcagaaaattcttgctcaccgtagagacgttgcacgtaaatatcaaaagtgcatcatcaagaccttagaaggtaaaaatgacattatgatgagcgataaagttatagaaattatgggaataatttttgagcttggtttgatgttcgtcttgactaagactcgtttagctgaagtgctactagaactgttcaatggatcagacataaatcaattgcaaccaatggaagtgataaaattcattgagaagcatgttgcgatcaaagcggtccgtaggttcaaaatgattaccaaggttaacactagaataaaccggtgtacaagtctaccagaaaaaccaaaatacgtcgaaaaagacgggatcagaatacctttaattatatggtcatattgggacgacatcatggtaaatgaattccaactagagataattgataattggtggtatcacaaccaagattacagaataataatactaaacaaaacatcaattagtaagcttatcaatcgacctacctatgagctgttaatgtctcagaccccacaatatagatctgattgggtcagattgtatgtattacaattaattggtggagtgtgggtagatagtactgggattttccaggattcagtacacccattagtgattgagacgttgagtcatccttccggagtttaccaagtaagcattcaaccaagatctacgtctccacgatactatgaaagttggttcattgtgtccacagagcgcaacagattgatgagtcaatggttcaacaatttacacgagatgacaaaacacgtacacccaagtggtagtaacgctctcagttggctagaacaaaattacggtgagcattaccatgcggcaaagcatttaattgtaccgaacctcagagtgtatctgagggtttgtttgataggggttatatctaatatgcaattaggaatcgaaccattaagcatttgtgaggacgaaggtgaggtaagtatgtttcacaaactacctaaaaacaaatggttgagattttggaaagtcatcagtgaagagccggcagaaaattgtagagttacatttccttttattaaatggattgggttacaacgaaatataatattccgaagctacaacccatccatacctccaaatcctaatagtataattgggttacaaatgttcaaagcgagagtgacatacgatgttactaacgtcgggaacttagtttgcccaaacaaggagttagaagaaccaacacctaaatcaataaagatcgatcaatataaacaagtaaatactataattatgtgtataggaagtggaggtgacatattacaatttatcacaatttatgacctactagagtccattggggttccatctgttattgtcactcatcaagatcatggtgataatctaggaaacagacggaaacatttactcacagtgagtgctgaatctatcatggaaactgttgacgtaaaactgaccaaactggatattggtaccgacataaaaagttaccaacaaatgaatagtatgactaaagatttagaagaaataattggaaattatgtacacaatgttaaaacattaattattaatagtgccattccaaacctgaaatatttctcggaagaatacaaatttaaaattatagaagtgtcgacgttcccaattgactgggttttcggaaatgctacagagaacgagagtcagagcttaggaatatctttaaagaaatgggtctttaacatgatgagtgacaggagtaagttaattaaaacaccagatcgttacacttattacaactcatgtagtaaattgttgtacccagaagggaagaaattcgtaggacccctgactttgtggagtcacgagagtaaggctgatgaattaatcatgtcacctaggcatatactggtgactttcggtagttgtgataagactatcgaggcttccagaaaattgatgttgtttgataatctgatcaacctagggttcacaatcatttatcatgatccatataaattgtgttcagcaggaacaatgctttgtgatgaattatacagaaggcaaggtaaagtccagataataggatctttcgatttacgcaaagtgtctggtcaagatctgaaaatactgacacatggtggacacggcacggtaatggaaagtttaatgacaaactttaaattgatcattcaccctattatcgcagatcagtatcagtgggctaaacgcctcaaagcgatgaagatggcaacagtgttgtacaacattgatgatgcagaacagtgtaagttggctgtcatagaattaaataagttggtgaactacaacgaagtattgggatcggtacagggcattagtactttggaatttttacagtcaatcaataccagggcaattaattacaatccctctgttagtctgcgagcacttagggggactgttttagaaccaacgactttacagtttaagaagggaatatacagacttaaaaacgtaacgtattctatcaaatataaccccgtggtagtagacagatgtgtgttggaaagtactaactttcaattcaccagtgacggtcaaacagaattcagcaaaatgagaattttgagtgccaaccggttaaaagaatccgctgtcactgaaggggatttagtaaatggggttctcagcatgggcctcaatgtagtaataatatacaataacggagcaggtgttgtttataatatattcgaatctcctcatttaatatatcacattgaccgtagttgcctaccatggcacgtaagcgtgccagaagtggcagattacgaagagggactgtcaatggaagaattagccactccagttaaagagttacccgacgatgttataactgagagagataacctaagacgtgacttttctgttatagaacttactaatcctagagtgttgtgcttaaatcttgggaaaaagaaattagagaatttgaatgccagattgaaagggtttgcattaaatgaactaggagcaagaaccgaattacaatgttgtaaattagaattaagaagacatggttatgtccatgtaggagatttcaacagtgtcgaccatccattatctatagggtgtattacagctcagcaaggttggacattagtcacttggcaggttaagaacaatcaaatgatcatttatggtgaactaggtatcttaacaaactcagtgttagtaaatttacacatacaagttggagccaaacaaccaattaaaacaatattaaaacgcacagttgatttagtaagtttaaataaagcaaccaaacaacataccataatgaaccacctaaacccgaggagtagtcaacttgttaacaactatatgcaagattatagactaatagtcagtgattatgacaatcgagatcatcatatgtatgacgaattaagtataatgaaaaaggccacggagataattttccatagtaatagaagggtgactttagacgatttcattcgaagtcataatgctagtcacaacagaatggtattaaggcagggaatgcttgttttcgagcatcattttgagcaaataagtttaggagccatcttattgggcccgagttgtcgatatgataaagagaaaggtggctttgagacagatagtgttctgaatgaaaaaatccaaaaatttatagaccattattgctccattcaaggaccgaaactgcacatgaaagacgtttggatagtggatggggtacagatattgacagttaatgaaattaaaccttatataaccagatcttacgtattgagtccagccgaaaaagagaaattagagagtgtagtgagcaagcacccacattgggaagtcgcccaaatgacccacttggaaaatgatacagaaaacataagacatattcaagtcagtaataatgggagcatttacctacaaagttatttaatagtattaagaccaccaaagaccggtggagaaagcgaattagaaagacaatggtggaagatgacccacaagaaaacagagagtaaccccacccctggtaattggtggggaatgaaaaggaatgaaacaaagaagactaaaagtgaattcctagacgtaatggcgatcaatgaattacattaccatgaaccgcaaactctaagtgtcgctctatcaaatgactgtgaataccaaccacccatggacatatatatagcaccttacgaatccgtgtatccaggtagccttttggaaccattgactgatttacctgataacatagccatgcaattgtgggaagataatgacttaactaattggttaaacttatatgcacctttaaataattgtatcattaagacaagggaattacctggaaaaataatcaagtcagaaaaattgactatgaccaaatggccgatcagatctagagctatattaactaaagtatgttttgaagaaggacgaagcataataggaagaatgaagtcagtggcatttattagaacaaaaatgccgaatccatttagattagttttagatatagccgacacatatttcagacccgattggaaacaaatgataagcaactttaggcaagagctgttaatcatccgccccaaggatgtgaaaaattggatagaacagaataaagattgtgagaaaatagagaaagaattaattgatttgttatgtggagaattaatcactaaaccaattaatgatgtcaatgtacatctgaaactggagagtttgttaaaggaaaattttacaataatgacaatgcaacaacaagctagaatcatagtgtggcagcgtaaagctgtgtgtgcaatctactctaatttgttcgtagaggtcaaaagacgattgaaggaagtattgcacagaaaaatagtatatgcggatggtttacgaccggatgaaatatctgccagagtccgattggttaaaaacgtagccggatttttcgaaaatgatttgactaaacaagatagacaaactgataaacctattatagaagtggaattgatgctttatgatttgttaggggtgcatccaaatgtcattgcatcctggaaagaaatgcatgaagtgtggagattcaaatccaacctttattggggacaaggtgaaggtatgcgattgaccggtcaagccaccactgcattaggcaattgtataacaaacttacaggtccatcagaagttcacaaagactaactttcaaacattgcaattgggtttgtttttgggggatgacatgtgcatgatattcagtgaaaaacctgatacttctaatttgcgaaaagacatcgctgcagaatttaatatgcaaagcaaagattcatggatggtgaatggagcgacattctgtagcatggtgatgaccaggacgaattttggagcggaattagcacctgatgtagtccggttaaaatttagatatgaagtgccaaatggtgtgcatgaggcaacagcagagaatgtgttgatgcggaaggcatcttatctcatgatgcttggaaaaggtccgaatgtcgaggaaacggtaaagctgttgaacttaccgataaaaccaatagcatggtacaactatgattatatggtaacctctgtggcttacaagtacaatatgacagatgaacaggtgaggggttattatgatcaacttctagcattaattagaagtgaccaaatttactcacatgtgtttagacatttttcgaataagtagtttcttaagaagggttattaaaacccccctccccccccc

SEQ ID NO: 880 - DNA, 10125 bp, Diplodia seriata endornavirus 1
  source 1..10125: mol_type = other DNA
ccagcaccatcaccacgaattcaacaaccatgacgcacaacacatccaacgataactacacacactccaacaatggacaggcctggcccgaccagtccattgttaattatagggccaacaaccaaacaacacaccaatctgagcgcgctgagatccaccaaccaaaccagccagctttcagcttgctgagcttgttctcgggtcctcgacgcgcccaaccacctatcgacgaagaacctgaccaagtcactttcactggaagggctctacgcgcccgacccgctgggtggcaccctgctgtcgccagcggtgatatagaattaaacattccgcccctacctaggttcgaccccacacaacacccaacctggaccacatcttcgaacaacgaccgcctcaaacccagcctcagctggctggatcacgatcccactggacccatgatcgatggctatcaactaacctcaatcgggttcgtggccttggaaagaatgggtatgaaactcagaaccaacagcttatatctgggtgattacatagacgaggaatatgaatttatcctgatgccggagacgcggtatgagcatccgggcgtggttgcagcttttggcaacttgggtcgcgacacaatcactgagaccttcaaccgaaaccgaatgtacctgcgagctcttgaagacgtttgcgggtgtcccctcgccagcctcaatcaaagagcggcatatttaacaatgctgcacgagtcaggctacgacctgatcactttcctgtcatacttctccacctggccgcaagaaatggtgcatctgcatatagctatctggcttagcggtttcatcattgattttgatcacaccatcctcatgcaactcaaactgagctgcatcaatcgaatcgaccccgttttccgccacgtcatcatggcccatagtggcgcggaggtagccgcggagatgagtaaacatcagataacagcggttgacggtaagcagctcagtacggaacaagtgtgcgtgagtggcgtttggctgactctcgggcacattgaagcccgatcaggggccaagttcacaatagagcaaatcaacgactgcgatgcagtggatggcaaagacgccaatttacgcaagcgcatggaagacatgatgcttggggacacgaaggacgccctgcgggggttcacggcgaaaggagcacttgaccaccacaacaagaaaatcatagacagcaccatcagactaaacaccttgcacacctatcctatacccctcaacacgagcacatcggtggttgaggcattggagttatcctggccgcggaaaacatttgtcaccagcactcaatgcgacgatcacccacacatttatttgaatgtgagccggaacctttgtagggagtggattgtcagccagttccccaggaatcaactactaattgatgccgggggtgatttctaccaacacatcaaatcaagcaattggaacgtccacacatgcttcaaggacgccagcgcccatgaccacgagcgtttcttgaagatggaaacaaaactcatgaagtacatacagaccacgagtgacatggttgcaacacagaatggagttaaatccctcagtgaagatcgcgtcaaaggccttaatcgcatccgacgtggccgccaacagtattaccatatagctgacgctgagaattgcgttagtcggggtcataacgggtggtctttcggcatgagcgtggacgccctattttatatatcaccagagaagtatgcgaagatcatgaaggctcacaacatcgtccatagcattcatgccatcactgttccccccacattcatgtatgccaaaagtgggaaactccctttcaacgagggggcatggcttgtgaaggacgacgtgttctccatgacaaccaatggtgagagccatgtttactccagttcttacaagctcctattaaaatggctcacaacgccactatatgcgggtgacggcttcggcatgtacgtgcggaatgaaggatacaagggtgcacacatgatattgcgggtgactcgcgtccccctcaacgtcctgcaggcggtcacactccgtcattgcgtatggctcagtggcgacgctgacagcttcttttatgatgtgccattaatcaagccaaaccggcacatcacggcgttgtggcgccaaccctttgagacgaagcgaattagggtcaatatgacactcctagaaatgttgcagagtcggctgcgtattgagggttgcacggatcaagatctgcacgaatacgctcgcggtttgaaatggactgtgtacacaagtaacacaggccgaactagacagtttgatctgtctgatgctgagatgcaagatcacgaattgctggcgatccaccagcacacccaaatggttgagacaatgaaaccattgttcacgtgggctcgaacaccgaaacgtcaagaatcatggcttagccaagtctggatcgctttccgcaatgttttgctgaagttgggtaggcaagttgacccaaccgaagaggattgggtgcaagaactcatcatgggcaactcaacagcggatgagtacaaattgggtccatcccacattaacgagatgctgcatgacatcacacaatatgagggcttagctcaccagatcgagagccggatccccgcagcgataacgtatcacaatcgaaaccagattaaggttagttggaaagatcaaaagatggatcgactgagcttggtcattcaagatgacgacatgtccaacagaatccatgcccaccatcacaaacacacaaaacaattaacggacaaaagttgcaagcccaacccatcttgccctcacgagcacgacaccttggacgagcatgacctgaggaggccggatctacccatgggtatgtgttcatgctgtgggatcgagtccagcttgtacggccatctttgcgatgtctgtcgacggttgcaactatgcttaacagcatcacgtgattgtccgcacacacacatcatcgagtcagagcattgctgcgcacagcgaaaatgtgcatgcaagcgtgagcaaacttgttcatgttgtggatgtgcatccacatccaatccatgtttgttgtgtttagagccaacgcaaccagccgttgttactaaagccatgccacaacgagctcagcaagaacaaatggttgaagagattaacactcgactctccagcgctacatcccaacattcatccgaaggcatagaaatcattgacaacaccttaagtgctgatgatccattaccgcctgccgagcaagaacaagtagctaaaggaacaatccaactcatgagacacaatttcaaattcacgaaagagctgaccaccatacagtcggcaaaaattgaattttatgacgaagtgcctggcaacggtgattgcggttggctggcagtccagagccttttcgacttgcccaacagtgacttagcacgcctcaagaacctcaccaggaaaaccgagtggtggggctcgcaagagttgggcctcttcgcaacagttttaggtttgaacctgttaataaaggcaggcacgcagaccacctatcatcaaggcaatattctgtcacaaatgtacggatcgataatccacatgcacgacatcaacgggacagcccactggaacccagcaatggtaaccattatagagccccaagtgtctgaaggtaaagccagggctgtttctgagagcttggaagacttcattgagcccggtgctgacatgaatgatgtgtcagtcagggcggaggctgccgagcgcatgctcagcacacgaagttggatggcggcctggccggctctgtccttattacaaaattacccaaaccggataatcgatcaaaacacgctcaccatcccgttggaaccaatggcgtccacaccgctaacccgattcatttccagccaatcaactttaaaaacccgtagcgccttagattcggcgctcgtgagacaaaccagagcccatggtccgagtgatctgatatggtttcctcgcaggctgattaccatagtggggcctaaccagcgcgaatacgtcattaaggattttagcgttgatgggttgttaaagctggtgtccagcaaattaaatgtcaccttctacaatgatcccacgagtctccaagtaaaccaggcaatgtggatatgtccaacgaaggccgaggcagaagacgtggccaatgagcgcgagctgcaggttgtacctagtgggcgcaccaccggagaggcgtgtgccacctatggtgatcctattgacgtctcacacccacataaagttgtagtgatcggcctcagtgctgaaaccagaatgctcaacagacgcgcagccatcgatcacaatggaacaggcatgttcaacgtgaccatgcgccgaccgaatctattggctgcttgggactggattagttccctatccgcaattggtgtagaacatatttacatgcccgctccactgaacaattttgatctggatgattatgaccagctcaaagtgatggaaccaacggaaagggttacgaacccaaggcttagcgccatgatgagtgatatgtccaagagaccagagaagaactttggtcaaaacacgaggaaccaacccataggtgagataatagaaacaatacgcaagggcgccaccccgatcgatgcggatgatgacgtccgcaactgggtgttggacaagggcagccccagcgtaaagcacgtcacatctagaggcggactcgtgtcgttgtgtcgggtttgccacaagcccatgctcaccctccaaccaaagcaggcgtgtacacgatgcaacggcagagttaattgtgccataaacgaaccagaccacctaaacggattgatggtaaaccaggatgtgataacagacacacctcgcactgaagtcctagacatgacaatgaaatcaaacttgggatcgagcggagcgaaccgctctatagcatgcgcattatgggagagatggctgacagttaccaatgcgctaatcaggcacaccaccagacaaatgggacatcgccaagccctgtatgtgcgcaaacacagcgcatccatcaaatcaaacacgatcgccaaacccccgaatttcaaaccatgctctgacggcgaaccggtcgtaatcctgagccccagcacatggtgttgggcgtacacagaacgaggaacaatagtctcaacggtcaacatgccggatggaccgattgatatcatagcccacgtacacaacgtgtcgcattgcccaaaaatgatcgcgcacgcggccgatgggattgataggaaactagatgatctaaaagaaatgctagctaatagccaggtaatcatcggcgtgcctggcgctggcaaaacccgcaaggctttgcatgacaatccaggcatgccactgattactatgcagactgaccacatcgaagtattgcaggcagccggccatgtagcctacacgccaagcacggccctgaacaagcacatgccagagactgtgataattgatgaactaggcaaatggtccattctcgacttatggcctttcgtgaatcgagtgaagcgtttcatcgggacggcagacctgaaacaaacgggtgccgtgatcactgaaagtaaacacctaaggttgagcgctgattggcttgacatgatccccatcgcgtcagaactcacacattcgaggcgattcgggtccaagaccgcgaagatgttgaaagcattccaccaggacatctcaggcagcaacgagtcagacaatggtattgatgttgttcttgtaaatcagaatgatatacgcgaattcgcgcaatccatgattggtcgggaggtcaaccgcgtcatcacaatgaataatcgcacactaaaaatggtgcaggaggccacggatctaccagtttcaacagtcgatagaacccaaggcatgaccataccaaaaacagcggttgtgattatgtcacacgacttaccagattgcacggatgagaggttgtatacggctctaagcagacacaccgacggttgcaccctcatgttggcgaaagacgcacaggacaacatcactcgccgactcaaccccgacgtggctggactcagtccgctgatcagtgagatgatgaactgggtggaaggaccagtcgcggttactattaagattggaaagaaaatcacaataaagttacgcaacctagtcaaagccatctgttcttgcctccatgattgggctaagcaaatatggtcttggcttcaaatgatcttgggtgattatatgccgatagcttatcgggcagatactgacgagatagtgatcagtgaggatgacaacttgcaatatgagatcgcagatggcctaggtttggctttcgacgatggggaaactcccgatctcaaactcgtcgaacccacccccttgattgagcaagaagaggtggacgttgcttccacaacatccatggagagcgatcgtttggtcgtaaagcaccccaaacccgcggaggtggaaactgaatcggaacaagaagacgacgtgagtagtgttatatgggagaatcattccaactctgacattggtggtcgcaacgatctggcccacaccatggtgaaacgagttagggccgtgatgcaagcgatccttaattggatcaggcgtgtcattgatgctatcaaaggtgggtataagagggttggaaacgccattcaccacattaaaaccaaccatacgcaacacatagatgttgatcaagcaccaacgatggctgacttcaacccagaaaacattgagacgaggtttaggcccatcagcgataggcgatcctgggcaacggcaatgaatgacataaaccaggagcttcgtgatgcattgaaaaaccccgaggatggggacagtcaaccaacatccccgagtgaggtccgacgcaacagcaagatgcgtgcttctataacccaagccaatgatgtggaagttataaatgcgccctcccatgttctcaacagagagttgggctcaaaatacgtccgcgattggaacaataaaatcctcaagtatgacaacaccttcgtttgggatgacttaatacttaacatgcagccaacgactgtgaagagatatgactggcctgccttagagatgcaagttcccatgatgcccaccatccgagttatgcgggtgcacgaatcaattcagaacaatgagggcgtttatgccataggcatacgtaacacctggttcttattggcccggagcaaggaaggtgacaccatggagatgtttgcccaatcgggttacagcgccatgcgcatgccagcgcttaacactttaatggctttgctccgtcgacggatcggagggggtcgtaaccacataatggacattttattacaactggcagactctttgagtcgctggcttaaaatacgtttgacctattggaaatggtattcgagatgcctcgttgatgcatcatataaacagatgccgtcgacgagagtcaagatgggtcgtcatcgagagattgccacgtggctgtactcacggccaaacgtgcaaaaccttgttaaaaccggccgacttaaattggtgaccagcgccggcgattgcatggcggtcatctatggggtttccaggaaacgcaaacacggcttgagagaaagtcacttaatgcggtttaggcagacagaggtggttggagagtgcatagtcgatgaaatcggcgaccgcatcccaacatcctgggtgacagatgcagtgaaacaaatcgtgatgcccagcttcttagaaagacatggcagatcaaacagtatgccacacctagggggaaaaaatgaaatcttgagcaagtattggagccggtggctgggaatgcccagtcgggccccaatcacgatagaccccacttggaaggatgttaagtacaacatggcttttgatgccacagcccagccgaagcgcatgaccaacgctttcacgcatgtgaacaaagacccaacaatcaaagacacgccacacattgtggacgtggactatttccacgacccaagtgtggtggcggtctgcatcccgagcggtgctgggaagacagttatgactgggaaaaaccccacgctaatgaaggatgttgatgatctcatgaactggcctgactttgcgcaactccaaaccctggacgtgaacgccggaatgtttatgctaaccgatcaataccgtcgtaaaatagcagagtggttgaaaacagatcacgaacagcgtatattattggttcaccaccctgacttcgtttcaggcttggttaaagacatcttggtggtggagccaacatgggatctagctaagccttggtcgcggaaaaatttacaagcattggcgagcagtcacaaaaatttagatcgcattaggccacgaaatcatgggtcaatggagcgccaggttaaggagtgggcggacacacgtttagtcctcctcttaaaagcgaggtacaacgacaacaatgagatcgatgcaacagccgaggactggtttaccaatcgtgatcaatctctattctcagaggtcaagttgccctctgagggccgcatcaaacatagattgcccatcatgcagcaggtgcggcaaaacataacagtcatcggacacgccccaaccatagctcgaccagtcgtacacaagtacggcaatcaattgatgaacagcatcaccacccggcttcatggggttgagaacttgaggaagaatcgtatcgacccggaagataacctggagtcgatggcagaggcgttcttcgtgcccgattggcgtgagctactgataaaatatgaggaaaacccggtgtacccatcagcggagatgacggaggaatggttgagtatgaaaggtgacgccaatcgtgttgtcaaagagatgcgggaagtggtgaaggcactttacaccaccaaacccttcagtgacacaaaactacatctgaagtcagaggtgctgctcaaagaacaagtggataaatttgaagatcaaataggccgcgttatagtatggcatcccaagtactattgtgcgatcatatccccaatcatcaacatcctaaaatcaaggttcaaggcattgctcgacccatccaaatgcgtgtacagtgatggattgactgtcacagacctacagggtgtcgtctccgatctcacaccgaaggaggttattgaaatggacatgaagaagcaagatcgccagactgaccaaggcgagatcgaaaatgaggaactaatcatgatcaaactcggcttcccaaagttcatgatggaaaagtggcactcatacaattcggactggcgctacgtcagtgggtcaggcattagggcccggcgtaattggttcagaaaaacaggagacgagatgacatcacttggtaatgccatcaaaaatctgagtggtttggcagcacccttcatcaagttcggggctgaacgagtcctcgtcttgggcgatgatagcatcgccttcggccccacgcaatgggatcaaaggtgggtggaggaccacatggcccagaatcacaacgtgcgtgtcgaatgggctggagggtctcagggcaagttttgtcaattcataatatcacccatacgaaatcacggctttatagtggcagcggatttccacagattgaacgacaaatacagggcttacaagagtatgatggaacgtggatcggaagattggaacatgcgcgcatattcatacctatgtttagttggaaaatcacacgacacgatgatggccacgtcgcgcatgggattgccccgaccgatagattggagccgcgcctactggctaagagcgcaggccaatgcgaattatcatggcgtgtcacgtgatcgagtggacggatgggttagcgccatgatacatgacatggaacacagcacgatccgacaccaaaccttcaaagtgttgggcgcgaagcagcgttaaagcccatatcagttcacacaatgtgggtcgtgtgagaattagcatcatcaaaatatgagaaaatggtgtaaggcacaatcccgagatgatgccaacccaacataacacccaaggagtgtgttgaagtcaaatcgctggc

SEQ ID NO: 881 - DNA, 15677 bp, Fagopyrum esculentum endornavirus 1
  source 1..15677: mol_type = other DNA
gacacacaacaaatattaaaaatgtcaagtaaaccattgaccaaactgaacctagacggttgtttaaaaatcatgggcggttcacgcccacactctcttagacaaggggggggcctggtccccttgtctaaaaaagagaaatatagaatgagctactcaatacgaaaatcgtttcgtgcgggtggcaaacctataaaactaggcgaaaacaaagacatcataccatgtgcgattgcatgtaggcgtgatgaacataaagaatttataagctttggggctgaatttatggttccagattttaaccacttggacgtggctacgcttagaaactttatattactgtatcgtgagggtatttgtcatatcagcactacagtagacaaaaacaaacagattgttaagaatgtgcatttgcaaaatgaagaaccttgttggggacccaacatgcgtgattattatgccaccaaattgccagatgacatctgtccccacaaagaggatccaacacctgatttggcatcaatagacttgataaagcgcattttgaaaaaatacggtggcagtttgagctctatgaacaaagtgtcagcccacatgtcaccaaacatgacaccgcatatagtgagacaaaatgggaagttctcagtcaacttgatggaaatgcaagaagcaaaagccattcacacttgtgccaattgcaacacattaaatttggtgtggctggaggacgtaacaactggagtgaaaggtcaacactgcgggatctgcttctgtgagctagacctaaagagaacgatcccagaccacattgtttgtggatttgtggaaatcgaggacacaacacaaataggggttggcgcaatagagttagagatgctcaaaactactaacaatacagacgggtcgatagacctaactgccagcaccagaaatactttagtcaaccaagacctacgcaacgctcgagcagcgttgtcaaggcgactttacaagattgttactgttaacaacgggttaacatcagatcaattattctatttgtgtcaaaacaatatatcattcactctggtgcaatcgaggtcaaccccgaacccacacgccatgttggcttcagaaaggaagctagcatggtacaattttgtggagcgggcggcgactaatcaactggtgatcgatgtgggtgccagatacaaccgagacaactaccactgtaccacatggcacggcattggaccatgcttagattggagagacatcgaaagatatgggtccaaacctctcgagcctaatacatgtagtcataccctcaaaacgtgcaactgctcgtttccaaacaacccattgatagtgagtattgacagcttatacgacgttgcagcacaagaagtggtgggattcatgaaaaggacgggggcaaaatatttattgttctgtctgtcaacagcagctattgatttcacgagtgcacaaggtgcgttgttgtataatcagggtgaatggtgcagaaatgggaatagcctcgtaacatcacttataggtgatgacaagccatacgtgaacaattggtatctgtcaaaaatgtggaccactgcagacgagatacatgttggtgatgacgttgtgaacattaaaacgtacagcattataggcaatcacatactacgaattgtgactctgaatgagttgtctaatgtgctcaaaaagcaaaaactgtccacacagcaatctgagcaaatggttactatggaaataccattaatcaaaatagacagttggttaagttcaattcatttaccaatcttggtcagggaattggtcacaatagacgttggattgtaccagacattatatgcaagaaatttaactggtaaattgtcatttgagaagatggttgaatttggattggcatatgcccattcgaaatacacaaccgccaccacaacatttcatcaaaaacatttgactgccaacgatgtaagattgcatgcaatgttagccaccattgcaaccagaagaaaatatgcttgggtacaacaagcaatttccatgaatgaaccaaccaccttgttaggagtggatcttcaggccggaacagtatatgggacattagaatattgcaaatcaataatcactgaatggatcggggaattcctgaaatcaagcaattgtacacactccaaatgggtggccaggttggacaaagtcatatcagaatggttggataatggcttttggacagaattggaacaattgggaaaaacatcccacaaaatcaatttcattgaataccgggacccagtacaacctacggcagcttccacacaagcagcatatttgtgtaatcaccataatgtttcatgtgaccacatggttccattgcgagacgcatgtgtgtgctgtgggatagtcgaggtggtgggagacactgaacattgtgcgtgttgttcaccaaatggatgcaagcatgactgtcaacatatgtgtcaaggcggactgtatcacggaccaaaacaagataggaaggtaaattgtgagtgctgtggagtactcagcaatgccaatagatgtggaaactgtataatgacaataagtcaaaacaagaaccaacaacaacctccaattttgcaacgtgatcttgctgaaaagcaagacgatccaactagaatagcaaaaagcaaagttccaaaaccaaaaccagtgtttgaaaaaccaaacgtgataagcaacacagcagttatgccaatcaaaccaaagaaatccaaagcagtacaagcagtcccagaactaatggcaagcgctacagcgagcaagacaatattggaaaaatggaaaatgggctcaattgaagacaatgctgaagaaaatattccgctatcagccgacaaattgcaacctagccaacaactgcatcaaaacccggacaggcagtacaggatcaaagccgtggaacaagtgacaacagccacgcgatcaggcgaagacagtggtagtgaaaccggggaacaacaaagtaacgaagaagctataacattaataactgatgatggggaaatagtggttgtggatccaacagcaggcccatcagaagaacacgccaatgcaatatggcaacaacaagagttggaccgacgtcgtcaattcacactgcaagaatcagagttaacagtggaagacgcggcaacactggaagtgtctaaacttacaagcgtggcttacgcatcggtgctacgacatggctggcaggtgtccattgactctggggcactgagacgaccagatgcgaatccggcaaacacaccagggattagcgagtactttttcgctcctatgggaatatccacaatagaaagcaatctgttagcggttaccaacgtgtgcaaggtgccgggtgacggattgtgtggttggcacgcaattcacaaagcattgggttcagatgcaaacctaattgacttacaacaactgagtggaagggcggattggtttaacaatgaagaaattgccaactacttgcggagattggggaaaaacagcattatgctaatgcccggaacgtcagaagtaaacaaagttgacccgaacagtaaccagtatgtagtgatacgtcatgcagaagtggtggtgaaagaccacatgcactgggaaccagttaatgtggcacagctaggggttggttcacacttcccagtatttcaagggtgtggtactggtagtcagttgaacaaactagaaaataagtacaacataccgtttgactgggaaaagtccggggtactacaacgaatgaatatggcaaaggaattgataaagttgaatttgggcgtgagaccgctaaatgagcagcaaaaatgtgaaattcaaattgtggaaaaagatggcagaaaatggttgacaaacaaccgtaggttcaaacactaccctaaaagtggattggtttgtttcgaactggacagggcattaatggacccgatcgaaaaaatggtaagcatggaaaccatgactgcaagacaaatgttgtcaacagaaatttataacatgccaaaatttgcagatgcggatgtgcaagaagttcgactggcggaagttgtagacacttgtgcaacaatacaaaaaataaagcatgaggcctctaatttgtccacattgcaaagcgaatcttgggagcgatttatggtgacggcaacgctaatgtcagacaaacggatgagaattgacattacaaaccacaaactcaagagcggggatttggtaggtgtaagaagtccggcagggatgaaagaaagttatgttactgtcatcaacaaaaatgtgtttctcgacacaccacccacaggtcagatgaaaaagactgtgttggaattatttgtgcccaaaacatcgtatcacagcaaattgctaagattgatggcactacaaagaccattaccaaagaaacatataatcgagcaacgattgttgagcgcaactgccgtaactggaccaggaggtagtggcaaaaccgctaaattaattgacgaactagatgaaaatacaatcgtagtagccagaacaagaatagcagtgaacaccattcagacgagagctccagcttatcgaaatcgaatattcacatacgaaaaattgctgtgcgatccagtgcatgcagagacactgtgtatagatgaggccacaatgttcaattggtttgacgtggctttaatgttaacatccgacataaagaaaattttcttgtatggggatccccatcaagtggggcttattgacagctctgtgttaggtggcgacagatacctggaaccagtaacagaattagcgaaaaacaaaatacaactgacaacaacgtacagattcgggaaaactttagccgacatcttggctagcgctggggttccaatagtatctgcaaaagaaaccgacacaacagtggaactgatcaaatgggaacaattcaatgacgcagaattcaaaaaattagtgaataaggaaaaaccagacataatattaacattttaccggagaaataaaagagaattagaaaaattgaccaacacaagagttgagacggtgcatgcttatcagtcttgtgaggcagaccgagtactggtaatgcagatgccaacattcaattcaagatcacaaatgtgggtgaaccggtcttattgcatatcggccgccactaggccaagggagcgtttgatatggtgcacggttaaaatgcaacaacgcacaacactagccaatattttgagcggaactgcagtgcaaaatttggtaggtggtgcatcagacgaaacactagaagagttcataatgcgcactggtggtcaggtgggaaatgaagacataagcgaggtagaagaagaaccttacctgccaacaatagcgcaccaaccagttgagatgactgaaagaaagtggaaattaatcagatcgccgactgtagaagagattgtggaaattgcaaacagcacgttattagagtcatacaattggaagggttacgggcttcaagaattgcattcggccagccagtcagtgagtcctgagaacatgaaatgggtattatgcgaagactgtgtggtgtgcgaacaccctttaggaaaagtggtgtttagattgattgaagatgataccaaaatcactatgacctgcagcaacagattcctgagttgggcagcgaaaaggcaggctaatcaattgtatattgaagcaacgacaaaattcctagagaacgctttggagaatgatgataattgtaacaaatggttaacttcaataaatgcctcaatgcggcaaatagcaacaaaattgctatgcaattacataactcaagttgactctagcgaagaagaagctgagagcagtaaaacatcctcttgttcgcactcaactgccggctcaccagactgtagtcatacactgccgtcaactggcaaactgtcaacaattgcggaatctcccagctcgcgggaggcctcaagtgatggcgacacagactcgtccaccacggttagagacacacaatcaagcgcattggagtcaactgaacttgatgcattgcagtattcagatagtcaggaaccagatttcttaacagccagcgaaggggctgcatcagatgacaattacaacacggtttcagacactgatggtgaatcaactttggatgaaagtgccaggtcaagtggtagtcaagaagacacatttgaatcaatggagcacgatattacaaccgttccgcgacgtgatagagaaacaacaaacattgcacaatctgacagtgaaattagcattgaaaatgatgaccgatggttcaataccagaacgggtgatgaagagcaattggaacaacaataccaggagaacatgcgagttgacttggttagtatggaagttactaccaggaaaacttccaacagaattgatacatactatccgataatgacagggttacttagtcaatatgttgacatggtaatgtgtgactcaatgaccaccactacatggcacactgatggtatgactcaagtgttggaaagttgtgacattcgtggaaaaatgttagaaataacattgacagacgaaaacatgacagtagtcataacctatgatggcagtgggggcaaactgacagagctaataattagtttaatagacaagtggaaccatgcggtgctagtggcgtttagaaataacgatgtgtggcaacacatgactaaatcacaaaaagaaattttgaaaaatagacatggaatggtcaacccggtcgtgcgagacttgggcaacaggaaatatacattgaaccaactgttgttggagatattggaaaaacacatagatgatgaaggaccaatcactatggatgacatagtcaatagaggagaaatgaaaaacaaactgggcaaatcagaaacaaatccgctgtatagcgcaattaactctcaccattgcaatgaagccgaagcttggtggaacacgcaagacgtggaaatggatttagtcaaagtgtcacaacagacaatgaacaaaagcaataacacttttattcgtttgttggcggaacaggtgcaaatgctggagacttgcaacttgcactgcaaactgtcattgtggaaccaatcagcaacaattaaaacgtttggaggatgttcactatgttgtggattgagtgtcgagaatgagtatggggtagtgttgaaaatttctccacaacgtaattggaaccgcagaagaaaatttttactcaacaccaacaacgatatgactagtgtgaacttttggagtcatgtaataggaattgaaagtgtgtggaatgacaatgtagattattcagatttgccactgaacagggatctactgttggtggagccactgaggttggcagaatatgaactgggcatgatattcgaacgcattggggccacaccaaaaaatctgtacaattacgtgatggccagtcatgaggaccacaaattatgtacgtattataaagaaatcaatgaacaatatcaaacgaaggtaaatgcagcacttggaacaaattacgtaccagcagctaccaacagaatgggatcccacaccagtgctgacggaagcttgctacaatttattaacaaatccacaggcagaacattgttggcccaattagtggataacaagctgcaagtgctcaaaacatcattggtcaaaataaatgcgctcaaaattaaccaaatgttgataaatgtcgcgaacagtcgaatgaaaagaatgccctggagactggctagaatgacggtgaaattgcttaagttacacaacaccaaatttggggcattagaagggcacgacatagaatcactcaacttgcccatgtcatatcacaaggctgaaaggacaggggtttatgtccattatagagaaaagctagaagcgacgatgttggcaaatatgaaaaagacgtttcacatagtgttcgtacatagtaagcagtttgacaagtacaaagatttgcttaaacatgaatgccaaaatttgccaatagaaaagcaaaacttttcattggtggaacacgggtttgatcaattagtggaacagatacactacaaatatatttataatgggttaagcaaaaatagcaaagcaatagcgatctcagatttcccttacctatcaatgttaacctctgcttgggctactcatgtaagggcgttgtcacagattaaaaatgcccgatatgtaaggaacctgctggacaccgaaccactactacggaaaataatacaaatatttggagacaaaaagcaagtgaaagaaaatgatggtgcaacagaagattactttaacgaggtacatgcagcagctgtgtaccaagagaagtacaaaaatggtccatggtttgctcgcaattgttctggcccacaacaaaaagtggctgatttgttgtggatcggactgactggactaaaaatgtcaccggaacaactccacacaacaatgtgcaatggtcagtacaaacgggtgtcaatgctggtgccagtaaaactgaacgacaaaaacgattattttaaagtagttggtgaagacgacgcgacatacacagtagcttatgacgaatcagaagaattaacaattataaataaacaattatacaattcagtgatgagcggacaacccatcaaagtgggaccacattggttggtattccacagcacgaacaacgtgttgggtcacagcacagtcaatgtggtgttgtgtggtagtgctgcaatgctgccaaactatacaagaccgttgagtcagtccaacaatgtgaaaggggtgcagtttcggatcccagtaattcatgatttgagagctgcaattaaaaacatggaagtaatgaccacaaaagtggtcacaatagaccacaaactgtatcgttctctgtcactaagaatgttaagaactgagaccaccttggatgacttgctagcttatgcaagagtgaattgtcatataatcacgtacaccaacaaggctactgggcaaagttatattcgaaatccagacggagtaatggaggcatgtgcatgcgtgtattatgaaaataaaagggccaacgactcaattgcaaaactgaccgaaatattgactcaatcatacaccagaaagttgtcatttagcagcgtgaaagacgtgatcaaagcagtgggtttaaatgtgttagcggacgtgacatcattctttggatcgaaaattacgattgatgaaattctgaacacaatcgaaaatttagtggatggttcagcaagcagatttatacggcatttgaacaaattctgtttcgttaagctaaccaagaggattgagtaccccaaaattgtttacagaataggggacacagtgaactccaccccgagcgtggtaaacgcgatggacccagttctagcgtccaacatgctcaaagccgctgtgggaggggtgtacaactggtatcaatccataggttgcaacactaatccagctgaaaactacacgaggcgacgggaatcatgcatttccgcaatgtgtagaaagttggagcaatacacaggcagcagcaaaaaggaagcaatagacaaagtcgcaaaaagcatgttgcaaaaatatgatttgcaaacagttgtggattgcgtgaggaaattgtttaacaatttgcaagatccaattgaattgcaagcactaccgaacactttggaacagttgagcgaattaacaaactgtgatttaactccaaaggcaaatattaagggaagaatgagacacaccaattacacgcctgaaatgttgagccgagagacaaacatatgcagctggatgtatgaagagcaagttggctttatgcaaggcaaaactgtcttattcagcaccataggttcaatgggagacgtggagccatttctgggtgtcgcaaactggtggaaaaaattcggaataaaatgcatttttgcaattccagtagcactgtgtgatcatgtggaggcacagggacatcaagtgctaaaactaaatgtaagcgtaactgacctaatgtcagcatgcataaagatggaagaatctaaatataaccttattcagcttgcaaaacatttaaatgatttgatggtaacaacaagcagagtgttcgacatagaattgaatgattggaccccgatcctacaacaagtggatttaattattgaaacaccgttcactcatgtagcagcccaactggctcagaaattcagaataccattgataatttcagctgcatatccatgggaatactccagaatgacaagtctcaagatgcagccatgcacattatttgatatgttgagtggagccatatcatatacaccgtttcaacataagttgagccattggagaaggactgcattagagttaaccaatatgcgaggtcaaatggtcttgttggctggtaacccaatgcttcagttacacgaacaacccaccacagtgtggaaattggggaactgcacctcagtggtaggatattcattgcagataacaaaggatatgcaagaaatgactgcagagcacttaaagttattcgctcataacagggtagtagccgtgtgttttggatcgatgtcaaatgaggggtttgaagaatggggacaggaaatatatgagaaattgatgacactgttcgacgtgatagtgattgtaggaaaacgatggaaacttaagttgagtaactctgagttcccggtgatagcttacgattatattaactatcattatttactgccaatggtggacctggtggtgacccacggtggtagtggcacaacgcacaatgcaattaggcatggttgtgtcgtggccattaaacccttctttggtgatcaatttgcatggttgcaagcaacaaaacagttgggcgtcggaatggacacaaatgacatgttagaattagatacaaccaaactagacaagtacaaacagaaagtgaatgaatatgtgagcaaaattgaagaatacgatgtaaatgccaacataacagcatcgttttcttactacttagaggtgggtcgaaagcatatagagggaattgtaaatgatgaagcaataccagtgaatgaaatgatggatttcaattgtgacaggttgtgtagactagtgaccaaccagcgaccaacaaaatggagtgactatgatgatttggaagcagcaacggagttggccataaacgacgtaatggagtatgcaaagcacagcaaagttacgaccaaggctactggcaaacagaagagcaggaaagaggtgaatttagccctgccggaagtatttgcatctgaaacaataactaagtcacaacaaaagaaacgaccggtcacaaaacaaacaattgtgaccaacgtagatgaaacacgtttgaaaccaaccgaagaggaaatagaaatggagaaggcagttcaattagtgaggcagccaaaaagtaacctggtgcaagagttaatcaaaaaatttagccaaccagccgttagcacagccccgagtaaaaggtcaggctatcaaaaaagtaacaggaaaagcgttaagatacaaagagtgaagcataaaacaatggaatttattaagaaaatggcggctgcagaactgggaccactggaagaaacgtttcctgcaacatcggaaagcagtgggcaacaatcattagaaccagaaaaagtgagtaacatcatcgaagcacaattggatgaaagtgcaactgactcggaaaaacaccgcacagcagcagcccataagctcagctcagagcgcacaaccatagaagacgacttggaaaaattattgaggccaacagacccaattggttatttgcaaaacacagggtcggacacagatccagaaagtgaggaaataatcaacacttacatcgaaaaaggaaaacaaccagaattaacagaaaccgcaatattatctctatggaaaagcaacaaaacaccaatgcctaaggaggtaactcataacagctcaaacagattcggtctactggacagcatgactgaagaagagacagagtcacagtcaattgaacagaaatgtgaaagcccagagcaaacaaacaaggaactgatggagtcaattccagaactgcaatctccaaacaaattttccataagtccggtgacttcaatatgctactcaaagatagcggagatggaaagttctgatactgacatgtcagatgagtccaacgacaaaccgctacgcaaccacttaaaccacaaatggcggttaaaattcattcgcaatcaggtaacatgtattccagaaattaattgtgggtcaacgtggaacatcaaatatgatgattgggagctggagtataacccagaaacaaccgacacatgtgtgtatgaatgtgccaagtttatctgccgaacgtatggtcacaccaaagtggacaatgacactgtatattactggtgtcaaagattaggaattcgcaacaagccaagtatgaatgaagcgcaaaatttgttccaattgattggactgcccactttctttataactgacagcaaaaaattgttactaaactcttgtggccaagttccgtacattggagtacaactaataattgaaggtgggataggacactgcaggatagttaagctgcacggggtgcaattactagataaagtgatgactgaaaggcagccgacaatgagcaaagcgttgcgggacgaactagaggcaaccttagctccagcggcactaacaattagcaaagtgcggaggcgactgttatgcaaaccagaaaattttgcgaattggtccggcacaggcactccttatatgttgcaagaattgcaggcgaaacttagtatgcgcaacttaagattcactctaacaagaaaattcaagccggtacactttgtgaagtggaaaatagttggaaacgtgtacttggctgatggaacaaccgagaagttaaaacatggagcactagtgttgttcaggcgaggtaatgagtacctggcaggtctgatagttctaacatgctacggcatggtgatgatacccatgaattcggcattttcagacgaagaagtttgtgaaacagtggaaacggaaattaaagtgatgaacgaaagaattattaggaaaaaaataattaaaccacctggtggattagaaacggctacatgtctaaacgagataactagatcagccctgttgtcaaccaacccagaaattgtagacgctacaattaacgacgagagcgcctcgcatttatttatatatgaatatgatggaagggcacaccacaagtatgatgaattggacattattaaaagatttcacccaattagcattcaaggggtgggatatgacataaaagcagaatggctagaaaaattgctagctccacatggcgcggttcgctacacattgcagcgacaaagactgaacattgtggtggagttccagactttgcaccaggccgcagtatttgcgtcagttgcttcaaaaagttggccaagtaccatacaactggcgaagcaagtagtagtgtcatgggacgaggctcaatccacaggagaaaggtggatagaaagacatgcgttcttgaacaaatgcgagcgtggtgtttccaaagagcacatttcatggctgaccggggcttggatgacgttagatcaacaacaattggacaccttaatggtgacaaaagaagaagtggaaaatgtgtgtggtgctaaattgcccgatttgttgttcagaccaagtgaaaacaagcgcattactggactggattatgccttcttacccccagacagtctgtacagattgccccaactaagagtgctatttgctaaaaagagcattattttggagtgcaagttaacaaaacaaggaggaagcgaagaattggaaaatagagtgacaagcaaactacctgacgaattcaatgtgaacaagcacacaaggtggtgggacattcacgtggtgaaaccagaaactcaattcaatatggaattgtggtcaaacagaataaacacagaagcaattatgggagctctggacacaggcacaggacctgaccagttggatgttatgactccagaagccggaattcaagaccatgtgttcattcacaacaaccccactgaatggccagaacacaaaaatgacggaatggtggcgatggatgatttagactatcaagacatggccatgtggcatgacacagactttacagattggaatgaaaaatttggccctaaaaaccaggtggatgtgacaagccgaaggatgccaacggagattaaaaccagtcagaaagccacgatggtggaatacccgaaattttcaagaccggtgctcaccaaagcagccaatcaggaattcaatgctgtaacaggcaggttgtgcagaagagaaaattatagaaaatatgggtacaaattacaggaggaagtgtggttattcatgaatgcttattttgaccccaccaaacatgacttgttggattattaccagtgtcatcaattaagtctcaatgatgggaaagtgttggattggttaagagacagaccagatgctaacaaaatagctgctgaattggaattaattcttagtgaagggtttgaggtgcacccaataaacaacataaacgtgcatttaaaactggaatcactattaaaagaggaaccagccagtgatttaagacaagtgaaagcaagagctttgatgtggcaatgcaaagggtactgtgcaatgttctcgcatatattcaaagaattgaaaactagattaaaaagtttgctgaagccccacataatttacagtgacgggttgaggggagacgagctttcatcaatggtgagagaagtggttgattttacacattttttcgaaaatgatttagcacaacaagacagacaaactgaccacgacacaattaattttgaaatgcaaatttacaaactgttgggggccaatgttagtgtaataaatttatggcacaactgtcattaccactggaagtacaaagctgcttcagtcatgggtgtgagagacgcaatgaggttgactgggcaagcaacaactgccttgggaaattgcttaactaacatgttggtgcacagaaagctagtacaaacaattggggaccaactaagattgttcttagtattgggagatgacggattgatgttaaccaatgggcacatcaacacggagtccttgaacagagaactcaaaagcaatcacaacatgatgtgcaaaccaaaatgtaatatgcaatatgggacattttgctgtatgctggtggctaagaatcacttgggttctgcaacgctggggccagactttgtgaggttgaggcgcagatttgaagtaacaaacggagtcagtgaagctaatgatgaaaacttgcgggcaagaagcatgagttatttgatgttcttaggtaacattccagaagccatggaattagtggagttggaacaaatgccaattgtgcctcaaaagtggtatgattatgacacaatggtggaggcaatgggcataaaatacggaattaacattgatgacgttgagaataacaaaaaccagctgttgaaaatgattagagagaagaaaatctttatcaaaacaatagaccattggtttgaaggattataaagagagtgtggagcggagggcccccccccccc

SEQ ID NO: 882 - DNA, 15706 bp, Fagopyrum esculentum endornavirus 2
  source 1..15706: mol_type = other DNA
aacttaccaatcttaagacataaacacccaacttctcgatctcttacactttctgaggtgaacccctttcacgccgcctggtgccggcccgcaccggacggcgtgaaaacaaaccaaaagagggcagtcctgcgcaagacgacactgcggcacgccatgcgtaccgcacggtcgtttcgcacaaagcaaggagtgctcttttttaatgccactagcagggccaaaaggatggtaaccccgcttgataatgatgcacacaatatcatagcggaaatactaaccaaaagcgaactggaagaagggagaaactccgaggaaggaatttctcccgatcgtatgaccgggacagccaacatgatggatcttcagttccttctaaggcagctccggacagacaaagatgcagcggagaaatactatgctgttagatcggatttcaaggtggatatgggctaccatatcggccaggaccatttagactatgcctgggagatcatgaacgaggtggtcacctgcaccacactgattttagacctttatggtctgtacagatttatttacaatgcgatcaaagacatgatatccgagatagggtcatggtccaaatgcttcctgatggaacaggaagcaagggccaggctgggtgtcggtaaaaggcctatcgtgggcttcattacgcaggaagcagtcacccatcacatggtacaaaggaaaagacacggacggaagtgggatcaacggtacgggtaccttgcgtgcccacattgctcgagcttgaatgtgttggatgccgagcgactcggtgtcacacacctcccactgaatcctgacggcactgccaatttcccgtcagccctctgcggatattgccataaggatctcaccgaagccgaatcaccacactttgattgtcacttatcaccagtacccaggtatgtgagcggaacggtggggtccaagatagaacagagtctcctgttgaacaggttggggctcagtccgcccgaagccgcagacgccatcctagacgtggctgaatcacatgatggtagaattgtcacgagccagatgagcagacttaacctcggatcttgcgaaataccaccaaatttgacatcagagttccgggtgtccctcaattcagagttccctgacatagagttcgtggtccgaactagcatgtggtccgccagcccagagaccaccgccgcaataaacgcaagcatgacacaaatcactaaaaacgtgataggccacgaggtctactggccaaccatcgaccagcagccagtgacgaaccgtgttcgctgccaccatccagcgaaggactgtggcagcaccgattgcgaccactggtgtggtcgcagcccagtgatcaccatggaaactttagccctaggagccgaagcagtcacaaccataatatccaggactgaaatggctagctatgttatactgccagaggctggatattccccaaaaactgaaacagggaaatatagtggcacaaatgaccactacatgaacagaggcggcatggtgcactatctgaaagccgggatgaattcgccttatagcatacacggcagcacttttaagtcactgctgtattcagatgttataaacatccacaaaaaacagtacaggatacggacagtactgcaagtggcacacatggtggtgagagaggtaatgcaaatggataggaccgctgaactgataaccccccataaacccaccagcgagttgaaggtccgtgagttcacaatcccggagctgaataggggggcattactagaactcactggagcagaaatagtgaccagaaagaaagtaagagtagaggctagcctattgcatgccctgatggtcaggaacataactggaacactcagcggaaccgagctgttggattatgcaatggcatttgcgtttacaaggtacaatatagacaaaagggtgatcagttaccaacacctgacaagagaacaagtgcaggatcacgcatgcatagcactcatgctcactcgccgagcaaggtggaaagtcgaaggatctgtgaacatgctaagactaaccggagcggacgctttaaagaacaagctctttacgtctttgggccacatgttgatattcagtgcacaggaagtgataacgtccacaaaagctgggaatctgatcgaccgcgccgcacaaattgccaataaactagcactaggcagcatagacatggtaggagaagacccagtctgggacgaattggataaatggtgcgcgaaggtagagatgggcaaagtgagcatcgccgatgtgggaccagagcacggatcaaaaccagcggagccaggggcagaggaaccggggagttgccctcacacttgggcgacagagcccatcgggagcgagaattgcgagtgctgtggcagacggtgcacgggccagcactgcaaagactgcatggtggtagaaaacgacagccactactgcatgcacgaatgcaaccaaaaccacacaggagacacaatatgcctatgctgcagattgccctcacagacgcgattgtgcaggtgttgcacgatagagtgtgaggcaataccaatgttcgagccaccccccaaggagacggatggggacgagatgagagagggagtaagtggccctgccagacgagtggcgaaatcttggccatacgtcaagaaggacaaggacacacagtcgaacgccgacaggaccgtatcgcatggtaagaccaaacaattgaagaaaggtagtgctaagaagtttgatgatcccgaagtcgtaataacggtggacaacaagagggacttcccagaactggtcgcgaagccagaccagacagaccaaaccatactgaaagccggtgaggtagaaacacccattcaattgccagcaccagatcaagggcaaccaccaacaacaaaacccagttactcagacaaattgcagggagcacgcccaatgaaaacacacaacgatgatgaagaggaagaagaggaagtgacggaaacgagcctaaagaatagagcaataatagagatatcagaggaattcctgcaagcgataacccatctggactcctggccgggaggaacgggcgtgctagcgatgagtggcgaaaaaccattcacctctcactgcccgtacctcctccgtgggaccaccacaacaggcccaggttacttcaatccaaattccaccggagtgatattgaattcgatcggcacttgtgggctagacgccctaaaagtcgtttgggacatgaacttgcccgtggcagagatggaagccatgacgggttccacgataggatgggcagccgatgagctgatcaccgtggcgaagaagaggaggaaaaaccttttgataataactgccaacgaaacacggatacataaagctgagtctgggtgggatatgccgaccataatacattccagtgccatcaaggacgatacaacgaaccactggtacccagggagcgcacaaatgatcaaactgcccactgaaatgataggctgtaatgatgtggcagagacggcagtctacgatagcctaacaagacaggtaactggtggccagcagcagacctactgtccgagtctgatgaccatatcagaacgcatactagtaaacctgggcgcaaaaaccgtaggagacgaacttatagagggaaatgagaacatgatgaactttaaaatggttgaaatagacggaaaagagtggctgaccaataaccaagaacgcgagcacaatgttatgatgggaaaaatacatgtggaggtgaaggcaatgtacaagcagattgtctcctgcatgtgcgtagggtcaagtggtgtgctggcaaacgactgcttgaggccgcgttatgacagagacccaggccttccacatgacatgacgaattacttggtggccgagctggcagatacggtacgcaccatattggaggtaaaatggtttcaccacaccagcaacccaaatagcaaaatcaaactgacgcaggaaatgtgcagttgtgaaccaacaccaaccggcgcactggttaccttcaacaatccgggaatgaaaacttttgacatgataagtatcaggacaaagtccacacaagcaatggtgccagtgaaagtgatccaaggtaaagctgccgtacctgtgagtctgaccgagaagaaaagaaacatgcaaatcggccatctcaggttgagcatcgggagcatggtcaggaaactagtagccatcctcgggactgggccgaacatgagcttgactagaaaactactgaccgaggcaaaattgaccctaggcccgccagggtcaggaaaatccacggaattggcaaagaccgtcggaaaccacgatctcgttgtggccggaactaccggggcaataaactcgataaaacaaaaaggtgtgagaaactatcaactcatgtccctggagagagcgaaatacgaaggctccacatatcaagtggactgtcttttcatcgatgaatgcaccactgttggggtcgtagacgcacacattctactgaacaaaataaagccccaaagagttcatggattcggggacgtagcccaaataggttacaaggacatgatgatcacggggggggaaaggtatgaagagggtatgcataggttcatgggcaacacgacagaactgaacacaacctaccgaatcggacagccccttgctgaagagttggcaaaggtgatgccgggactgacaagtttggcaaaccaccccacggaactggtactaaaacaccagaacgtgtacagccgagacatggtcatccaagcagggtgctccgagaacgtggatacaatattggtgttctataagaaacaccttaacgacttggcgaaaacgctgaagaccataagtggaggcagcacagacatggccctttgggctaggagggtcaggacctccaccgtccatgcttaccagggtcaagaggcagacagggttatggtcatacaacaacgattgaccgcacaacctgggatcgaaaccgaagaagagtactgcctgtcagcggcaaccagggccaaagagaagctggtgtggttgtctgtgggggcattcaacccaagcaccccactagccgagaggatcagagtgggaccaaagcaggcaggctacggcctattggcatcactggaaagcaggatcagagccaaggtcacaatcccggttgaggaaccagaagaagaggacatgataatcgtaatgcaaacactagcagacacgagcatcaagttgctcaggaacaacataaagagggattatggaatgtctttcaacgctataataaaggatggcaagacaacggtcaccatacaaaagtggaagctcactgtcatagtgcttgagatcacggctgatggagcaatcaagataataaaggattccattgataaggcaggagagctgacaaaaatgatccggctgatgctggaaccactcgagatgacacagtcgcgttgcacgacatgcaaccaactggacctacacacatcaaaatgcccgcagacaccatacgggccggcaatagtagaaaatatagtcagaatgggaaaactgtttggagacctgggacaacagctaaaactaacaatctcaggagttgagtacacgtttgagtcaactggttcttgtgaccagtgcaggcgggtggtgatgcacgccggaaaagacttgatcggggaattcgtgggccaaagcttaaccatggtagcaccaaagttcaggttgcagggcgatgaccaagggctggggctgacatggaagagagtgataaatcgggggccaagcaccgaaattgagcatgatctcctggaaagcttagtaaccatgggggtcacgggaaacacaaactatgtggcaacgatcctggaaaaaacccacggcctgatgcaggcagggaaaataatggtgaagaaggctttcgaagacttctttgagacccccaccggcacaactgcaaacccagtcagaaactggtgtttggcaaatgggttaaactacaagagtcatgtgacgacaagaggtcagcacatagccttggcgacacaagcaggagtaactgttgtgtgccacactcaaactaacactatagttgctgtcggtgacaacatgatgggctcagacgccaatatgttcgatctcgtgagaagagtgctaaaacactcagcattgaacgtggcccacaacttcattgccagacttctagaaacaaagaaaattgcaggaagaggaggagaactagaattcacaggcatgcttgtaggtacggacatccaccaaaaacgtggcacgaaagtgtggcgaaatctgttgcagaaacacgttaaaaacactgtagccaacctcaggggtgaggaagataaagtatacttaactcgcgaggaggtatctagaatgggcccacttatccaaaaattcatgggtgacattcccgtcggtatccatagccacatgatacccattgatgacggagggaacgcagcggaacaattggtgagctatgtaatttacaggaatccttccacaacaccagatttcacagtaacaaatagacctcactgcgtgtcgttcaactctcatgtgaacacacaaattgtgaggcccacatggagttcgaacacagatatggactggacagcgaatctcaacattcacaagcagtgctgccagcttttgtcggagtgcataaatacgataagagaagaggaaaccgactgctctaacgacaacaagctacccgaaccagagatcacgacgaaaaagagcgaattggcatcccggtgcctgcaaaataagccaggtaagtggactccatttgaaggtaaaatgagtggcacggtgttgctgaatcactattggatgaccgcctcagatagagatttgatcgacttgatcaaatcacatgaaggggtcaggttcatatgcacttgccctatgatgagtttagaaaaatatgatgaagttgaaacagctaagggggaaatgatggtgatcctggacaagaggaccggagccgggtactactgtacaaaaaagaatgttgaacgactgagaaacgggtggaaattggaagacggcgagggaaatggctgggtgttcaaaaccctatacacagtgctcacctgcgaggtgatggagatcacgaagttgtcccgaccgggaccaaatctgggttatttcagtccagtgaggatggaagacgggttaggattgacgcacgtagaggttccacgaatcacaacggacccactcacactgatccggaccggacagcatctggagacgatccatctcctcgtagataccaggttgctccagagcatgatgaaaagaacactcagacaagccaccttcgatgaggttctacaattcgcgagagtgcatgcaaatgggatgctattctcaatgaagggtttcaaagcacaatccacggacacaccacacgacatacagtggttagctggagcggtatatgtagcaggaactcagcagctagaaaagttcgagagagtcctggaaatattggaggtgaaagaggctcagtacggactggatgccatagagcgactgaaatccagagtgagaatggtggggggaggcatcaaggccgaattgacagcgctagtcggtggcgatgcatccatcgaggatatagccacataccttctagacaacaacataaagtccatgcagccgctcagagaactggtgagatgctggaaggcgatgaacgtgaatttcggcaacagtctcaggcgaatgtacccaaggcctgacaatcggaagaggccgatcgagctgacgccgggtaagatcaattcaactctggcaagccggctgagagagctagtttgccaaaacgtgaaggtgttcgtccagagcgcactcagacaggtgactggaagatcaaacaggattagagagagaaattacaagcgacggggtacagaaaggttaaccgacgacccgaacgtgagatcgggtgaagtctacgaccccaccctgctataccgagacttcaaatcgataatatcggataaggtgtgtgcactcagggaatacctcctggagatcgagaactcctgggatcgcagaatcctccaagcaactgacaatgaaagaattaccgtggcagagatcctgcagtgcattcaggtagacatggtcgagatggggaccagcataggagagcaaaaccaatggtgcaagataatagaccaacataagttggtgcagggtcacttcacaaatgaagacgtttggaaatcacaggtagttaaagacggactgtccaaactactggcacacgctagactcaggagaagcggaaaagggtcaccaacgatccttgtccatgcagtgggaagcactggagactacaagttttccgcgagtatatgccacatcttgtcgaaatcaggagccatcgtggacgcgttcgtaccagcggacggggcctatcactacgagggaatgggcgtcaggaaaatccacaccacccactacgacacaagagcgaaaatggagtcttggaacaaactgcaagagctcaacatggaagaggcaatggcacaactagaacagggagctgaaccactcagaatagatcactttccgcaagaagtgctcgatgggccatacgacttggtgattggggccataacagcagtatacgcccagcatatagcagagaagctaggtgcagcatacgtagagtgcaatgcaatgccggagttcgtgcgggatgcccgagacacatggtggaaaagcacgggggttgggcaagcagtatccagtgcgctgaatgccaacatattcatcgcaaacaacccaggcatacacgagttcaggctgaaccaaaacctaccggaaatagacagtacagagtggggtctgtgcccaagacccaatgtgttctgttacgaaccgtgtatttcaacggggccggtaagcgggaattggccggttataggttatttgggcagagaactgatcgttaagcagacggagcaagaggaaatacaagtagactacctgttcacgatgggctccatggtgcatcgaaacatcgtgggtttcgccaaggaatttgtctcccaagtgggaaaaagagaatgcagggccctaattcttggcggatacttttcaacggagataaaacaggcattgggagagatcatggagaactttgtgcctgacgtggaactccagcacggactgggaaagttgatatacaaggactgctactcacacgataaggtcatgcacgaaggcaccattgtcatacaccatggtgggtctgggacaactaaccagtccttcgtgagcggatgcggacaaatagttatcagcgttgcgtttgatcaggattactggggaaagcgcgtcatggagaatcacatcggagtgcaaatcaaagtgcaggatgagccagcagctttgacagctgctatgaattggggtggctggggaaagacattccaggtgttgcggcagatgaagaggttcataacaagaaacgtagcgaccaacctgatcagggccataaagatggttgttgatgaaacgcaccctgatagcaaattggtacacgacggactactcaacacattaaccccggtgaaagacgaccagatttttaccaggccagcagaagcatacaagcccactgctctgacaagacagcaggttatgtacaccagcgttgaccacgagtgcacaaagcttgaaaattatgataaactcaagaaatgggctgccattgtgatgcagttcgagggtgtgagaccagtgccaatcagaaggctctggcattcatgctgcaacaatcatgacagtgacgattttgtattcgctgaaacggacactgtgtacatcacatactacaaagatcaacaaatgaaagaatgggttaattacaccaccaaagagcaccagataagtcagccagtgctaccattcaagactaaccgtggaccaccagggacggcaacactaccgttccatgcacacgggcaggttagggagcctggcctgccggaggagaaaagattggaggtcgtcaccttagcaggtcaccaacaaatcatagatgaggaccgctggagagaaatcgcttcgaaaaacgccaggggcccgtccaaggataggaggggtaagggtacaagccgtgaggtcatgtgccaggtgtgcaaccagcgcaggtgggaggggatggcagacacactggtctgtacgctctgcgtagcaaaggctgaatttcatcaagaagggatggctgagcttagtactgcgcaattgaccacctacaatgcaataatgctgggggaggagagaccactacttaactaccttatgggcatcggcatctcatgcgaccggcgagaagataataagcacctcgagcctgggaagtacacggtgaccccagggcgaataagggtactgtacgacccgcagaaggaaacaggctgcgtgagagactgcataaccgcttacgcttctgggtcatctgcatcccggaaagtatggagcagtgggaaaccagttcaggtaaaggggagcgcagaggcagcaatgagagacaccctaatgagacttaaactcccatacttagttgatagaggaaacctcactgattatatctccacaatcggcctaagccatacaatagtacaaggggagagggcgatagtgaacgtgataaaagattcctggggccacatagaactacaaatagtcgaagggccatcaagcctccatgcacagttggtgagtttggaaagctcaatttatgaaaacgcccaagcaagcccaatggtcacaatgccaactagaaaggtggtagatataaaccaggtggagtgcccgagatgcaagcaactggtgtgggactcttgttctaaacacgctccactatgggagacagactgccggaacaacctcactcacaagaatcctcaaaccctctgggagtcaatgaaggctgtgatgtcaagggaccagacaaacgtgacaagatcgtggggagagcactggaagggcatattcgagagattgaatctaaggaagttccatcacgtgctagatgagatgaccgagcccatcatgccatgtcaagtatggaggacagagaatgcatatgcgtgcacggaggcagtaagattgacgcacggtgcaatcgtgatggtaccaacatacggcgggccagtcgcagcagtcgtgatgcaagggatcgggtgctggcacttgatcagtagcaagaatccttggcagcccacaggcggattgcttctgatgaggagcaatgctttcccgaccgagcgtgagcaaaggccagtcacccattcaaaaaccttgtgcatatacaaccaactatccaaaacccacctggacgaggagagtgaaacatggcacccggtggccgtagaccacacggcaaagagggtcgtcctgtactctttggatgttagggatcatcactctgggtccgtaagagacgcaataaacaaggtgaaggacagactggtaaagccagacttcaccctctggtcagcagaagagatagagaagatatccaattacgataccttaggatacaccttgctcaaaggccagctaacacccagggtaaatctattcgtgacgtctgacatctcggcacatgcaaaggagactctagagtattggtgggacaggttcaacaaagaaggtcacccccggaaaatcgcaacggctcaaagggccggacacgtgataacggtgaaaatgggcaatgagcggggaatagtgccaggacacccgctacagaattggtacaaaaagttccagccactcaagagcgtgatggacaccttaaagatgtatcaatcagaagcgataaaagagttcaggggtcgcgaaggccaaacatatgacataatctccatgacagacaacgtggccatagtggccatgatggagtgcatcaattcggacacttctgagatactagggatctattctagcaggataggtctgcacgtgattatgatcaccaggtctgaggaggatcgtatcatgcttgtggagatattcaagaagatacgaatggtttcctacgccgaggaatgcctgaggaaattctgggagcagcaagataaaagattggaggaccaaccacgagatgaagatgatgcaagtgaggttaaccccgaggcaggagacagctcaaggtccaagaaatcagatgacatccagatcgtcgaactagaagacacggaagaagaggttaccaccagcagcggaattactccagatccaacagtgcaactatccgaaacagaggccggagatccactgccagccactacaaaacaaatcaaaatcacggaaatcactgatgatatagacattgaaaccgaaggcactccgtcacagtacgaaccagcgcaagtttccgcgatcagtaaggcaggagccgacaatagcacacccacaacaagcggcgcagacaccacaacagcaaccccagcgggtcaaacacccgagacagaagaggtgatcattgccctaggaacccagggccacgcgatgacccaagttgagctgggcgcaaccgctgagtcaaaggacactgtcgaggacacgcaaaccgcgagtgcttccacggaaatggaaactggaaaagacacctcagagtctgacgcggagttttttgatgcagtggaagacagtcccgtgccgcaaaccactccgcagcaagaccaagccaaagtcgtcgaagaaatggaggaactggaaaagaacaggcaacaaccaaagactaaaccgatggcgaccgtcgtcaccagagacacagtaccaataacaaacgtcacggctaaaacgttgaccacccagcctaggaccaggaaacccaagaggaccgcgacgacagaggccggtggcgcagataggttgttgttgtacaagaagtgccacaagacacacagatacgagaccgacggtcagacacatcagcccagaccagggaaaacagggccaatattgattaccggccctgagttgtcttggttagagatcgtggagctggggcacaaaaacaggaagaagaacttgcccatcgcaaccacatccaacctgatgtccatcctagaaccgacactgatccatgggccaatggagaagttcagaatagagggcgggaaaaaggtgttggaagtgatggacggcccggaagaggagctcttggcagcgaatcaaaacctattggacaggtacatcccaggaaacactgctagactaggcctcttgtacaggtggcttggttgcgatgacaagggcaaataccacaacaacatgacagctggagtatgcggaaccagagaggtgtgcaacccagaagaactgacggagtggttgttcaaggaagacacggcaaggggggagtacatatggaacatgttcgcattgggaccgcaagcacgagccaccattcaagcaaccagaccggtgttgcacgaactatccagaccatctaactttcctgacctggggaccgggagagtcattaaacatggtcaatttctagtggatggaacctacgtcctgaagatgcgggtggtaaacaccactggcggccaactgtttggacacgatattacagtacaggaaaaaccagatcagtacaggcactcatggagggaaccaggtgaacgcggaaaatacaagctaggagaaacaaaggaagtcgaaattgccggagacttgatgaaatcgggacgtactaccaaattatcaatacggaggttcgacaatgtaagagatgaaggagccgcgactgacccaccctgggaagagatggcgtctgtgattttaaagaaccaaaaagtggtgttgacttcggccagacagtacaaccgatacaaggcattgcaagagatggctgaagaaatggatcaccaggggccatggacggtcgaactggcacccagcaagctaatagacttacccaaattagatgaggtccatggcatggtcagttgcaccttagactgggtttactctgatgcacagactgaagagatcggagaagtggagtgccaaagctttctaccatacatagagccagtagaaacggacactggggcactagtgggggacaattcagcttacgaaaacgtatttagcacaatctttttcgaggataatgacctgctggacttcatcatgaaggtggcccccagtcaaggactaataaaggtgtcaaaaataccttcgaaaatagtgaagaccaccaaaaccaccatgacgaagcgtcctttggaggcaaggccggtgttcacaaagctttcaggagcggaattcaatgcagtctccaggaggctgtgtagtgtgatacagctcagaaaatttgaattgtacccagaatcagagttctcgagactgaaaagtgcatatttccgggatgactgtgacacactactgaggggcatgcaggcaaatccaataaattacaatagtgatgaaatcagaacatggttggcagcaagacctgacgggctgcaagttgctgccgagctggaagccataatggccgaagggtttgaggtgaaccccatcaacagggctaaggtgcacgtgaagctagagtcactactaaaagacgggtacgacagtgtaggcaacagggaggtggaggcgaggatcatcgtttggcaaaggaaaggattctgtgcaatattctcccccatattcctgcaagcaaagtccagattgaagtcactgttaaatgataaaaccttatacgctgacggtctgaccgcaggagaactatccgcaagagccaggctattgccaggtggactgtggatgatggaagatgacctgagtaagcaagacaggcagacggaccgcaacttgatagagtgtgagatggaatgctacaaacaactgggcgtggatgagcgagtactcaggttctgggaaaggacacatcaaaactggaaattcaagggatcaagcgtctcggggatactggatgcccagagattaactggacaagcaaccaccgccttaggaaacgccttagtaaacatgatggtgcacagtagattggtagaggagaacaagagacacgtgagattggtctgcatacttggagatgacaacttgatcctgtcagagcacaaaatcagctcttggagacaggtgaaagacagcaaagactactataacatggtcagtaaagcctctcacagtaaagaagtgggaacgttcttgcagcaagtttgttacacaaactctgtcgggactatggaattcgcaccagacatggttagattgagccggaggttcgaagtgactaatggggtgtccgaagccaacgatgccaacatgttagcaagaaccatgagttattgcagcttgatgggtaagacgaaagggacagaaagggtgatcaaaacattaggtctgccaatcagaccaacccacacatgtgacatagctgctgcacggcaggcagtggccacgaagaggaacatgacgatacatgaagtggagggagcagagcatcatctgtacgagatgatggagaaccagcgggtataccactgggaattcctccactacatggacgactgagtattgaaggggttcaccccccccc

SEQ ID NO: 883 - DNA, 14625 bp, Geranium carolinianum endornavirus
  source 1..14625: mol_type = other DNA
tatggcaaattcggttaattccctcattagttacaattcagctaatttattcaactatatcaacaaggtgctcttagaactagagtcgggagtgccaagagagaaaaaaatattagaaaaaggaagcaaaatgaccacgaagtgcctatcacgcactccgataacaaaaaactatgtcaatttgctttctaagaaaaaaaagaaaaacagcaaaggagacttgacggtaaaattgccgattttcaagcccgacaatattaaggagatcttgaaatgcgtcagcaatacttacgtgacttcaagacacaaaactaaaataataccagtaacgccctccataggaatgggagaattcttctctataatgatggatggtttagcctgggactgtgctaacaactttggactgactacttttcttctaggggtcatacaagggggtaaagtcctaagcaatcaagttattggaaaccataacttcaagagttcatataggtcatttaacgaaaaggttacctcactcacagtggacaattataaaggtaaccattccgctgaaaggcttagccatcaactcactagaagcgtaaacttgaggttagattacacgggaatcaaagaattagcgatatatatcggttatgattatcttttatttcccgaagaagattataacgcttcactgggtgacaattttccattagaccaaaccgaaaatttcctcaagaaaagcttagagtggtaccgtccctcaaggtatgccgaattacttggagagggttattacactgagtttgtcactgttgggaaggggtcaaaggttcataatctaaacaataatgttttcatctgtgtcgcttgcgggtgtttaaattccaaatgcgatgatgaagtccacacttgcggtaaatgccttagcataaatgcaaccgtggaaatagatgttaacgaacttaaaaattataaatgcctagttttatgtccttcttgttatgaatttgacagaagcataaacggcccactcgctgccctgagcctaaagaactacctagatgggggccttttaaacttaccaaaattgaacagcgaactgatagcgcaggacgttctgcgctatgttaaaacaaggtctagactagatgtcaaaaatcaatatgtatgcgccaacctaagtagagacgaactaaatcacctgagagaggaattcaaaaaccttgagataatagttagaaatacctggctagacatgcaaggaatgttgatgacagaaagccactgccacttaaccacattgctaaactcggagaaaaaaataacggaggtacaaggattcaacagatcatataccaatgtgggatccagtgaaaccaagttcagtggtgccactcacttgactaactggcaggagagcacaggggagattgccaagaatccacaggtcatgaattataattccataccgaaaatggaaaaattgcttagcatggcgtgtgctaggaaagtctacttaatagtcccaaatgtgtttgaccagtacaatggattttcaaatggattcagtttcgaaataagcaacgagaggggactagttaaaattttgataaacggaactaccaccgttttagaatacactctagaacaactgaaactattactagaatatgactacatttcctgtgacgggaaactatttgaagtcaaattgattaagaaaacatctaattgttccttaatttccgtatcaaagctaaagaaaaattctttagatattaatgagttagggtataaatcaatacaccctaaccagttcaagatgtttacgctagagataccagactggcaacaaaacgtgatgggactacaattaggaccaatgataaaacgcaggataaaattcaacatgagattccttaaacatctcataaccaggtgcgaagcatggcccgtgagtttccatggcctcagggagtatgccatagtttctagcttctctaggtcagaaaccaatgacatcgtcaaaaacgtattcgaggttaatttcgaagatataccagaccatgttttctgcgcctacaatatttatttacgtcaacaattaagcactcaattcacacactggataacaacagaaagaagtctgggactagacaaactaatccaaggctttgctggtggcatagtaggactgataactaacttgatgaatgaccaccagaatgataagtctttcataagccagttgctaggaaaatgtagtgacctttcttggctggtcagtgcccaatgggacaaaattgaagactcaattaaatcatgggaaacaggtgccgtaaaactagcagagttcaacggaaggattgatgaatcacaaagagacgtgcttgaaatgtgccagcatggaatggagaaagacctaatatccaatggatgcaattgttgcgggaggaaaactaacgaacccagcgggttttgctccacgtgcaacctagaaggttgctgttctcatccgtgtcttcacaggtgtaatagtaaaatagaacatttctgcgagggctctgtcacaagacctgatgtaacaatcggtgacaaattaaaatgtggccatactatagtaaattgcaaatgttgtcgaaaaccttcttgtcaagaactgtgctacaagtgtttcgagtggggacaatatgacgacaacctaacgagaatggcggtggtagaccaaaccatatacaaaggcgaaggagcagagtcagcagtcaaaagagtgataaagcaggccaggggaaaacagagttatccaaaatcgatcgaaaaaaaacaagtgacttataggaaagaaaagtcacaacccaataaacaacccgaaaaaggaacaactacaagtgtaattgtagacaaaccgggggatagcggcgaaaaagtgcaaatgcaaataaccaagaaacaggaaaggaaatacttcggagttagttcagatagctcagaggaggaagcaaatcaagatccacttccaaccaaggaagtagataataaaccagtagaggagcacgaagacaaaagtagtgatgaagacgaaccagtagatgataccaatgtggaaaaactcaaacaacatataatgataaatgaactcagggcaataactaatgacgaatactgcagtataatatgccaaaaggccaagcctatggctgagttgataggagaatcagtcaaattcaaatttttatatcaaggtgaaattttcattgatcctactagcataaactcaattcgccctataatagtgccttatgcagtaggtttctgcctcagggacacactatcttattataatccgatcataaatgatatatcatggtccgacgcatgcactgacatgggactagacgaatcctggtgcatattaaatgacgtttggaaatatgctgaacattttgaaatgaacgtattggttatccacgaaatggaaggtgaggtggccggggtatatggctatgtgtatgacaaatacgaacaggtcaatatgataagatactcctccggaaaacccgggagagaagactatgaagaacttaggggccattacgaaccttgcgaagttggattcaataaagaaccctgcctccctcctgtgtatgctcctgacataacttgggaagatgtgaaccaagtttattccaatgtgactggaggaggcgatctcggtgaattttacgacaaaaacatcgaggacaggcttactatagcgctagctttaaacgaaaataaaggcataaagtatgccagttccgggtttccaaaactcgagctaagcaataggaggatgggatacctagtatataataataataacaaccaacacgaacccaggaaaggcaaattagccactttcattaaagaaaccaccataaattctcagcttaacatacctagccttctaaccagggctgaactacaagaatggtgtctagaaaacctagtcaaggaggaaaacataagtaatgacaccgaatgtatcaagaatgggctggtcatgataattagtcagtatttagaacttaaaatgagttgcgaagaaacgttcaacaaccaaaatccagacaattccaacatatccctcttaagaaaaggaattaaagtagtggataagggcaattactcgattatactggccttagatggactagaaagacttaagaccggagatgtcataatgatacgacgtggaccaaacagattctgctgccaagtagaaaggaatattaagaggataatcattcccaaaatgcctggacatgggaccaaactactagcggacattgccatatttaagattagctacacatccctaatgatacaattggcatcgatgagtcatcccgggataaatctagaaaaggcaaagaagttattgacagaggccacatgtatactaggataccctggaactgggaaaacgaaagaactagtcaaacaatatagtcaaaactctggactactaattggggtgacacgaggtagccaagaaagtttaatacaagaattaggttctagaaacaaaatagtattttcggcagaacgtgccatgacaaatagggcctctagtaagactgtatacatagatgaagcgtctttgataacattacctcaattgtgctgtatgctaactcctttggtagagaagttagtcttatcaggagatttggctcaaattccggccaaggaattctcaaaggtttgcgggtaccaaccaactaacatcctagaatttggcaagtatgctggcgcaacaactattgaattaaagaaaacctggagatttggcagaagaatatgttccatactaaatgaagcttttggtctagatatgcagtctgctactgaaaaagaaaccaatgtgaacctagaacattcttgcggaatagacaaaaatagcttaaacagaatagtcagagacagaaatatagacacaattatggtttttacaacccaggttgaaagacaagtgaattcattactggaacccgaaagtcgagttaaggtcgccagagtgcatagttcacaaggaagctctttcgagagagtcctaatagtccaggactaccgtaaaggcccagcccagggatcagaagaagttcagttccaaaaagaatacgtaatagttgccatgactaggtgcaggaaagatgttaccatattgtgcacgtacgaatcgtgtaaatgccgagaaacctccaatgaaagtatagcaaggcatttgaacagagacctcggattacaatacctgtacagaggagggaaaagccatgacatcgatgtcatgggaatattgaatgccatacaagacagagtgtcaggattatttgagagcgttgaacctaacctaattaaagattggctacaggaattatggaagatagcgaccggaggaataaagaagaaaatgtatatgagaatggcaacaatgataaaggactgtgatgaccgcgaagtcctgaagacattgctggactctggtatgccaatggtatcagacgtagtaacagaaaacggtaaattatatgccatgatgaattacgacaatactaattggaattacataaagaaaaagactatgacattatttaatagcaaacagctaatagagtgtgtcaataacaaaattctgataggaggagttgaaataatcggcgattgtggatctgaagaaataattgtggatgccaacaaattcgattcctgggaaagtacccaaaagcacacaaaaccgataattatacgtggctacaagcggaaaatcaattcggaaaattgcgggaacataaacatgaatatcagattaataaatcattctagtcaactttgctggaatgctgcaaagctaactcttaatatggaatacatgggagtcaagtattgcataaaacccacaaccggctgttccttgtgtggtggaatacaaatcactaagcaaaatggtgaactcatggtgttcataaataacatgtatgaaaattacagtagccgtgacatacagtttaagtcagaatcagatccaatcaccaattacctgttaggaaagtgggacatggatccacgggatggtcacctctgggagctaacagctaagttgcttcctaatgtcaaccataatgcactgcactacactttgtggatagaacgaatcctagccgccatcaaaggaattaaaaatggcaaaacctttaacacacaggagggacacttcttcagaaatgagctggaactcaacgagagaatattatgcagatacaaaaatatagccaatgaggctggaattaaaataacctgtgaaagcgaccggaattattcttacttcaaaaatctttctttcctatttccagctaaatttaaaggaaataattgctacgtgtatttccacaaacataaaaaatgcgtactagtgaacaagacgaagaaattcgaattgtcatccgaattggttccgaaattgtggaatgaagaactatacagacttccatatagcctctccctcattttcggaggtgcggaaataccaattaaagggcacaaggaggtaatcaatatgctggaccttgatctagagaagcatgaccacaataggagtaaattaatgctgatgatagacgaagacttaactaaactagccaaggacaagaacttcgcaaatccggaaatagccatacctagtaaccacatagcagacggaaaggacctaggattagcaagcaatttcaatatcatacctgatgttaaccttactggagttggagtgtcatacctttttgactcgatagctgcgaaattatttagcttaaacctaatggaatccggcaaaactttcattactagatattgtaacttgtcactacggcaagacatcgaaagacatataatgatcaaacctattgacactaagataacccattataaagacagtgaggcttaccaggattgtttcgctagaatactcagtaagagaaacacagtctccgaaatagctaaaacctcagataacccagaaaccaagacaaaacacacaagaatagaacaaatattgcaacaaatgctagacggacgagatttgtcaagtgtcgtgatggaaagcaatgattcctgcaaaacaaatataggctgtctcggggtgagttgtttagaatttggggatatcgaaattaggaaaatgatgaaagaattgaactgtaaaagactaattggcttcataccggatcttagaaacaaatcaattagggaattagttagtctaaatgaaggtcatttactattcaaaggagatgccagagattatgtaataaatccaaaatgggcacaactaataaatattttatatagcagcgagagatgggaatctagcatgctattagagaacttgaaaatagtgggtcaaactgatctattcttggttgttgatgtcactgacactaacgagatcaccgttggtaaaatcccggcctccatgcacaatgatgaaacagtggtaacagtaccccaacttaatcctataaacgagattaggagaacaggaaatctattcaatgcagtagaattcgttatagacaacgaaacattgagcaggctagttaggagagccatgacacctggatgcactttaccaatgctgcaaacaatcgctaggaacaggatgcaaagtacggtaataaccaaatcaggacgtagggcaggagggaggaacgtcataagagacgtctccttgtgcgcattagtcgctcaatacattgcaaaccataatgataaccaaataaccagatatttagaaaagatagacgattatctaatggacaacaaggactggaagagatcctcaggggcattgatacacatgctaaaactagaggcaaacacgataataggaaatgctctaaatatcaaagtatcactaagtgagttatcaaaagtgttaggagaagtagcatacaacgttatgacggataagtccaacaaaaaaggaatacctggcataagagtaatacatcaacctcacaggataatgtatggtgaatactattatcacggacttgatttcaaaaacccaaattcattaaacctggatccaaatgtaattggcaacatactaagaaactcctttaagtcctggaccaaaaatgtggaatccaaattcgcaggctactgggcagaaccatcgactaccaactccaaattgtcagatcatttagtcccaggaaaagaatacagcgtcaaagtgttaatttatgacatgtctggtggtataggcaggatattgcaaaataggcttaaactgtccatgaaaacagatagtgtgatacacagctcggtgtgcataggagataatgaaatatcttatggtaacggagttagaataagcccattgggatctcagatggtgggcaaaacttctaatccagtcacattaggcaaaattaaattaacagccaaaaatatgagggaaatagacgacataactgacaagatattcacaccgcataagtatagtccaattggattgaattgcaacctattctcgctttggctcatcatacaattcgggtacatgacaagaattaagataagcgacagtaagcttgaacatctagaaaacttggccagcctggttccggagtttggatctaaagtacctgaaaacgtaaggaagtacataatagctcttaattctaaagttatgggaaatgaagaattaaccacaaagatcatgaaatgttttgaatatactgtcaagagtgagaggccaacaggcaataataaactgaataacttcatagcacatcaactaacaatattaacaggaagaaacctaacggagctaagaatgcaaatactggaagatgatgaatccgaaagtgacagcctggaagactacagtagtcatgacgatgattccgacggagatgacgaccagaatgaaggaagcaactatgaaactgaaactgatgacacggatgatggaataacgggagatggctcaatttctaacgatccccttggtcaacttggtcaagaggaagacatttctagaaaagaagaggatcaagaaagtgactttgaatctgcaaattcaacagacgtggaagaaaacgaagatccaaaagaatctgtcataactgttacagaggaactccgtgtttccaacgaacactcttctgagcaattggcagaggaggttccggaaaacaacgatccgggaagccaaagcgaagttcccacgaacccagaaattaagaccgatctagaagtagccccaacagaaacaaataaaatcctcgaggagccagcaatttctttagacacaagaacagtaatagaattcatcaaggaagaaatggaaaaactcgaaataaataagattccaactgccatggccaccgcatctgatgcaatcggcaagttattctcaatggctgaaatagacccaaaggttgaattgtgcagaaatgtaaacgatgaaatactaaatggtgccttgaacatatgtcgacaagctagaaaggatttcactgttacaaacgaagaccagagaggactaatgagcaaaaaagaaaaaatagggacttataatgaaagactccgattcaagataataaataagttcaaaaaaatatcaatttgtgtcgtggcgttagggagcaccggggacactcttccaattttgagcgcctgcaaaatgctcaagttaggaggagcttggatctgcctattatctcatcctgatatttatggactggacgcaagtaatcatgacaagttcattaaaataaacaaatcacagagaagaactacaggaaatattaaaagcgatagtgcaattgacattgccaaacatgcccagagtcacaatattgaagcactacggactttcaaggaagcgactcaaaatcatgacttcgatctagtgctcagcactcctttagcaccagcagtgaccgggtattcgatttttctcggcctaagaacagctgaagcattctgcacctattgctggaacacgggagtagagcaaggtaataatgaaagcgacagcttcttattaagatggtttggttttactctaaagtatgcagcagtagatggaactctacagatattgaggcagagtttagctacttctatgctaagagaaatgagtatagaaagcccagacatatcaactgttcccagaatagtgctaagctgggacgacgtgcattctgagaaaaatataaaggatcccaaatctgtattcataggttatacaagccctgggatgaaggcaaacgtacttcataatgactatagatttagattattggttggatttggtagcatgcaggtaagagaggagcaaatagatgaaatctcaaaaattgccagagcaatgtccaaggtggagatgaccgtaactatccacgttcaggatgaaattctgaacaagctattaataatatcaatgaaaaacttatttccaaagtgcaaaatactactaggtaacgttaatcttggtgaagtgttagccaacaatgacgctatgatatgtcatggtggaataggaacagtacaagaatgcttgatggcctgttgcgttcctataatagtcccttgttttgctgaccaaccttacgtcggttcgaatctggaaagaaatcaattaggaataatggttggagagagcgaaaccgagttaactgctaaacttaaaaaaataccaatgatacagcaacgaatcaaaaggaaaaattattcgatgactgacagcgccaggaatttggcagactcagtactagatctgctcgaatctcaacccccggctcgtgaacgcaaaactgctaaacctacaacaactgaacaatctaaagttccgtccgggatagttataccctatttgacaacccctagcgagtctactgcattatcattggcccctggagagtaccaggttaacggcgtaataagtgaggaaacagtttacaaaataggggaatcttattatggtggggagtgcttcaaagatgcttttaacaccggtgttcttaggcttagagggaatgagtatcatgttagggcaacccatagcactgcctccatcacaatagagacgacttccgacatcccaaaattgaatattctaggattctataaccacgttaatatccaggtactggggtacagcaataaaactgtcatatttaacgaaaactggccattgttgtccatatacgttacaaggacctcggaaaggagaaaagagaacaacttgcacgctttcattgtcgcgaatagaaccgacttggttaggatagaacatgtggcgaaaaccggagataaaataatgtcgataatagatgtcaaatcattgagtagtcgtttatcccttcccatcggaactgacccaaagaaagctataagctcaatcattaactgtaacgacgaactgagtgaatgggattggaagtgctacggtagctttgaaaatttaaaaaatagattgaaaggagagaatattgatgccctacttcaatcagactcctcactagccctcccagttttaagaactactcaatatcctgacggagcttgtttcgaaattaacatcaacactaggtcactgataggagaagtagtgtactgcttcaccacaatgggaatcataccaggcatgatagttaggcaaagtaccaacaagatttacgtaatcacactacaacccataatccatttaagcgggctaataagatgtagactactcaggaagaaaacaggaatgatcccaggggctgaaattgataaattaatgcaagttagttctagctatgtcctgaatgcagaaacgataaacaagatcaaggagatcatacctggatccaatccaaaattaatcactgctactattcaagaaatggtgactgattatgtggtggttgccactgcatttgacacccgttcccatcactcggatagaagtgaatatgaacggaaaatactgattgaactaattggaactagcaaactcaaattgttaccaaatgaaataagcgaaaacctagttgcaatattaaaactaacgcgagtggggtactacaattacgcggccggctgcttatggtataacatagagtgcaaagagaaagagttatgcctttcgctagcaagcattgcgcaggaatgcattaataaaaggggaagtttcttcaatagcatgctaaattttagaataggagtagaagacacaaatgaatttagggatttcattaaaataatgaataacaatttcgactacgaaaataatgacgtaatagctaaaaccaacggaaatatacaggaggacaagataataaagattaacctagagtggtttaatgacaatttagttgtggctgagaacaaaatagctggactcgtattcagtgaattccttgggaaagaaaaagagattgacgtaatatgccagaaaaacattgacaatgtgaacgtgaattctttccagttgacgagcggggtctgcatatctaaatcaggactaacaatactaagtctaaatccattgattaaaatcacaaaagttaagatgaaaggaggagcagaacccggaaaagataaaactgattctgaaatgggaagagtatttaatattcaaccaaatgaggtactgatggatcaacccttggacatggtcaaaggaccgaaattaggtaaggagaatttcggtagatatgataaatggcttaagcaaaacccgcacctggaggaacctaaggtagcattaaaaggcaaatcaatcatgtccaccagaaaatttccatgggaggaaatctatcacaccattcagtcagacggacaattagactttgatgtcaagaatgtttctagggactatgttcagattgacccaaatgaaaacgaatcccagttcggaaatttggagagcaaagtatccgatcctgctaagggccttttagaaaattataaagtgatagatctctgggaaggtggcagagaccttatcgaccatgtggtcatgcacgggccaactaacgctcaacggtacaccgtgaaagaaggctattattcagttatggaagtaaccaagaccatattttctaagtatccgattcaatgtaggccaatcttccaagacgaagcttatgccagtctgaactccttgacaggtagactaggaaggagcctggaaataaggaatatgaagacagtccccgcgaccgatgaagtgattagtaaaatggccaatttattctttcacaagaattgggaagaaatgactaatatgtacaaaaccgacccaatagtattcaatgaaaaagacttcagggactgggtaatggggcataaaaatgccaataaagtaattaaagagctagaagatctttgtgctgaaggaataagtactaatcccttcaacagattcaggagccacgttaaattagaaagcataaacaaacctaatgctatagaggatttccggcaatctgcaccaagagctatcgtttggcttccgtactgcatgccggccctttttagttacattttcaagctagcaagcaaccggttcaaactgatactaagggacaacgtccactatgcatcgggaatagatgttaatgacttacaaaattatgtcaactctgtggaggaagattgctacatatttgataatgacattagtaagatggactcacagatagacaagcacatgatagagattgagtgggaagttcttaaattgatgggagtggatccagaagttctagaaagttacaaagaacttaagaagaattggaccatttcaaataaattcgtaagagttagtgatagctggttaagacacagtggggaaccaaccaccgcactgggaaacggaataattaacttagcaataactagcctttcgttatcaagaactaagagatctgacatgaaattatgtctcttcgtgggagatgacatgctgctggtaactaagcaaaaggaagatattgacctagttaagctgagagggaaaaaattggcaaattcacttcttaaaccaagcattaacagaaggtgtggtccattttgcagtttcattataggatacagtgatatttgcagtggaatggccgttgtaccgaacgtgagtagactagccttcaagtgggaagtacccaatggccaacatgaaacgactgatgaatcggttttcacgaggcaactgagttatgcctgcttattaggtagtaatagctttagttcgatagttcaaccattaataaataaacagacgaagtgtgaactggagataccaacgtattatcgagaatcagacctaataaggttgaactgtgactacagcaaacttaaagaaatggaattcacggatctattgaattcgttatacaatagaatacttaaaccggaaactatacaagtaaaattcctaatcacatcggagaatataagaaaaggaatcaagaagatgagccaagtgaaaagcagtgatcatgaaccggagagtaaatgccacgtgagattgacggttgacgctgattaacaggactggaaaataatccgattgcaaaatttctctcgccccccccc

SEQ ID NO: 884 - DNA, 1510 bp, Grapevine-associated endornavirus 1
  source 1..1510: mol_type = other DNA
atagtgactaagagagtcacagtgaattcaaaggttctacaaaccataatgactagggggctgactggcaacatgggcatccaaggctcgcttgattatgctttggcaattgcgcatgccagatattcgattgatgataccacctacaacatctacaatctagatgcacaaggggccatagaacacgcttccatcgcttatgctcttaatagaagggcggcggccaagcgtgggttgaacgtcatgatgcaggaacttagcccatcacttcggtacttaggtcaggcaattgcatcaaccatacaatcaggcctagaggtgatcaaggctatgactccaaacataacaggcacagtaagccagattctcgatgggttggatatgaatagcatgaacgtgttgacgaggtatgcttcaaacccagtttgggatgaattagatgattgggtcacgaaagcaacacttgctgatgtatcctcatttggaattgaagcaacagtgacagcacatgcgtactgcaatcatcagcatgataagtgccagcactcgggcaacggtcaatgcaagtgttgttcaagtcccactgataatgatatgtgtgattgctgcgatagcacttgtgcacacgactgtgtccatcaatgtataggacatgatgccggcattggtgagtggaagacttgtctgtgctgtggtaaacaaatgcgcacaaatcaggaggtctgtataagttgtgaagacacacctgaagattgggatagtggtgttgattatgacaggttttggacattcattagtcgcaagactgacaaagagcacactgtagacttcttgaaaaccaaatcaaagtacaacaatgaatttatgttccgcatggcaaatggcaccaccaaaccagctagacctgcaatcgaaccatgcacaattgtggatgctaaacaagggcttcacatacacctatgctattgtggcacaaggtaccagcactctcacccattcaaatccctattgcacccgctcttcaatggcgattgtccgaagtgcgacaacaacactactaaccccattgtgcatgaaccgacggatgtgcagcgggcgccagagagtcaatcgtttaaaccagaaactaccacaacggaagaagctgctcagactaaggcggtggctaaagtcgagaaattggacacaacctcatttactgacacaacgaacactagcaagctattggtcgccactgacacagtgtttgttgatgcattaattggattctctggccctgactctacatggccgacggcagatcacctgagacctggtgaccacccaacaatgtctagagtcgtttgggtcgcactcggcgattatttcacgtcacaaaccgttttgtccatgttggcagaattaccaagcaccgaacttggacccatatgcggctacacatcatggcatgctgtggatccaaatgggccaacgtatgatgtgatatgtaatatcaccggcaaaactgagt

SEQ ID NO: 885 - DNA, 14363 bp, Hydrocotyle umbellata endornavirus
  source 1..14363: mol_type = other DNA
ccaatggccaattcccaaccaatatccaaatacttaacacaacaacagagagggggggggaaacccccccaaagaacccaaaatcaaattaaaagagttagtaatttgaagcgtaaacggtgcgctgcactgcaagacgatgtagatatcaatttatgttacgtacatcaaattattgacaagaagagtgggacaaaattagcaaccaaattccccagattatcacaaaaagagataaccggtaaatcaagtgaaggttggataaagcctccaaaaaatgctgttgttagaaggaatgcaaacaagttcataacttcaatcccaaaattaatgaaattgaaacacccattcattgacagggacaagaaaatcatttacacaatgccggccagatttagtgaaaagttggacatgtacggatttgagtttttatgcaccagtcaactagatccaaaagtcatttcgaaactgatatacatcataaccaacctagggtttggattcactgatccagataaaattgacaatctaagaactatagacattgatcattcttatgttggtaaggataaaccaaagtcagggtacaaaatgatggatagcaattggcaaccgatcaaaattccagactgtcaaagcttggattttgacatggccacatgtggtggtgagaccaaagtgttaagtatgatcaaagacagtgttaataagtttggcggttggctaaattattgtcttaaaaacaccaaagctaggcctgacgcctttggtcgcataacacatacaaacggcaaaatcgaaattgaaccatgcggcttagtaccagttaaattgtgcaagttttgtgggactattaacatttacagccaatactcagcaggtaatggggtgcatgatagcgtcaaacactaccacgagaaatggttaaagcaagcaaaaatggacaaatcagaaatagaaccagatgatgttatgaaagttgacaaaaatgattttcctacaaaatataacaaggatggcacatgtgaggtgatgtggaggtgttgtatgtgtcaaggtgacctaaacattgatgttagaaccactttggctcaaatgttcacaattattaaagcagtgtgggaatcattgtttgtactatgtggaagattagacgaattaatgaagcaaggttacggggacatatatgacgaattaaatgagcaacaaaaattaacaattcgctctcatgacaaagcaattgtgaaagagtactttttccatatgcggcagaaaattataatgtgcgggaatgacttagataggttatctcgagcacaattaggccggaaaatagcaaatttgtacatgactcatgatagcaaattaaattcaatcaagcctgagctgatagtggaagtgtgtattgcaaacaaagctatagtgcaaagtacacgtgaactaaatcatgaaattagatataacataattccaaataacctggagaagacattgcataacacgatgtttgacgattggtgtttcaaaaataaagcagttgacttttgcaatagagaagcagagtgcaattgtccaggagagaaagtcacatactttggatttgcaggatgcaaagcaaccgtgctggagctgttgtatgcatgttgtttacaaggccatacatatattctagtaccaaagttaaatgatcatggacaatttgaggatgaaacgggttacacaaccacaagtgatgggcacatatatctgtttgttgacggtgcaaatcaaccattgatcatgaatgaagacaccttcagcgtgttatcaaattacgactgcatcatattcagagacaagttatttttaatcacgactgagttgacaatgcagtatgtgaaaattaggatgataactggaccatataacagttatgatcagataccgacacacaaaaatctattgggagatcacccgaacattaaaatgaatttgccaaaaattgaaggtattatgggtaactggtcaggattgaactttaaagaagtgcagttcaagttagatatgccactgttcagagccttatgcctcagaaatctaagtgggaaagtgagttatgaaaatgcaagggagtttgcagttggttattcaattagaaattttatggtgaattctaagcaaattgtcaatgctcatgttcaatatacagacatagacgtgcatgtgctattaagtcaaatatgtatgatgacattgagaggggactacacaagttcaatcaagtatgttgagtggagcagatgtttgggaccattaagatccgccataccgacaattgataattacataacaaaaacaagtctattcgtgataaccgaattgttacactatgtgactggactagaagccaatagtatcataactttgatgtcaaaatcaaacataaacaactgggtaaaaggattctgttgtaatgatttttggcaaaatttgttaatgatggccgatgaattacaagtagaagaattgagtttttacaaacttgaatcgaaccaaaaattcccaacatttaagaccggtgagccattagttgtatgtcagcaccacaaggaagaatgtgaacacgagcatggagacatgctctgtgaatgttgctcattgcctagtagctctgtatactgtgagtgttgtgcaacaggaagaccaacagggttctgggaatttgttgacacaactgtttcacaacaagaagatgatgatgaatcaggattcgggttaacagtagaaaaagtaaaaagaaggattaaagagaatgaaatatataaacaattgataaaagacagccaagggaaactggaaccaacgcaattatcctgggagagcagacgtgaactagctaaaagaagattgccagacgttagatttagtagacttgagttcccaaaactggaggaaatcaaaagagacgcttggggccacccaatggaagaagcaacaaaggaacaggagatcgatgaaaggcctataagccccaaagtgccatttgcaaaaattgtgaaagagggccaagacttagcaagaaagatcaaagaaatagaggcaaatataattaaaccagtcgtcccagagttaccaggcttagaagaagacacaaaaatcaccgaggaagttgaaagacaaaaagaaacaacaattgatcaaatcacccaagagacacctggttcggatacaggtttgacaccaatcaaagttgaaaggcacaagtacaaagatgtaacttacaaaaaactgaagccaataaagtttgaatatgaaaaggagtttttgttacggaaaggtaatgtattgaatatagagacaatgataaacgaaatgttaccaatattaggaaataggtttgtcaaacacgtgactgacccaatctattacgaaggattagccaatcaggacacagaattcaactacattttagagcatttaccaatggggttaatcatggtaaacacagatacttttaagattgttaaaacacaagatataccaaataccgacctgttgacatgtggatttgatgcttacataaatgccacaggttctggaatttcactagagacatttagagccattacaggaaagccgaacacattcagtgacatggatttaatagacgtagccacagcagaggaaacaaacctaattgtcgttacggaaaatattgtgtacataatgcatggaagtgaaagaactgatgaataccattgcatattgctaatacctccaactgaaggagcgacgattgggcactttgtaaggtgcaaaatagagagagttaaagacacaccgatttatttgatggcgtcagaaacaagtgacagagaaatcaggcatgcaatgcttaaagacctagggctgagtcaaacggagttgtaccgggtagacgaattgacaaaagaaaacaacttagaaatcgaatgtaaagttgcaaatatgaaaaaacatttaagtaacatgtattcaagcaagttaggcgccacaatttacaacatcaaaggtgtgcactatttcacaaataacgccaccagaaatcatgacctgtcgttaggggaatttaatgtgcaactagaagactcaatgataggtccagcacaaaaattgattacagtgctgacctccgattgcacggatgatagcataccaggccattttgacaaaccattgggtttaccaaatgacttggtgagctttaggaaagactacatagatgataatttgagacaactttgccgagcaagagatatagaccatatgactgatgaaaagaatgtgaaagcgtattatagtggctatatcaaaccctggaacggaatgagtaaattaatgttaaataatgtgtcaaacatgaaattgaaattgttagataaagtagtagttgagataggaaaagtgaagaaagtattttctatagtggacagggatgggaaggactggatgattaatttaccatcattaactgagttgaaggtcaacgtaatagagagcaaattaagttttggctcgacattaaggaacatactgtcaatgttgaaaccgttagtcgacccaaaccaattcaggaaaattttaacaaacacaagattgacaatagggccagctggttgcgggaaaacaacagagatatcaaaaatagcaaagcccaatgatgtaatattagcaatgaccagcgaagcagtaaacaacttaaaacacaaggtgcaacagtgtaaacaaatatatagtattgaaaaatttaagaccttatcaattgaaagagagtacgatctgattatagatgaagccacaatgctagattggtttgctttgtggccgttagttaaagataacacaaaagtcagcctatatggaagcgacaaacaaattggttatattgacacaagtgaaacaccaggcgtgcgctccgtggacccaatttcaaaattgataacaccagaaaatataatacggctgaatacatcttacagaattggtgaaccactgataacagacttaagggtatttgatgagaaaatcaaaacattagctgaccacagaacagaagcaaaaatagaatgttactcatgggatgacaaggaccagattaaagccagcataattgcattcaaaccacaagtaatactttgtatgtacaataaagtcaaatcagaaatctctgcattgataccagaagcaaaacaaatgatacaaacaacccactcattccagggtaacgaagtggattatgcagttgtagtattgaagtcaggtaaaggaaacgaatggggattgaatggagatgccctttatttgtattccgcaataacaagagcaaaacacatgacaaaaataatagttgttgatcatcaattattacccccttttacattagcacagttgatcaccaaaaagggaggagaagatgatccagaaattgaaattgacttaataacgatcaacaatatgcatacattaagtgaacaagaagtggactcattgaatgaaatgaatattgatgtaaaaggtgccaaattaaaatatgagacaatagaaggaggtgtgatctgtaaggctacaatgttcggcttggaagtagccacaataaagaaccaaaatgggacagtaacggttacaggggcctcccacgtaataaaccaaataaacagagcaaagaatacaccaataccaatcttaagatcacagttagccaaaaacatgatcaaaaagaaattgaaattgacaatgagagcatctgcaaggttaaaggaactgggttggttaatagataagcatccaaagggtgcaatagagtggaaactatgcgaaaaaaccatcaaatttataaaagggtccggatgcccaacaatgagttcatacacgataatagaaggtgagaaccaaataataatctcaaatgcatgggataaattattacgaagagaaatcatatacaaatgtgacacaaaattgagcgagctggcaataattttagattggttagatgtaaaacaaaatgtgttttatacacaaatcagttattgtgacacatggctaaatgtgatggaaggtgacatcaaaacaacaatagcacaatttggggagagattgagtaatatgcatatatggatattaaatgcaatgttcaatgacaaaggagttagatgtcatgtaaacaacatgaaaaatgtgtacaagtttaataactttgttggtcataataaagcgagaacaatagattatcatcaaagtgtgatgcctcacaaatcattcattttggaggcgaacaactggattgggagaaggctttacagattagtgacctccagtggagagatagtgtcagtgaaagtaaatgacaacacaaaagattataaagagtttatagtggaagcattaagtgatttatggtttaaagaaccagaaaaactgttaaaaggaattgacacaaatttgttagacataccaggcttattgttaagtgtgcaaaaacacatgcaagaaaacacaaaaattgctgaattcatcaaaaacaacataacccaaatgattttagaaaccaaaaatcctatgagagatttcatactagtgaacaccaagaagagagcctcagtaacaaatatgctatcagtaacacacccacatcaacaattgatgccaactgaaatgtcaacatatttgtcaacatgtgaaattgtggtagagcaaatttgtatgaattatctattcaggcagcaatatagtaactcccaaattgagttagtttacggaggatgctttataataggattgtgtttcaacaacctatataatgttaaattgatggattatgatccaaacaaccacacactaatgcatttcaaaatgcaatggcacatatacaacgatatgagaatctcaagattcaaatcagcagaaattaaaccaaaatccactgatttgattagtaacttgcatggagaatgcatattgttgctaggaattgaaataatatcttacagctcagaaaaaataatagacttaatgaaacaaaataaatctataacaatatttggagcagtgccaatcgaaactggtccaaaccagtggtatcacatgtacggcaagcaaatgatagcttataaggatggaatgtatttgagaaaaattggaaacaatctgataaatttggcaaacacaggaagaccaatgtttgtgtgtgatggtgaatacataagtgttgaggtgtgcttcgagattgcaagtcacaaagtaatatgtttaacctggaggaagattcctaatacgtgctacataaagagaagcagtgaatcaacaagggtaaggccaagccagatggaactaacagtaccatggataaatttcaattttaacaatctaatggagacaagcagcctagtaacaacaaagaaaataatagtgaacgtcaaattgttacgaaatctgttaatacgactgatgacaggaaatgactcatgggacagcctgctagcctatgctaggacagtagagtcaacatacatagtaacggagagccgtttggatgacatgcaggcacattcaataccagagttgttgaacacagcgtggtatgcattatttatacataaaaattatttaggtaaatttaagttattaagccaaattgtggacaaagcgatgaacagtgaattgaccctacagctattaaaccagctagtgccagggttaatggagctaacaaacgtggtcagtgaaatagcagaggagaaaattttaaatttgatcaaatatttgtcaaaaagattaaagttaagcagtgaggcaatacaagcaataggtaatttggaaagatctgagtggttaaagcaagtgagcaaacatagagtgattaaatacaagttcaaaggccatgtaagttcaactgaaacaacagatgacaataaaccagatgaagacgatgatgatgataacgatacatacactgatggaaagccaaagaaagaactaaatgagctatctcggacagtgaaaaaactggggaagaggataacagactgggtagcagttagtgaatctgatagtagtggtgatcatgatgaaccaatcatcgatgaaattgacaacaagttgcattcacaagacgaaaacgttgaaattgaagaatattatgaggatgcaagtcaagagttcacggatgatgaggaagacagtgtgtctgagacagaagacagttcaatagaagattttagagtggacatcgtagatgaaataattgaacaacataagaaaatgcaagagaaaatgagtttattaaatgaaggtaacaccccaatacatcatctaacagagatcgagaacaatcacacagctatgatgcaagaattaataataattaatgagagaaaagaaaaattcgatgacgttttacttgcatgcgttgccgacaacatgaatgtcaaagatagttcagttactagtgcattcaaagggttttggaatagtttaaaattgatgtcagatgctcaaataaaatatgtggcagagattaatttgtcaaaattatgtgcaatgaacacagaaaaaattccaataacgtttattacctcagagaaaaataaaaacaaattgccaaaattgatatgggcatattggcactcaagggaaataccaatattagtatggaaaatgataatgtcttggcaaaggcaaatggatgattattcagtgatattagtgacaagggaaacaagtaacagatatttagaaaatgaaataataaactgtgatgatagcaatgtagcccaatattctgacataattcgttgtgcactactagcaaaatatggaggtgtgtacattgatgcatctagctacatgacaaagagaatcgataaattagttgattggactgtaaactcagatcatggaatcttccaattttcaatatttgataataaaaatcttaacaagtcatatgagaattggttcataatttgttgtcaagggaacaaatatatggtgtctcttgcatccgaattgcaaagaatgaacaaagcgaatgtaaatgataaactggacttacaagtgtggctaaaaacaagatttgacgaaattattgcagaggtggcaatacgtggagtgagccatgaaatgatgtattacttgcgaacctacacagtacagcaagcattaatttataaatacaatctggatatgagtcagtgtatctatgcaaacgaatgtccaataatttattggtctagtcatcatgaaaaaacctgggtggagaaaattaaaaacctttgggattgcaacatcgattttataacagggacacaaccagttttaaagttagtcagtaacttaagaatgagcctgatcacatatgacaatatgaatggagtggcctttgacaacagtttgcttgaaatcctaaggaaaacaaaattagagataattaatgtgtgcaacagaataccactaataaccactgagacaaggggcgagctcgaggtgactgtgccaaaacttatgataaaacaatcagatgcgtatatcatatgtacaggtaccacaggagatttagacccatgcattcaaattgggaaactattatctaacagtggaaaatctgtagccataatatcacattatgatcatgaaaataaagcgaagaaacgattaacgaatgtgtcattctatccattacaaatatctagtagtgaattaatgagagctggaataagtttttataacaacacatccacaggggtgatattaaatgcaaatagcctacacactaaattagccaatgaaattgaaacattgctagataagttgaacataaaaggtaagataataatagcaaccggaatggtacctaacctagataacctaatagagaggtacaatgctctatggacaatcacaaacccatttccattggaatgggtgacaggttcgagctcctcaaaaatctcaacaaatatcaaaaatctattagcaaaagcggcaattcaattcaaagcaaaactaacaaaaaagatgagaaatgaaaagataatagctgaaaagaatatgttgtacacttataatgtacatttaatggatactatcccagacaccgaaaatgaaaatacttttatagttggaccgttaacatcaagtgaaggatatagtcaaacaaagattgacaagactaagcgatacgtggcagtaatgtttgggagttgtattaactttgtaaatcattatcacgtgcaagtaataatagaatactttgtttcaaatggttatgacgtaatactcaatatagatccaagccaaatcaaaccccatagccatttagaaaacctagtaactagtcaaacccaaaaggtaatgtgtttaaaagaagtcaatctgcgagccatacaagcaaacgtggatgctgtgatttgtcatggcggagcagggacagtgaatgagagcatacgttacaaaataccagtgctggtataccctatatttgctgaccaaccgtactgggcaaaaatgataaaaacaatgggttacggagaggaaataaattataactcaatgagtgaactattgaaaacattagattatgccatggtgaacctaccaacgtttaaacggaacataacacacaatgcatcagtaataaataatggtaaaagattcaacgagtggttacggcaatatctaccacagatatgcaatgtaaggatgttgaatgccactatggctttgagtcatggtgagatcaaggcatctgatttaataaatccacaaatagaatggacaccaacacaattaggaatttttgacacgaaaacatttgaggtacaaaaagagatcaaaatcaaaacgtccaaacaatgtgtctggcagagtatacagaaattattatctgttgatgggttgaaatcaatcagaaccataacaaacccttctttcataaaactgcgcagtgatgccgtaaaaccagaagactgtgtgaatggaattttgtcaattggattaaacctaataatagttacagatgtcaaggcattatgctacaatgtttattctggggcaccaacaatcgtattgagattcgcaacaaatcttggttttatgcattgcacgccaattgtatcaattaattgcagtaattggcgaccagtgatgataacttctggaaaaatgagtcagttcaatgaagagttgattaaaataacggaggaaataactcagacttccgaggctcaaatgtggttaattaaagaaccagagttaatgataagatggtgtggcaaggaaactgtagcagactgtaaagcaagattattattggattcaatagttacgatcaaaacacggagatttgaatcatgtatcacattagaattagatgaattcaaggatggttactgctcagtggtacatgttaagcaaactggattaaggcttggtctgatacttggttatactggatggagaccggtggtgtacgcagttaaaaatgaaatattggtgctactaacagacgacccaataaacaagaaaaatgtgttaatagatttgggaaaaccattggagaatctaattgctagacctgtgtcaataacctctgaaatattcaaagcttgtttaaacaagcccaccaaagcacaattagatgcagagaatgatgtcaacaaaacagatgtaatgtactcagaggggttaaaaaattacataatattagtaacaaattatgataacaggaaacatcataaaatggacgaattggcaataatgcaaggtgcgatacgagtattaggtgcaaataacacaattttagacgttgacaagtttgctgaaacccatgacctacccataaacaggctgtgcttaatcaatggagattattattatacaactgagttctctagcgtacaggatgcaaatttaggatatgagttaataaaggcgtacacaagaataaccaaaacagactatttactaggagatgagttggtcagccgaggtagtaatatttacaccagactacaattaacaaacgagatggttacaatgatgaaaaattattaccacgaagatggccataaagtcgtcttgacacaccgcctagatgagaggttacaaatgaaatttgaagagtttaaagagttgttcctacagcactgtagggattgggaaggaatagcagctgctttcaatatagtagagaacataaattggaataatgaagacgaagttaaaattgtagacagaagtttaaatttaagtcggctgacctcaacatcaaaattaaatctcgggatagtaattgagaaagatagaatacatttgttgatatgtgatataaccattattaaatctggtataggaggtgctcaagaaatggaggacgaagatattgacaagttaatggtagaaacccaaacaaagagtagaacacaaagtgaatcatcacacaatgaacatctgagagttgacaaactcacaactcatgaaagagagagttggaaagacaactcaacagagttcatgcacagtgccagcaacaaatggggaattgatgaaaattcactaagagatgccattaaagccaaattatcatcaaccacattgaaattaaagcatgtgatgaaacctgacaggctaactacagtcccagaatttaaagaggtctcattcataaatataatgacttactccgaaactgattatacgccttcaattgatgtcaccggtgatgaagtagaggtacatgaagactttttagatatttatatagcaccatacagctgtagatattgtgctgatgatatagacgtaatatacgattggccgtcattagaagcaatcaaattatgggagaatgttgatttaacaaattggctaacaatgtatgcaccactaaatgaaatgagaatagttagtaacgaattaccgctaagggttattgagacagagaaagtgacattaactaagtatccacataaaagcagagcagtattaaccaaagtgtgttatgaagaaattaggtccattgcaggaagattaggttcagttgtaaaagtgagaaaacaaagcccggagcccatcagctttgcaaacaggctagcagaaacttattttaaacctgattggaagaaaacgtgcgagaaatatgcacgtaacccaatagtgatagacccagaagatgttcgatcatggatcgctgaaaacaagtcttgcccattaattataaaagaactggtgaatgtattgggttgtgaaatgcttgtcaagccattgagtgacgtgaacatacatttgaaactggaatccttgctaaaggatgaacccattaaaagttggagagagcaacaagcaagaataattgtttggcaaaggaaggctgtttgtgcaatctactcaaaagtgtttgtcgaagcaaaaaatcgtttaaaggaagtgctaaagaacaatgtactttataccgatggtcttagaccagatgaaatttccgccagattaagattaacaaaaaacgcagtagggttctttgagaatgaccttaagaagcaagatagacaaactgatgaaccaatcattgaggttgagatgcgcatttatgcccttttaggggtacacccgaatgtaataagttcatggagaatgatgcatgatgagtggagattcaaatccaaacattgtagaggaacacgtaaggcaatgagattaacaggccaagccaccacagctataggaaactgtattacaaacatgcaagtacactgtgagtttgtcagagccaacagccatgcgttagagttagcattattcttaggagatgacatgtgcatggtatttaacgaaaaaccaaatatcaagaagctcaaagagtatatcgcatctcacttcaacatgcaatctaaagagaactggcataatgattacggcacattctgcagcatgttggttacaaaattaaacgaagggaattgccaattggctccagacattgtgcggatgaagtacaggtacgaagttactaacggtgtacatgagacagatgaagttagtacgttaatgagagcggcgtcgtacttaatgacacttggattaacaccagaggtgaaaaatgccataattgaattaaaactgccaataagaccaattgaatggtatgatttcaatttgatgatgaaaggctgtatgagcaaatataacatgaactacttagaagttaaggggtattatgatgatttactaaacatgataacaaaaccaacaatttatcgacacaagtttatacattacacatccgaggagaacatcaaaccccaccataattagtgacagtcaccccccccagaacctctcgcccccccccc

SEQ ID NO: 886 - DNA, 16785 bp, Hygrophorus penarioides endornavirus 1
  source 1..16785: mol_type = other DNA
agcatatccgccgatatgtccatctacaacacccacccactttccaacaagaaagaaaaacaaaaacacaataacacacctgtaagcccggcgacagtgtgtgttaacccccaaacaacgccgggcgctaagccacgggaaatttcaaggcactcacccgtgctagcagccagaatgagtgccttgcttaacaacgctagatctgctggacgcggatgctggcgtatttacaaccttggcagcgtcgtcctgcaacgggtgacggcgcaatacgtcagggtgtcaactctgcaaatgttcattaaccgcgaggcgttgtcaagcttgatggtggactacaagcaaactcaaccagcagtttggcacgtgcaacccggcaccaccattggcgctttagcactactagatcaactgcagccgtgggaatacttgggttcagactctagttccgatatagattcttcaacaatgagtgagcgcaccgagggcacgtattatcaactcatggatgatattgagatggacatcctacaacaggcttcaagtgccggggtcgctgtcaatgctaccaccgtcacaccatccctgtggcaatggtttacaacaaccatcgagctgcccacatgcattgcggacattgccgtgatagtacaacgcagtgggcacttctgctacgcgcaggccgtggctaccacaccactggaatttatcacagcagtagctgaacacggggtagccgcacctattgactggatcattgcagtaatgctggaacgcgggctcaacgaacgcacaggaataacgactccacccacgatcataaatggggaatgggtgccgggccacattcaatggaccgatgaggtggacacaccactactaccacaattaatggcaatgcgcgccggtgacagtcccgctgctggactggttggcgctgtagaactgcatcgaccttacacattccggaagaagccggggaagaatgccactgtacaggtggaaggcaagataccagccagtccacaccaaccttcaatgagccacggtgatgacccactgacctttgcctatctaggcggttataaggaaataggcgacatacgcggccacccagggtttgcttctgagcaccccctggggggcagcgtgggtgacagactcaaagcgtgggtgtgcgccgcacaagataatgaattcgctcgcttaacttggctggagctgcaggagctcgtccaccacttatttgtgggaacctgcagcctaacgctccaaggggagttgccattaccatgggtggtcaaccccggtgtgttgacagacgctggccgcggaccaatcgcttgcagagaacttttatcacaaattatcacgctcacaagggcagcaggtggtttacaaggactatgccgctactaccataacacactcaataccttaggccggtgctaccccgatccctccaccggggaccgacgagccgacatgaagttgagtcgaccaggcatgttccaggcccgtgaccacctggccaatattgagggcactgacctaagatcattgatggataacatgctcagtgatgctgattcactaccaccccacgaatggaccatgcaaacgcagagggacatggccgttgaggcttgtctgcgcagccacgctgaacccacatcaatattagctattatgcgaacactcggacgaaccagacctgccccagaggatttccatccccccccgccggtcatttacagcaaccctccagggatggatgagatgaccctaggcctggagtgtggtgcatggaggagttgcgtatgtgaatggtgtggcacacgcaacgccagcccgggccgcttgcagccattggtcatttgttgcggactatgcgggcaccccatcagtagagaagatgatgttgccactaaacttaaatctatggcaactggactgccagtcgagactaccgacgccatccgtggcatcttgaacttgcgtaccatgagcacactactagatggttggcaaccagacaactcgtcaacatacacggatgtagtcaacagtcacgactttcgactcaccgctctgcatcttagtcgtattaaaaccaaggtgattgccttgccaggtcgctttaataatgaaacccttgagtggctatcccgcgcattcccggcttttgaattgctcaaccagccaagttccggcacgggctgcgcactgctcttagcgatcagcgatttgatgacactcaaagtaactgagtctatggtcgcactcaaccacgtggtgtataaccgacccgagtggttcccaccactcaccaacaagggtacaacactgcggcacttcagccagttacgcgcaagccacgacaccatagtgcaagccttaaccaatgatgatggtgatgcccttattactaccctacgcacacaagtgccacaaatcattctagagggtgccgcagaactggtgggagcaggtgcgtggcgatcccttatttatttggacagtgatactgttgtacgagtcaattatgatttctgcgaggcccttgataagggagctgtcatacaggccggtgatagggtgtatcaagtactccaactggatagtgtagggcccctagcaacctattatttacaccaaccactagattgcaatgacgtgatgggccaccaccaccgcgtagtgaccacagacagcatgcaattcaccttgccagtagccagcacgacctcaatagtgggtctacttgactcaaacctcacaactgaggttgtggagttgaacaaagacctcatgctgcgcggtttgacccgtgctatgatgcccaacttgacttttaccgacatgctggagtattaccgcgcggtcgcataccgtaagtatcacacagtcgacaacgtgattaagacaatagatgtaagtgccgagcaagcgtaccaccatgcttatgcagtcaccgtccttgcatcacgcgctaatgcgatgcgtgatacgacagctaaccacttgggtgacaaatgggcgcgtttacgtacaggcgggatgaacaaagctgtccagctactgatgcgcagtcttgggccggctttgagcctgacaagcgacgatatagctaccgcaatcgaagggctgagcggcatggctctaaacactttaaatagccttgcaaccggtcctgtgtgggacagcatcaccgtttgggcttatggtagtaaagttgatgcggttgacctatttacactcggtcgtgctcctgaccctgaggcggcacgctgtccgcacggcggtcccctagcaaccaaggggaaaaggatttgcatatgttgcgctggaccaagttacagtgattattgcacaacttgcatcccagagtccgtcaggtcatgttggcataaactaacacacacaacctgtgcactgccccatgatttacactgtagctgttgcggtgaccagaaggcgtgtagtgacccctgctacgattgcgaggggttagactcagctctagcaatgcaacccaatcaaatgaattgggttgaggaagggcaaaagcgtaagcaagaagggggcaaagagcgccaacccgggccaccacagagtaaggacatcaaggctaatgagacaggaaacaacaaggcccaagttccggccacatccaccacggaacaacttgtagatgctaagaaagtagcagctgctcttaccagattaggagcactaataccgctggacattgccgaggcaattgcctccggcacaggcgtaagtaactggttggaggacgttaatcgcatgggagtgggacgcttgaggggcgtaccacctggttcatatacactagaaaatacttggctccaggtgttaaacacagcaagcatttcccaatctcagcaagagtgcggcttggaaactcttttacaattaaccaattcacaaagtagaacgagtgtggttgctgcagtgggccgagctggcggttggacagcgacagaattcgggcaagcagctatggctctccacatcaatgtgcttatcatgtcaccagcaagcaccgcactccacgtcaattgccctagcgacgagatatacttagtgatacacagcgctgttctcggggcttccactggcatgcattggctagctatgcaagccacctcaagtgaaaggttgcctacgatgacgacacccataaccggcctcaaccctaactaccttgacacccgcatcatgactgtaacacaatgggcagctccagctaatcaattgaaacggctagagcaggccctgcaactagtggggatgttaaatgagaaatcaaacgtaacatggaaatggaaacagggcagcaagggcattatgctcagcaactcaaactttattcatgagcccgacttgggcaaatacagcatttggttaccagaacagatggcaccagcctgcgagctattaatcaaccccggtgttgcgcgccacagcccactatacacacaaggttacgatgtgccacatgggctacaagaggactacagcccgacgtacaatgcacaactgcaatcagctttgttagacatggcagccaccctggccatgccaggcttggagccaggtcacgagtggatgaagcgatttacaacagaagtggttgaatgtatcccaatagcaaaaggcaaagtcaggttggtgacaccacgacccctcaagacaggcgatgtggtgtatattaaaacaggcgcatggatgccatacagtgtgctagctgccggcggccacccaatggtgactgccccgctccaaaaaatggccgtgacagtcatgatacccaaagccagttttggttcacatctgcgtacactaatggccgctgacttaccttacttaaccgccagggaattcaacgctatggtagagtcagcgcgcgtgaccctaggtgtgtatggaagtggcaagtcaacaacgatggtgcaagaagcaaatcaacactacctactgaccgcggcaacctccggctcactcaattcaatacgcaagaaagccaagaggttaaacaagaaagtcactgtgtgctccattgagcgtgcaacatacgacgtaaatgcgtgggaaggcataacacatttggccattgatgaaggcgctgctctcaccgtgactcaactatatatgatgtgccgcaaaccagtgcaactccatttactgggtgatccattccaagtgggcacagttgacttcaatcctgctgccgggactagggatataacacctgcatacaaactcagtaaggtcacgccagctcacttgaccacagaaaatcgaatcggggagccattagccagctgcatcaatgctatccacccgtgggaaatcacatgcggagccacgcacaccacaagcgttaggttggaatatacaagttcagacttggagcaagtggttccgattattgtggcaaccgacccagatgcagtactagtacacaccgaagcatgcatggtgcgtttaaaatccgccttacgaaagcagtggaagggaccgagagaacagctagaacgtatattggagagagtacgcaagatacacgcgaaccaaggtgatgagtggccgagcgttttggtagtgcagtggcgcatctcagaaccgggcatagaaattagcccgcagtacaactactccgcactgactcgcgctacgaagcacctgacttgggtgagcgctggactgcaccccacaggtaccccactacctgagatggccgggagtctaccagtgggttatggctggtggactaatcgacaaccaaccttctcattaccaaacaacgtaagacttggcggggaggaccctggtgtgataagcgtcaaccgcataagagacctggtgacaaagaacgccaacgcatatggtgccgttgcccgtgtcgataggcatgaacaaacagacaccattatgatttccaaatatggggttcctgcattatctattgacgtcgacatcaagacaaagaaggctagcgtgacattaaaccagtttaatgttccaactgaaccaattataacccaattggaggctacttatacaatgcaatgcaaggacacaatcaaaccaaccttccaacgtaggcccactcaattgagccacgtggatgatgttatccatcgcctagcattgttggatcaattggtcggattagcttatggcagtgtaccattgccaataggaatggatgatgtaaccgcggtgacaggtcgtgaactagacaacactgaagttgatttcttctataaaaacgagccagtgcttaaattcacgcaaactgcaaggggccccttcatttggtggtctacagccaacagacacacagtggtcgtggcgacactgctgaggtactttgatgtggaggtcgcaggcgtcgaaacagcacacttatatacaccaagtttcgatgagcaactccccatactgcacacccaccacgtgtgggcagggcgtctacgcaaattatggcgtttccttgaagacttaacggtggctggcctccagagtctcggtctcaccgtagagactagcacaactagcaaggccgaacgctggttgcatgctattcgccaatatcgcgaagcccaggtggtgggtactggagcccacgtagttgaaacggccataccagccataattggtgaaacttgctggcatgtagttaaagtcatgaacgcacaagggtacgtgtcatatgttgtggaaagcgcaacggggccgagattctgccgggcggatcagacgggagacaatggtttaagcatagggcccgccgagatgacgtacatggcgatgcaaagattgcgcacattacgttcctatgagagtacaccaatcggatttggtgatggcctggtgcgaccattggagtggcaccaccaacacaacacaaaagtcgcaagactcctaacaaatgtggtggcgcaaacgactgcaaaagccatgagtctggagccaccaactttatacattggcgctggcgcgccggctgaaaccaaggcattgatcaatgcagccatcccacgcgttccaattgaagctgacacacacgcatactcaccagtgactgggtacaggctcactgagttgtgtctattgtacgtggtgcgtggctatatgccaggagtggtcacatgctacacaccgcatgttgatctgccattgcaattaagctggtgggccgctgtcacaagtggatcattgcatgggaacccacagctgttggcagccaaacgcacttctgcggaatattcccgcaccattttaaccaaattgagtagtattcataggacagtggccgacgtgggtagtcttagtgagcgtgaacaattggcaatcacagccataagtgatagagctaaacttgcacaagccaacctcgatggagagactgtttttgtggcattagaccagcagctcaagttaaaaaccgcaagcatttggttaagccctcaagaggtgtgtatggacaatatattacaggtcgtggagagaggagtgagcacgatttacacggccatgccctccgtggctctagaggccgaaataggccgtgattacctgggcaacagttacatccagccggacggtgaattgggacagtgtttcagacgtatgagccctcttgtcgtgtcaactagtcaatgtattcagcctgaattaatcaccagctgcctgggtatgagcatttacagactaaatgtgcgaaatggactgaatcttgattattacagttctcccccactaaatacacatggactgagtttgcgacgagtgcgattgccatacattcatacaagcgcgctcatagcctccaggaagttggttgtagaagtgcgagatgctatgatcgaagccagactgctgcgccatctggaattacgcatgcttggggcggaagtctcatttgatgatctcaaggcaacggcaacagtggcgttaagtggtatgttttacactgcaaccaatgttgcaccacgcgagacaattaacccggatgtgatggtagatacagcactctatgcatggcttaagcatcatgatgtactcaaaggtctcaaccggggagctctgttaacaagaccgcacaacacagggttcctttctgacacccttcagcatactaaggacgtattcggaggtctagttggtttgttgttgaacgctactggattggatggcaacctgcttcaattggtggacgaattgctgccggagagtgatttcgatgagcaaacgaaattccaagacttacaacccagactattagggctggcacgaccgattatgcattaccgactcaccgacggcaaattggccacagcaatgtgcaatgttgagtccagtgtggccaaacgtggcgcgactaattacctgccatcagggagagcccttgcggccgcttgggctagtcctccacctatgttgcccctcataactatggaagggcccgacgatttaattgagtggttcgctcacctgggcatagaaatgtcgcacacgtggagggtaaattgtccaacagacgcaatgcgggacatgatagaccaggcgatcgaggactcttataacctggaaatgcaagacccacaagtgcgcaggcgagtgcttgcgttacgcaaagcgatgccagagggagtgagggtaatccggtccagcgatgatgtatctcgattatgccgtatatacgctgagcaccttggttacaattggaacctggaagcaacatccggaccgtcatacaaaatggtcagtgccaaggagttattggccaacttgcagatagaggctcatcaatgtgaaatgcacatacggcaattcaccctcacacctgctggcaccttccttgctgatagtttacgcgagtttgggcagctaaggcatgaccaggtttcatccgactatatgtacactgatgctgacattgaggatgttaagacatgcattaccggagtgcgtcattcaatcaatcccgacaccatactcagtctgcaggtgatattgtccgatctcattaattcctttacgccggtagcagcaatacagcggcatgaatacagcacgctgaacgtggttgcattgagtattggttcaatgggagactttttgcccatatatcacgtgtgccgcacactggcagaggctggtgcaaatgtggtgttgcattgcgctgatgaactaacacacttagtgcaaccacccgtcaagctgggcaagggtggctggagtatagagcaaagcctgaccaaatacacaaaattacgagcgggtagctatgaggagcgattgcaaggcttgggctcatttattcaaacaaactgcttcacgcgactggagctagtagatcatttaggttgcaacctagtgcttggcacaagcatcagtacagagtcgtacttgctcgcctacgcgatgaacgcaccactactgctggtggatgcacttcgtatcggtagtgacacggtagctgagcgtatatcacgccaggggctgagcattgtaacagcagcatacctcgacaccaagtaccgtgcacttacacaacaacctttggactactatgccatgatggccacccgcacaatgcgcgcttccgtaaccttgccagtgctagcagcaaacacgccgtcaatcggtggatggggcgagccattctggggcgaggtcaggggacaatggtcaagggaactgcctaatggtagtgttgtggtaaccgcgggcagcatgaatgatacatcatatttacgtgatttagcctctctaacacagagaataacgctacctgagggtggtgtactattagtgcaggctaaaatacacgaccaaatggatcccaatgcaagagaagtggttcccttcaccagcatggactatttagccactctaaccaaacacaccaccctaatttgccacggtggtgtgggtaccattatgtctgcatgtcgggtgggcgcacacttggtgattgtgccatttgcctttgaccaacacagcaatgcagggattatgagcgagcacggagcactgcacgtggcaagagaccacattcaattagaaagcaccctgagcaaaatcacttcgatgggtccgatcagtggagcattggttgagtcgactaagcaacatacaagcccaactgctatggcaagcgcattgtgccaatgcttgaatcaactacttgaatggaatttgcccagcgaaccaatccaaccacctatggcagtacaacccacccaacaaacagctcaatcactgatagcagcgatgggtgctgtgcaaataccgacacccccccggttgctgggtcgtcaattgggagtttactactccaataaccaacccaagccaaaagtgaactacgacccaccaagcatggggccatgcttgacggacgctatcatgcatgattgcgtacaccagggaccacttgtgccactcagccacatacaaaacggtaacgggtggttgcgcggcgtgccacctcacctggtgcccgcttactcagcggcccgaggcgtcaatctgctgctgtacagcgaaagtcactatgaattatacttcaactacttgaaccgcccgttagtccgtattattatggaacagggacacgcatgtacatttgacgacccaggcaatctaccattacaatcagctcctccaattcttggtcaaaccaaaactgccgtgacatatgggccgatggcactagatggtagcgtttgcttcggcggtgagttgacattaactcaagagcaggcgggccaattgtggcgcaactacattgacgagtgtgctccaagtgatgtcggcgccgcaatacaagagtactggcagacctatgtatgcatgaaatattggtccagccgaagacataccctggacgtggtaggaagtgtcttgccactcaatttgcaaccatgccgtgatggtgcgttatgtgtggaagcaggtgaaatcacactcggtagtgtttatgccgtttgtcaccaagatggtacagtgacacttgctctcgcatgcatgcgcggtgagtcagactggctgatgtactctaagcccacaacaagccccaccactggtgtggtcatcgacacacgcgtgcgactctttagtaaggggaagaatagagcaactactggtggggccaagagtgcgaaggcagcgatcaacaaagcgaccgcggacttgctagccagagaaggtaggcaactgcaagtgcaacgggccggacaagtgtgcatagcagacattttagtagtggccgagtacgataattatacccaccaccatgctggggacattgaggtcctagacatgtacgagccaggggctatcgaatggtactacccgccgcctgatttgggagagatgcgatttgatgacaggcttcgactccgcaccgagccttacaggctgtgcttgaccaagggtgagtggtggtggtcctcccgtatattaaatgaacgaccagaagacgtgcatacgtgggcgatattgaatggcttggcagacaaccacggcgtgtgctcctgcccaatagcagctcgccccccggcaattcttggccaagttactgacactggcgtagtgttggacacattggaaccaccacatagtaccacactcacgccaactggattgcgagcgtggttacgcgatgcattcgatactaggttggaagcaccaattacagatcgtaacttaacagtaagccgagcacagctgccggcgcaattatcgaccggagccaccccgccaatattacgagtccctctggacggacggccgggaagcattctagtatggatggttgggccaacaatgtggttgacaagtacagggcatctcgggtgtctgcgcttagaaattagtgacacccaagagtacgttacgacagtgcacaatatcaaggagtatgtgccacccgagtcatggtttgatgtgcctccatcaacagtggcaagaccagttaaaagcgcagaagcatctgcgcgcactgtgcaaagtaatggcgggatcgacgcattacactatttaaattacgcggccgccgtgagtgcggctcgtgcagtgccgggcttaattgatacctgcactgaattgtacaggcaagtggcagaggcttgtaacacaatgaccaaacacgcaaaacataaaatcgcggtggtgactgcacatgcacaatacaatccgcccaagaagtgcacagccatcaaccttgtgatcaatgggcaagggtggaagcaagggtggttaaatatttcagtcacaacaccattccgcaccgggcgtgaactagctaatttgcggctagctccattattacatggcaatgccgatgtgatttggataatcactaatggtaatgatataggtggcctcacgaaacaagtggaagcgctagctaaagcacccctggtgccgggtgttgccacccggcaaggtgcgcactccccaatcggtgcatatttagtcgcttgccacggcccggccacactggtaggtcacaaggagacggcgcacgcagccttgagcaccaccggttggtggtatggggcggacgaacactggtttatgaactatgcacacaatgaaatcatctgtggagcgggagagcaactgttgctggaaaagaggttcctacatgggatggggactctaacagcgcgtggttcactaacccctcaaccaatttggttggcgggagacctcctaagatttgatgaaaatcaatggcgtgtgggaccctcaattacaccaacaccagcccaatgtggttcacccctttatcaagtgagcggaccaacggtttataatgaggatgaagcaaaggcgctccagttagtgttaggactgctgcatggcaccaacctacaggaggggatgatgctgctccaagaattggcacgtaggggcgtgtggcgcgtaggtggtcgattgggtacacacaatgtctataggacagaattgaccagctcatccataatgcttatcgctaaagccctcaaccagcgcgctcttgaggtgccaaccacactaacggcagctaagggggctttggacatagctacaagtagtacatatgatagtgtggacaaccccttgcgaggaactggttacgtggctcattgtatcaacatcacatcagtgctaaagaatggtgaggtcgtagcgcaaacaaccgatcatatgaggtctgaggaggacgtgccggccgcagaccgctctttataccggcacagggaaaccggaccgcaccgtaaccacaccatcaggcaacttcacaattgcgactatccagcaaacccaaccagtacagacactcgctgtgcaacttggttagcgtactacataagtgtagcagacaccattgatgctatcgtcgcccagcatggtggagaagaatggcacataacaagctacgcgcaatgggatttaccagctggacggcaaggcatcaacatcatctacaaagcggaggaagcgcgaccaacttggcacaatgttctcatcactagtagcacagggtacacgactgaaggccgacacatccgactgctgccatgggtgttgtgcaacgggaaaacatggtggcgatgcgtggcaggtagagaccagagcaatcgtggactcgatctcggcgtaatgcaaggtaccagcccattgccgcgggtgcgcggttggatagtgcaagagaaagtggatggtgatgcaccagtgtacctaaacaacgctttagctaaaggcggcacattagtgcacttggcaaacaggttcgtgtgggacatgctcaatgttgcccattggtacgggagcgacgaacatttcacgttgcggtttgcgcgaaattacaccatacacaccggtgtggagatgtcccaagattgggtcatgcccttcaatacgccagctcttttatgcgtgggcggactcattccggaacacgcaagtgttctcgacagtgtacgtgcatgggagcggcagtgtatatggcgtaataaagatggtcagatcgtggttggtgatgacggaccattcagcggcgtacgtgagagccgcacaggattggcgaactacttcagctccctattacgtgctggtgacacaaacgctctggttgacacattgagtcggctggccagattagcagatgctgcaccatttaaggaaagcgaggaagtccgcagcggtacaccttttaaagttaaagatgtggatatcccagtaatttgtaccctactagcaggtgcccacaagccaaggctagtgagcgctgcgaaagcaatgaaagaagcatgcttacggccactcaacgccggtgactggaaggaaattgaccaagcaattgagacgggcacatggacatccgaagaaccagaggtgatagtaacacgacagaggttaattaacccaacaacctgcacttgcctatcagtgccaatgattggttcaaggaatccgcctttgtcagacattgacctctataagattaagcagcaaacacaacatgccggaccagccaggacaatgtggttccatgagcaaacgcaacagcaacagcagctcacgcaaaccaagacaagcaatataacggcagccagatatacgggcccaatcgcatttggcgtaacgcgggacatcacctcaagattaatgaggtcacttggagagagtgtagctattgaccacggtgcacaacctggatgtaccaaagatatattgctatcacatgccatgcacggggcggacaagagcatgcacgcggtattgcaacgcacccacgttcctgctcgaatgatcctgctaacctggggccccgagacgtgccccccaacagtgccttacggtggcaatttcatgctcggtcgaagcgcatgggaccgtgatagccctgcagagttgcgggaagtggtgcaagcccagcgtgtggactaccgcactgggaatggccacccaacctacatatgcaacagcttggacgaattagtaacaacgatgaaggagacaatgaggcgattccgcagccgggcagccactaacaatgcgagccctaaacaagccagatcttgggaagcaattctcgaggcacaagggccagaggtattcgaaccaaggacttggcagggtgactctatagtggggcaagcgtatagccagccgatgattagtatgggcagccacagcacgtactacgaaccaggctacaggtcggacagtatcaaaagtgaggctgacattgcatattggaatgacagagaccagacgggggagatacacttgtttctgagtccccaccctttccggtctacagagcaaccaggtggcactttcactagttccaaggccacaacgacgcctctgccccacgacgcaaggccaatgcacaccaaaatgtatggaggtgaattaaactgcgtaacaacgcgactaggttacgctataagttacaggaagcacaaaccaccaccaaattggtcaggtgaattcgggcgcacatatttcaaggctgagcgcaacatgatgagtgcaagcaatcgcaaagataaattggggttcgtgaccgaggacattgtggaatggctccgcgggcgtagtggcattaagagcatcgacaacgaactagataagatagaatcggaagggattggactccacccgatcaatgcactgaacgtccatcggaagttggaatcactcctcaaaagcgcaatgaaagatcagccaatatggaagcacaatgtgcgcgcaatagtatggcaacaaaaaggaattaccgctttgtttgctccagctttcctgaaagctaaacaaagactcaaagaactgttacggcctgaaatcgtctatgctgatggtttgacaagaggcgagttgtgcgaccgtgtagcccatgtaccaaatgagggagtgtggctgatggaaaacgatctagtgcagcaggacaaacaaaccgatcaggatatgattgattgtgaattcatggtctatcgtgattggttgggcgtagacccacacctgttgagtttatggcgcacagctcacaaccactggagcatcaagggtcagcacctccggggtgtgttggacgctatgaggcaaacaggtcaggcgacaaccgcactcgggaactacctggtgaacctcatgtgtcatcagaggttcgtcgcgcggctgggacagaggctgttactaatgcttggtctgggtgacgacaacttaagcttcattaagggtcaacccgacactgcaggattgaagacggagattaaacaatactgcaacatgcagtgtaccacgagtgcaactaccaatggcggtgtgttcctacgacacatcgcataccggacggagcagggctggggttttggacccgactacgtaaggttagataagcggtacgctgtgttcaatggtaacgtgcagactgacccggcagcagtgtatggaaggatcatgtcatattgctgcatgctgggaccgaccaaagcggtcaagggaataatcgctctacaccacctcccaatcgaacccgaacatgattatgatatggcattgttagtgcccgctatagcacaacaatactcatgctcgctcgagcaagtcgaaacccattatagcaacttggtgcactcaatgagagcagccaacacccacatttatagctggcagttaactggcacagcacggctataaaccattagaataacaggccacccgggggtgtggccccccccc

SEQ ID NO: 887 - DNA, 10663 bp, Hymenoscyphus fraxineus endornavirus 1
  source 1..10663: mol_type = other DNA
atataagaataatgtacaataccaacaccacaatgacttcaacaatgacaaacactacgcccgccgctacaaccaacacacacaagagggctattggggccctctataaatataccccattaaaaaatttcagtagaggtgaatactatgacaccaatactgaaacaccgcttaaacaaactaacaatgcgtttaagctaaagaaaccagtcaagagaattaatcccttgacggtggtcactgacccatcagcggctgtcaaaattggaggttgcacacaagttaaagccagcttcaattgttggcaatgcatattcggatatgacttgggaattgataccccagttaggatggaaatgatcaaaatgacagctgaatgtgatcctgaatcagcgagccacattcaggtacgagcatggctgattggtgatatgctacatattgctaatcctatcggattgccagttggcccaccatcagatgagctttttaaagcccaacgagagtttgtctccaagccgattgatggttgcataaagttgacagcccttgttgacttatttgatgatggcgtgctggtaggctatgctcccaccacgctacttgataagttggctaatgacacaggcctccaattgtctgatattaacaccaatcagtttaagaattcaatatcaacaatggttaataaacgtgtcagtgatccgttaacaacattcattggccctccaattattcttcctagtagttgtcctgatgatttgatcaatgacctcaacactgaattcgggaatatgacattcatcaggggcaacaaggaacaccatccacatcggtaccataatgctagtcgaaaggctgtgaccaacttaatctaccggtggcatgggcatcgctgcctcgtgtacgatattgggggcaacccagccgcccaccttaatgctgggcggctaaatgtgcatagtgtttacagcaaatcctcagctgctgataacgctagacacataaagtgggtcaaacaggctgtcgcctgggctaaccgcaatgttaattcagataattctgatagcacttacagggcgattgcttcatctattctgacagaaaacaatgccatgtggtgtgacaaaggggtaaatgggtgcgtgcacgccagcaaagatggatcatttgcaatgtctgttgataccctgtgtcatattgaagtagacgatctgtttgatttctatatgaaaaataaggtaatacatgcagtgcatgcttttaccatacccaaggactatagctatgcttcgagtggggctctgccatacaacgaaggtcattggtacagaaatagcagttcttggactatagaattcaatggtgaaagtttgccatatacccaaagtactgaattaacaaacaagtacctaacaataccactctacacgctaggggagatggttgtttactgtaagattgggggctataaaggtgctcacatgataattgagcactttgtgatgcctaggagtgagttggattcattatatattaagcatgtgacttggtttaatactgacatggatgaactattcgttatgatccccaaggtgaatatggatgagtccaacacattgatggggcgcactccctatgaaatggagaaagttgtcattaatgttcgattctatgaacgtattctaaaccggttaatgcaggcatatacttgggagtcattattgtcctatggttccggcttgattggccgcgtgtatgccacttccagtgggttgcacatgaagtggaatttgacaaacacacaagttaggcaacattgtttgattgcctattggacaactaatcgattaaatgagtcaatcagaccactactagcccaagcagaacgaaaccaaagagatcctgatttccttactagcttatggaactcacttaaaacatgggttaaggactttgggtcacagtttgatccgtctgggaatgttatattgcaaaaatttatagctgacaataagggcgatacattacgcctggttcaactattcaacagctccgcaagaagcattgaatcattaaatgtggcaacgcaaatggtacactcaagatccgtcacagattggattgccaccagcacaggagttacgtacaacaaccaaaatttcaacattgataagtggcggttatcacaacctaaactaaactaccggccagttgtttatgatctggtgcatttccgtggcgcgaagttcctaggtgatagagtcaagtgcacgccatcaaataattgcaagcatgaccatgggatataccatctacacatcctgaacgcaataaagaaaactgggaagtgtagttgctgcaacgttgaaagcaatttaaaccggggtggtgtttgttcatgttgtagtgaacgatctccctgtgtggggaaaaatttacgctgcccccatgaacacaaccattcaaatgatgagtgctgcaacaaagaggtttgcttttgcaacaagccaaatagttgcaattgctgcggcatgcctagcatatatgaccactgcgaagtgtgcaaattcaccccagcagcacaatcaattgggccaatattcggtaacccccccacaaatgggcccaataacctgtcaaagattaaccacaacgtgccaaatcaagctgtcaatggaccaacaaacactacgccccctgtgacaaccacaggccttaagacttttgctttcgttcacgggaacacaagcaatggcaccccccattcacaaaccccaattccttctagcccagttatcaatcccgtggctgagcccaatgatactgtttacaaatttaatccagcaccaactgattctgatgctgtaaatagtgaagggtcgatcacaccacctgtcactgagcgagccaaaccactattcgacacaacagttagtgactttgatgccttagccagtaagaattgggctgatgattcagatttggaagaaattgagtatgagcaagttaattcaagctctattgctacgaaaaatgacaatgaggaatctatgctacccttagtgccggaagatgagattatcggtgcggaaaatatatcacagatacgctgcaccaacgttactatagttgcaaatcgtggctatggcccatccaatttaagcttacttccaccaaattatgaggggggcctagctgtgcgagtgacaggttacaccgatgttccaggtgatggtacatgcggcgcacatgcacttgccaaagcatgcgaactcccaattaagtcagtcaagacttggttgggccaggccgtcaataaagatgattggcaagatgccgaggagctcggagcatgtgcagtagcatttggtaagaatgttattgttgttgaagagggcatcaccactttgttccgtggttcagacagcaatgtggcagggtcaattgtttttgctgaagtgataaccactggtatgcattgggtagctggaaattgtgacatccaaagctattcttcactctataacagcaaaatccgtgagaattataaagcgctattgtcagcatgccagctaactctagatggatcggtctcatcagcgtacgcgtaccaccactccactatggatattgcacaaattttagatattgatggccaattctcagtagatgacacttttgttgccatccacaatagaggcagcaagcccaagtgcactatttcaaacattagtaacgggataaagtatattactggtcccacagggtcgggaaagactactgctgcatttaatcagatcaaaggacgtgtattaattgtcaccccattgcgctcagcagttaccagcacctacacatttctaaaaaagaagtcagtgcgtgttattggtagagcagatcaggcttggttgcccccgaatacaaaagaaaatgaagtgttaaacgcagatgtggtgattttaacaatggaaacattgtattcaggcatattcctgtcgggaaacaagaaaaatgtgtaccataaccttgtaaagtcacggcacatcatatgcgatgaagtccatgagatatcaccgcattatgctaggttgatcgcattcatgccccgtgagaaactctatgtgtgttctgctaccttacctggtattaagactagttatgaatgccagcatgatattgacacctgttttgcacagaaaaactatcttaaatcgtactttgatgatgctgttaagaacaatagcattcaaaagggagaatgttatattgttccaacagttgcgcagtgctcatatgccaaccaaccaaggcatattacatcacttaactctaagactatggcacaaattgatctaaatacagttaactgtgctattgccacgaatatcgttacaacgagtgtgactctgccaaacgttattgtaatgactgacctcggtgagcgcacacaatacaacatgatatttaacccatacaagactgaagacccaaagaagatcagattcgctaactacacacagcgcgactatagttgggctgagatgtgtcaatcgagaggtcgcattggtcgagttaagcccggcaagttttacggacccccacctactcctagcacccaacaatccaacgttgatgagatgctcatgagctgttatgttgggtcagggtgcaacttgacacgcattgactcatggaaattacttagccgattgcattttaatgaaatagttgattactttacaccaatattaaccaaattgcaagacaatgatttaagcaaccagttccagcaatggcaagacaactatatggagcttttagcatgcaaggacactggtgttagcccagtctttgtccaggattcagttagcaaggaaaatgtgctgtccttaattagcaattttgctggcacattaaccaccagtgttgttaggcaagggccaatgcgctataactgcaggattgaatgggaacatatcttaccgagccaacattatagtaagaacgataatattgactttgataacttaacgataacaattgactcaacagccaacctaatcaatctaaacacagatgataaccaaaccctgtcatcaaagttgcggatcttggccatctcgcaaatcttaaccactattcgcggtcttagagaccgcggtcaggtgttgatgaatagaaacaaatggggcgatcaaaccggtcaatacattgcttattcaaatttccaagaggcaatcaatttatcaggtgtgaaattaggccctacagagataattggtttattagactctaatgcaaaccaacttattcttaccacttacagcaagtcaacaaattggaaagacgcagttcttataccaaattatagaaccaaccactatataacaatggtcagtgaagctagtatactacgagacaataatattcatgttttgaccactctacaaaactccacactgatagctgggccgtcaggtagtgggaaaacaactaagatgcttgagaacaatccagggacacatgttgtgacgatcagcaatggtcaactttatgctaatccaacttggatcacacctgcccaattaccaccaaaccaagaggtagtgtgcgtggatgaagtaggcttaatggatgttgcgacattaattacgatatgcgccaaggcaaagaagattgtgtgcactggtgatattggtcagatagtacacaacactaatgaagaaataaaactattcacaggagtgaacgataccatggaactgatatcagaacacatgactgtagaaaccctgtcaggcacctggcgatttggtgaaaccacatgcagtatgttaagaaaccttggttttaacgtgacagccaatgacaaatcaaagaaggacactgtcaatgggcatgtagttaattacaatgatttgaaatcatatggcaaactcctgattgatacctcacctgatgctatcatttgtagcacaaacaagcttgctcgagttttacggtcaattacgaagctgccagtattcaacattacaaagtgccaaggcattgaagcccctaagaccttggttttgcttcaggacattagcgccggttcattggcagaccgtgacttatatgtagctttaacacgtcattcatctgaattaacaattgtcgttgacccaattcggactagcattctaactcgattaaaggtgcgctcacatgacctcatatcatatgcaaatgcagcgggtggtgcaggttcaatgaccctgcctatgaaggaatacctaatccggctgatgtttaggcaaatggcagaagtgcgggtggtagctgaaatattaggcattataactgcatggcaaggtaatataatcagcaataacacactattagcccacatggataaccttaatgaccgcaaccactcacacttcaaattttcagaggttggttttgatgacaaggttgggtgtgacgtggttactcttagattacacaagaaacaagtcgtcctttttaagtcggtacactgcacgccatcagataatttactcacttgcattaaccaactacctatgggaacgcttgttagtagagctctattgcgtgttccaggcgcaataatcaatctgagtgcttcactcttgcgcaagattggcttttggttaattaacttgatgtcaagtgtatcacacgtacttgacaagccagtggccactgttcctgaagaaattgagatgacatcagtgggtggtaaactggacctgactacaattatatggtatgctttgactggtgccaaatgggcaatagtcactttacgtagcatattgttgaaagccagagatacatgctattcttggaccaatggtaacacagctggtgcagcagtaaagaaactaatgctgaacatgctatatgataaagatacgaatacctttgtgggttacactattggaaaaaaattaaaggagctgctgagtattttgtctagcagtgccatattagcagggaaaggcttatggacaatcttatgcacaatatataaagcttgtgtaaatggtgtcaaatcgatgtacactacagctaagaataacgcagaatggatgagaaccagtttcctagagatatatatagatgagtcaggttctagcgacactgactctttctacatggtgccagatattacccacctagatgacacttggtcagacacagaagaggtgatgaagtcacttatcccaggtgatgaccaatctatggttgatgagttggtgactgagattgaagaacatgaagagaagttaattgcagcacaagccgctgaaagtgcgcagcagtgtgaggacaataaagttatggatgaggttgatatgctatttgattttgaagaagagctactcagtgttggcacaccgcctgctgaggatgacagccagaaggcaaccatgcccaatgtcaatatatatgaccaaatcagcaatgattatactggtgctgcgacaccacatgggacccaagattcaggtgcagatatctcgcaaatttctccatcaccccatgacgttgagcctgtcgatggtcaggactctcacagcaacccacaaagtacaacacatattgagcggaagcgttgtaagtgctcgactattgaagataagtgggagtacattcaaacactggaaactgaagtcaatattaacaccttcacacctaatttctttgggagatcggtaattcaacgcaatgacaaggggctatccgttaagttgtcgatgcctcttttaccacaactcagcatggttactgaacgttgttgtgatgacgatacacatgtagtgatggccactgataaggatggcatcacatatttcaaattggttaggtgcggtgaagggtataacttatatgtgcagccgggatcaggtaagattaacccccagatgatagcccgaggtttacagtacatcagtaaattgggtgggtcgcaaggcccgtcatttatgagtttgattaaaaacatgctatcagctacgaaagacttcattgataagttagctattctgagcaaatacaagatcaggtatgccctgggacaaatcactatgcaatcattcagccatgatgctagttgcatacatgtgtaccgtgccatcaggtcgagtttaccaaaatcctggtttaggagtggtattgcagatttaacgatacacagtggtaccacaatctcaactattgaaatcaagagcgttgaccaggtaaatagccacaaggatatactagttgtgatttaccaattcttttcacaaactacagtttcagtgttttgtaacactgagtctcgaatcaactttgtggggcgtgttctacgcaagcccgtggacgaatcaatatctggtggtgacaaaaatgctattagtgctttattacagttagggattgatatccgtagcatcattgaacgtgaaaatgatctcactgaaactgatgttatgaactggttggttaataatcccctaacctcgctgtttggagttagctcagaacctacatatttgagctgtaaagaatcactttcagttgaaaaacacttgctagatgacttcaagtattctcttgatattaagggtaaagagaaggtagctttttgtattcccagtggtcatggtaaaacaaccaccgtagcacgcattaggcgtgagatgcccaatcaccgggttcttgatgcagatgaggtgcaggaacaggcaacaattctattgcttgaatttgacgataagatgcgcaattaccgggaaaagattataaaacacattaagtccgatggtgactatgatgctttatttatacactccccaatgtgtgcaccgccaggatataggccgatcgtgttaatgaatagcctagctgttgttccggctgatagaatatggtcagagaagaatgtagcacacttaaacgtgaattatactgtgcatagtgtcaaaggctataatgagctatttcatacctgtcgcggttatttagaacggcgtctaagtggcgatatcactttagaagatggatctacaattatcgacaatgtcaacagcatattgggtgacagttttatgcggaatgcaccattctgcgacgacatattgagattgccgtccggaaagaaggacaagttgctgtatagcgaaggtgtccttggtgtaggacagcaacgcgttttcaagactgggccacacgtagaagtaatgcggcctactatcaatagtgtgtcaacagcactaccaaatgcaattaccactcgcctgatgggaagggttaagtaccgcaccatggacttaaagatccatgattatgatgcgttactaagcaagatgtttgctaaagattataaatacaagttgcgacagtatgaggaagatactatcaacttaaattataaagacattttagcatggctagtcaacaaagggaataaaatagaattgctagataatatggtacgcaacgtgctaaaggatgaacatgctactgacccagcgaatatcagcgtgcattacaaagttgaaaacctaatgaaagagcaagtgaatgacatacttgatcaagttggccgtgtcattgtttggaacaaccaaaacattaacatgtatgcctgcccagtcattaatgaagcaaaagcccggtttaagacgcttcttaagagcaatgtaatctatactgatggtatgacaattgaagaaattaataattcaatttcggagtataggggtagatggcttttagaaatggacttgtccaagcaagacagacagactgacgcccagatattgaagtatgagtgggatttaatgagaagactgggtgtgccatatgacttaattgacttcatgacaagtttcatacccacgtttaggattagagggtctggcagggaatcagcgaagctcccagctatccattttagtggaggtgcgatgactagcttaggcaatgagattaggaacctcttattgctatctgactgtttgaatagcaagtttgtagcgatatatacactaggtgatgacagtttggttatcatggatactgaacctgatttgaaattctactcaagagttagccgtgctagacataatgttgaaaacactgctactgcgagccggacttgtgcgttatttctgcagctaattgtgtgccgtaactctgatgatagtttttactgctcacataattttgttaggctgagagagaagattgcttattcatcatatccaaatacaagctctgattggaaaatgaagtatgcttcatatttaatgatgattggttacagcacacaaacaatggaggcaatgcagtggtgtgggtttgtagcattcccaacccttggaacgactatgtctatgcgagtcagtgctaatgccatatacaatgaggtaagtgaagaagcaatattgtcggttataaatgacatcatcaacgctagacaccaagaatctgaggcaatcttgttggatgtgcccatggtattaagcggcaacaagttactcagcggctttaaaaaagctggggattacgtggataatcatgtggctacttatgagagcatagctgattatgtcaataatgtacagtcatgaaagtgtgtggaggggtggtgtgggcccccccc

SEQ ID NO: 888 - DNA, 12019 bp, Krauss' spikemoss associated endorna-like virus
  source 1..12019: mol_type = other DNA
atgtaaaaaatgcccatcatgtcctcacagcgcacatcacatcgcacctgcggcccctccgatcggaggggctgcgatattaatttaaaaaataaaaagttatcagctagacatgcccaaatatatcatgttggcatgcaaccagctgataacactatccccgaactacaattacgacactgcaaatacacagactatatgtacattgacacattttttggggaactggcagacacggaacacactgactgcattggcatcaatggaataattaacatctaccataacatgaaagtgtacccgtgtgccagcaaatttacaatcgacaaatttaacggtaataccagttgttacatcaatggaaaatatttcattgacacaaaggacccacccgccgagtctgactgcaactactgcccaaaacgatacagaaggcaggtgatagctgaagtcacaaaacggggcaaacaatccatgttacagtggctcagtgaaaaaagtaaaacctttccgattgggaaaatgtcccaggtttttgacggtgcattggagacacttcccggttggtacattaagtgcaactgttgtgatgccatgtcctacatgccactatctacgttattaccgcacacactcacccgtgaacaactcgtgcacgtgattaacatactacaatgccaaaccatgaacccagatacgggtatgttggacctagacccggaactgtatggcttcgaagcttcaatgctgggattcatctttaataacgctaagatgtactgctacaattgcggtgctcctatggacgaatacacacggttcgttcccactgagttcaaacacctagtacccattccacaagactatggtatacatggcatatccttagagcaagcgaagttgtgtctatacctagacaaacccccaccagagtccatagacctggcccggaaattgtacacagaaatggctaacaataatataaaccaccaactttcccgcttagaaattcaatacctcaactcggttttagactgtatcaacactgataattatagacttctacaaaggcacagtggtgtggtattcaatagcaaccaaaatttgatgagtgccaacattacccagatggaactggaagagattcttttaactgcagagttcagcgtgagtgctggtggtaatatctatgcacaaccatcaaacatgaacgtgtaccacagtttgtatgacatcacaacggccgtgacaacttccacatggttctcaaccaccgagctgatgttaaacacgcaggatccaggtgagaaccaagtgatgctactgaatgccagcaccatatttgatgtggaaactgcaatgcttgatgagtcatatgtacttgtgcctattgtgcgcgaaggggaccatgtggtgcaagactcacagtacatgtacacagagtcaacagggtccaacgtcccagtgagatggaataagaaattgattaatttggtcaatggtaattgtgctgtacgcctcaacggtgatacgtacaatattcaaaccatcaggaacgcagaaaaactgtgtatcatcaaattcaccaaaactcaaacaccggacatccggatgctcgctggtaggagaaaactcgaggtgtacttaccagtgttggaccctaattccatattgcaaacatttggtattgtgggagctgaatggcagtacgtcagcatagatgtagacttaacttatagaattttaatcaacgctttatctggtaagaaaagcttggatagcatactaacttacgtggcaggcattgccagcaccaagtattcaattggtggtcacatagttgacctcaccaaaacaaacatagctgaaggtgtgccagaattgatatatgcattaattataatgaatgacaacaacagattgatggagtggtgcaaactgaattacgtgtccaacgtgagcatcactaatgcaacaagtcgactttacaatttcattctcaaccgatttgtacgccaaattcacctcatcgaccaccccctgattaacaaaataaatgaactaattaagaccagtgccaccatgatgtttaaacgagacagcatcctcctcaaagcacatgggagtgttaacattacaaacttgttggcatttgaaatcattgacaagatagttgatttccactcaacttccagtccagtggtgcgtcaccccaacaattgccaccaccatcaattggcttgtaatcatatggtggattccaatcaatgtgcttgctgcggttatgccgctgaaccaggttctacacattgtgcgtgttgtgctacaagtaggatttgcctacacaaatgtaaccataggtgcttaaaaccttcagatcacatgtgttacaattgccaagtggcaaaaaaaagaagccaccatgtcaaatgtaggtgctgttcggcaatgggctgtgccgaactttgcacagtttgtgacaattcggaaagtgtcgaactgccgccagtctacaacaaagaccacaaaatcaaacctccccagccacccaaaactaaaccggggttgaaagaaattaaggcactaaccccccccacaacacgcaaactggaagagactggtaaacgcaccatagttactgctactggttccaaaatagggaagaaacaacataacgttgtgacaatttcaacagacgaaacgctgatcatggcaggtaacatcaaacggttggaatccttccatgacctaatgctagtatctgttgaaggttccatgtatttcccatacatgcccttctatggtgagcggaaattgtctcgggaagcttttgataaccacatagtccaagctgcaatagagactgaagactattgtgcatacttgtgtattgtgaatcaaacctcaataactttacaggaactcatcagccaattcggttccaatccctcaaccaacctgtcatacctcaaacatataatcgctagtttgcatttgaactgtgtgattagtgtaaatgacaatctgtcatacttactcaggtacggggagcaactacaagaatacctacacattgtccactcaagtgccctgccagacaaatttcaccatgaccactggtttgttggtcacccaataacgttgactaagtacccaaatggttattgggacgcaaaagacatggcaggagtgttggatgacccaaaaccagaattaaacgtggatgcaatgtccatcgtagagttcaccaactataagaacagaatggacaaggaatatttgaccacaaccatgacacaccggaacgacgacgttaaacgacctagtttgataatgttcggtaacagcactttcctaaacaacaatgaagggagggttcacaacctgcggcaaggaaaaatacatgtggaaattccggaaaaatacacatcatacatggaattagtgttcaatgcaacacaaagatctgtacaaatggatgcacttagcatcataatagaaaaggatgaagacattgatattgaacttgacaaaactatcactcatatcatcgctcaattgtactctgcattacacagtgtggacgacccaaaagccgttaagcttaatcacagtaaaatctccgttgtatcaactcagctgatcatcgacaacataacccgactcaaagcgctggacatcgttaaagtcaattatgatgattgcacaagtgaggtggcttttgccacgaaactgggaagcaccgttgtcatacccaatgttaaagcgggcgtcgtctcctacagtacttacaagatgtcgtttgggtccttgataagatcattatgtgcactattaggcgcctacaaaaacttagggaactttaaaagttgtaaagtggcaaagtgtgtgaacggtataggtggcagtggtaaaaccacattaatcagcaagtacgctgataaagccaaatgggcgctcgtgtgcaaaaccaggaaacctttagaaccattcatcaactgtgggttcaattatgttggcacactagaacaagccaacatcgacagattgagatctaactacttaattattgaggaagcttccatgatgactcgggttgacttgttgaccctatgtaatgtcccacatatggttgtggaatgttacggtgataaagatcaaatcagcatcattgatacaagtgacactattggttataggcataggaaatcattgttagacttgtaccaaactgacaacttgactcacagtttccggtatggcaacccattggcatcagaagtgttacgcatcgtttaccccgacttgactagtgaagaaggaaaagtaactaactacactaaattgcaaagtaacgagttggacgaagtcagagtgttcgcaattgagtacatgatagacgctgtgtactgtttctatgatacccactaccaagccatcaccagtcttctggctgatctagaagtgaatgtgtacaaaattcatgctgaccagggcacccaggcaaaaaacgcactagtcatatattggggcaaagacacgaatgtaggttccatcctaactgacaggaaatatgtcaccactgcattcaccagggctacagacaacttgtacgtcctcatgcacccagacaacacggccagtataattgatgtggtaacggcgaccctcagtggagctggaagtaattacacagaagaattcatcgacatggaaaactttcgtctcaaacgagagcttagcacttttgaagttatgattctcaatgagttcatgaaaaagaaccattctggtgtagtcgtcagtgtgtctcgtaactgcatcaacatctccaccaaaatcatactaacaaatttgtcatatgacatcactctggacggattagtgtgcaacaacctggcatctagggcactgattaaccaatttaaggctcggttcacagaagtgatgtccaaacaaacggacactacacaaaaatacagacagattgaagtaacattggccgacacaagtctattgtctcgattcaaacggcgtgcctggtttatgtcaacatattactccgctaaggatatagaagagttggctaaggcaaaggtaactgtatctatgccaatgcaacacaactcgaactatgcattgtccatgaaagcctggggcagacacatcctgctggctgactacgtgttaagtgcatcaccgacacatacaccaatacaagtgaacaccgaatttgggaattgtgacgtgaaaatttttgacggttgcagcctgtattgtggtagcatttggcaattcgataaaactcacatcgtgtatgtcagtagcgctcactctaacagtgagggcatcctcacacatttaactgcaaacgttcgcaattttaatggtccaaaaaaccatgtcaaactagttcaaaggttgttggacgacccggctagtgtgttgttcccaccactagaaacaaatttcgtagtaagcagaatagttgagcgcattagtaacatgttgacaactgcgaccacctgtgacaacccgtcattgacagcaggcactgcattcaaagctaccaaccaggccctaatagacgaagtgtctaatgagggctgcccagcagtgttccactggaccccaactcaccaacgcattaagatggttgtttgtatggatgaggatggtcacacagtggcatacccaggtaaaaggaggataagtgacacagcacacggcttacgaatggtgttgggagttgcaggcatggaagaagtggaactgaatagcttaaatcggaataaattagacaaaatgttggtccggaaaatcaaagcagaattcagtgaagtcaagtcaataacaatacctacatcagtcaaagaggatttctccaacttcatcaatgacaacctcaacgtcgtgaatgttaacagtattgaccgaccagctgacgacgacactattggaaccattgtcaacgcagttggaatggtacttttggacaaattgttccgagtgccattcgccgacatcaaaggtgtagacgcaacaactatcatgctgcaaaatatagaaggttacaccattgacgggaagacattagaccctaaaagtaaaagattgttggaaaatttcacactcgggaaattggaagccttaggtgaccggctcaagaaagagactaacccagacagcaaattacacatcacccaaaggatagaaacattaactcaacatggtcacttacgaaataccaaaagtgcaccggttttgttcataggtttgactagtgaccacaaccaaattgaatcataccgagaggtttatttcatgcactgcactggacccggtgcaggcgtgactaccatcgacaatgttcactacttgtctggcagcaatggtcgatatgtgtcaactaccccaccagacaggtcggcaacgctatacaactttggaaattatgcactatgtaaatacacaagcgcaaaaccccatgtccatcatgtgaagtcatacctcacaaccaacaagatacatcggttcaggtacccagatcgggagttggccgatgttcatatcccaaacaacatatataaaagactgctagctcgtagcctggcaagtgactgtgactttgaagacttgttggcctatgcacgctcattgtgttcaacaatgatatacactgcccgaggggcctctatgcaatacaaaatggaccaatttgatgtacaacaatattgtatagtggtgatcaatatagcaatgcgaaacaagaagtacttaaagagcattgagcaattcacaaaagccaatgtgatatcagaggacagtgaattcaacaaggttttcaacaccatcaagtctgtagttgtaaaagagctaattaactacgtgacgacaagtaacacatttgaaatgtttaacgaagccctcacataccagaaaaaccacttgccttcatggttcaacagtttcatagacgtcatcaaagacgttcaaatcatcaaggaccaaccggtggatcactatgtgttttatagtgcaccaaccccgtttacaccacattcaactggcacacctgaccacccagatgatgatgattatgacacgtgtgaagatgaattcgatcccaatgataatggagatgaacggggctactatcactatcccgaaggacaatccaatgggggccaatctgatggtgatgaagccatccaacccccaacagtggaccaaaaagacccaccacgtaaaacacaatacacccgagaggaacttgaaaaattcaccatagagaacattgtcacccagcttgaaaagaatcccttcccaactgacgaagaactagaaatcctgttccaagaacctaaaccagtggataaaggaaagaaaccaatgtattcaccaccagaggtgaatcttaacctacctgaagaactacctgagtcgtccaataagcaatccacccggcctgaagtaccgacacacatagtaaccatcaaggatgatagagtcgttaggaaaaccaacccccataaggtgccggtctcacttcctcccaacaaacccaccattttgctagtgtatgccggcagcaatggcgaccacctgccaatgcatggcatactttccatggttaaagatcacatggaagtgaccatcatggcgccagctgatgtggccatccctaactacaacttgcaagtgtgcacttatgtggagacgtattccaccttgacaaatgctcacaccaacaatcgtacccctgattggtccaccatcgctgaacacaccaccaaagctctgaggtgcgtgaactgtttcaaacccaatcaatttgactacgtggtaggcctcttctttagcgctgaagcccatttagtccatggcagacacatggacgtggctgtcataccacaatttggaccaattatggaacttgacgagttcatccgcatcggagcgttcaaacaaggcttgctcaacctggtcactggtgactctgcggtacaagtggaacgggtgtggagtgtgccatctttcattgttgatcataacaacattggatttcccatgcaagaggacgagtttgaaatggatgctaacaccaaccgtgtgattgagttctgttatagattaaatgcccaatgtacattggtcacctttggttccatggtgcctgacaactacgccacacgaatacagtccatctgtgctggggttgccgggcccttgctagtaataacgggtggtgcgtcaaaagtaaacatcccattaaaactaaggggtattgaatgcaacacccggttgtcaacccagtcgcaagacatgttgatcatccctagtgcaaagcacaaattgttgaagaatttcctgttccatgcccacattcatggtggagctggaaccctaataacattcatgatgttgcacgtgccgatcacaatatacccaatagcgtttgaccaaggacgtaatgctgaatggtacaacagcataggtcggtacatttcaattgacggtgacagcatcacgaaggagctcaactatttcagggaacaatgtagtgcattatttaacgttcctcaggggaggaagattaatgtgtcttttccattattgcactgtgtgtcccccctcatagatgacgacaccaccattgctccctggaatttaagacgtgtcaaagtgcacaagttccatcgcgttgagatcccacaaccatcagattgtgtactgcattccatgctatattgcattaatgatgaagccaccaaaatagtcgtacgaaaagcatatgaagacacggcttcagtctgtacgatttgctcaattggtgacataatagcactgtgtatgattgccaaattgcaatgtctgatctcggctatcaatggtgacacgtactatctcaccaacccaaacatagctgattgcgttagtctgttggtcaacgctgatgccacacattgtgatgcattgtcaaatgtggaatttgatgaagagtcacatgacatgactggtaactacaactggcaaaattgttggtacgtactcaatgaccccactgctgtgtgcaccttagaagaactgacagaatcagtggtgatgggcaaagttggaaccctctcacattactttaagcaatcatttgacgcacgaaaactgttgttaaccgccatgcggaaagccaatgtgatcagcacctacaacactaaagcagtgaatggcgggtggattctgtccgacatcaacatcccaatagcctcttggtactgtttgactgaatccggcatcattcgtgcaattagcttgaagaatcaactgaccaacgaacacaccatttatcatggacgacagtacgcagtgcaatgtcggaacttcatcagggttaacacgatagctgaggtgaacgtcaaccaattctttaggaaccacttgatcacaggtgatgtgtgcgcaattaacgcgatgacaaaaaaatactgcctgtcaaacgggatacacgtggtgggcacatcgattatggacagcgatgttctgtacatttactcaacctggaaccgcccacatcatcatgagaaagagcgggaagtaataatgaccgcaaaagaaatccgagtagtccccaaacagtggggcccaataagtttacaacatcttaagcgtgaaggcaaagtccgttgtatcgcactacgtggtatcaaacggtggtgtgttgaattggccaaccacacggaccccttgcaccctttctttgggaactgggaccaattggtgaccaaatattcgggcaacacttacgtattcaacttgaagtctgactcccaactttttaacctggagaaagctctattgaaagtcgatgatgcgacttgtagttacgctaatgtcacagctagaggtgtgctggaaaatgccaccattcctgaactgatccggcatttcaacataactgatgaagcctggttgactaaaaaattgcaggcttggtgtactcgtcacaagaaagactataatacgatcaaattgcgtattgtgccaattgcttgcagtgtggaaactctgtttgacgtctaccaaaagactgtgtggactattaatgacaacctaatttttgcagaaaacctaacttgctacacattcgaggtcacgggaactgggtggaccgaaagtgattggggttcagagttgttcaaattcaaatctgaggacaaattcggtgtactgcaacaacccggcaatactggaaaatcaaagaggttcagccaagtgggtataccccgagaaactatggcattaactcaattttcaactggtgaccacaggacacctttagaattgcaagcctgcactttactgaatgaacacacggctgacgctgatttcctcacaatctatgatgcaaatggtgtgcctggtgatatagaaaccatcagggcagatgacatccctgatgcgaaatcgatggattattgggacaacgaggggatgctcgacaacacgatacatatgccaacttccaaattttccataaaaagtagagtgcaacctgttggaattggctcgtccacaaaagtaaggatggaggagtacccagtgtgcgccagaccatcattgaccaaagcattcgctgaagagttgaacagcgtgacgttgaggcaaggtcaacatcaagacatcacaaaaaaacccatagtcccaaaaattgaattcgctctattcaaagacaactattacaagccagatcatgaggcgttaagtagactgtacagaagtgatgtggttggaatcacttatgaggggattagagattgggtgaaacagcacaattacccggatttcgtacttaaagacatcgagaaaatgattgaagagtcttgggaactcaaccgtattaacacagtgttagtgcacggtaaaacagaacaaaccaccaaattaaacaaattgtcaagatggtatgacgaagtgaacacacgtagcattatggctggttcgtatgccattgcggccatattcagtgggttcttcaccgaactgaagaaaaggtttaaagacgctttgaatgagaaggtgttttatgccgacgggtgcacaccacaacaactcaaccgcaaggtggaaagtgttggtcactttaaatatgtggtggaagatgacttagaaaaacaagatgcgcagactttgcatggtgtcatagaaattgaaaaactaatatatgaggaccttggtggtgacccagatgtgattcagttttatttgtattgtcaccataactggcactggagaggtcatggttctagtgggttgatggatgcaatgcgcttgaccggacaatgtaccactgcaatcggtaacgcaataactaacttgattgtccatggacggttttacgcccggaatgagcgcctgattaagttgatgatgattcttggagacgacaatgctattctatctgaccacgagttaaacgttcaacaccacggaacagaatgcaaagaattgttcaacatagtcagcaaggttggacaacgcgagaaggtgggagggttcctgtctatgctcgtccactgcatagatggcaaagccagtgtttgccctcacttccgaagactgaggcataggttctcagtttgcaatcacacttacagtgctgatgaaatgtcagacaagctggacagtcgcaccttgtcttacgcagtcatgctcggaaatattaaacaatccaaaaccatagcacatcaaataaatcaagggattaatataccggactggtatgacatctactcagccattcaagccaatgcactatatgacagttctaatgaagcgacagtggaaaatcacattgccaaactattacaaatgatggaaactagacaacctttcataaaggaattcaagcattgggtggaaaaagatacacagatcttaaaaccaagaattaaaaattaaattaatatcgctgggtgaaagcccyatcaacaagctataccggactggtatgacatctacccag

SEQ ID NO: 889 - DNA, 15098 bp, Lagenaria siceraria endornavirus-Hubei
  source 1..15098: mol_type = other DNA
gtaatggcgttctccattactcgaattacaccatcttatagtctgcaagttaacggggagagacctccattttggaggtctctcctcaaaaaattaaaatataaggagcaaatgcaaatgaatacagatgcaattactccttataaaagaaaatataaagacaaacctcttagacttttaaataaagaattttcaaatcatctgcaagggtggatcaagttgccgagaaatcaatcggtgactattaataagaacccgtggatcaaaagctttcaaaaattatttaaggataaacgtgaacacatatttgataacaacaagttgaaattagttcctgcgattagaggtgaaagaaaaatacgagataccgtaggtactgtggccacaaatgttacttatgatgatggtttaggaaatgttataaatttcaatgaattgcacccgatggatgtggttaaaattttatacaatgtcaattgtctcgggattgaattatggaaatcagattactacacaattcaagactatatagacaaagtgaaacacttagagctggatgacgatgagaaggatgaagaagattttctagatgaagatgatttagatgataaactaataattaaaatggtgaaacctggaaggggaaattgcaccagtgaaattttgctagctttggataaaattctcaagcgatttggtggatttgaaggttattataattactttcttgaaaatcatttcaaacactttgggtacttggaatgtgttgatggatcgtacgatttccacagtgtcaaattcaatccattaaaggtatgcggtgtgtgcggtcgagtgaatcattataaccaattcaaccgaggattgcgccaggtacattattcattatctcattataaacaaaaatcaaaagccatcaaagaagactttctcacagagtttgatgaacaccacaagcccacaaacataccgtggagatgtggttattgcttttccgatttgaattacgtggtactgattgagaagtacatgatggtcaaattgattgaatatgtatgcaatcatttgtttgtgttacaaggagatattgaacagttaatgaaaatcggttatggtgacatatacgaggatttagatatcaaagataaagaagcaattaaaagccacgatgaaattgtggtgaataactatttctatcacagccaaagaaaaatagtcacagtcggacaagattttgatgcagcaagtcatcgtgtgatcaacgatgtactcggtggctgttactttagacccactagcaaactaaacagcattaaacctgaattcatagcagaattgtcaacattctcggaaataattgagagaactctcgtcggacgagacatcgtgtgcttgggtaatgtgcttcctggcacaaatagaacaaatgtacacaattggtaccacaatcaaacatggttttcaaaggacccagaggtgatgtgtagctcaaaggggatatgtggccataataaaaattactttgtgtatggaaatgttggtatgatgggacaaccacttaataacattttaaatatagtggaaggacaacgagcattacagtttataacaccaattatgactgccacaaggacgctaccagatagtacgggcatgttccaaagaacagaagacaacttgaacttttatctggatggaaatcccgtgccaattaacttcatgacggacacatataatgcactaaataattatcaaattatcaaatgggacagaaaattgttctacgttgttgaagtaaagaaactgaacctgacaagattaatgacgatagttggaccatttaatgacaccatagattacccaaggctaatggttgataatgagcggggaatcaaaattcgtatcagattacccgacatagacagcttcatgggtaaaaccaaagggttaaactatcaaccaaaaacatttgaattaaatgtgaatttattcagatatttgtgcatgcggaatctcaatagaaaagtgtcccacgaaaccctcagaccctatgcagtagggttttcaatgaggcgatttgtagtccacaataaagtaatatcaaaccccactatagcctatgaagacttagacatgcatattatactgagtagagtgtgcatgatgaagcttaagaattgtttcgagataagccacaattatagtaaagcgttgaaattactaggaccatttagaagcatggtcggtgatatggaaagtgctttgaccgcatccatgataggactaataggagaaatattggagaacacattagggttaaaatgggacgctgtattaagtatgttggatggagctagactacaatcaatgctaatgggcgttggaaaagaagatttctgggagcacctgttgcaattaaccgagaacatcacaacagtacctcccaaaatcttggacatggagcggcacacagaagaggaaatcacgtttgcactgcagaattgcatgcatcattccatagaatgtaaccatgttagagtcaaagcagacaacaggtgttgttgttgtaatttgccaataacagacgagttattctgcaatgttgtaaacccaaacccagtcagtaacgagccatatttcacaccaaatgtctatgaagtggagccggagagagaagaacaacaaataggtaatattgaaaaagataaaatagtggacaatttggccaacaggataatgttggctatgagagacacatctataagagaccgacgggtgcaaccaaaggggccgtataaattaccactagaacaaccaccagttacaaagataactccagataacgcaagaataacagaaaaagcaaatgttgaagaatctaaaccaactgtagacattaaggtgaccaaatctaaaacaagtagtttcaagtctaaaaccagcagcattggagaaccaccccaaaatgcagagggttggcaaaaagtgttaagacgaggaaaggagaaacccactgatatagctaacgctatattagacaacataatggagaatgctgaaagactcacaatctcaacagacaatgtggaagcaattaatatgctaggatatgatttcgtgcgtcattgttgtgaaacagtgcagtacgagaatgatttaaataatggtgtgaatgagatttattatttaccacatttgccaacaggatcattgatattaccacgagatagttttgagatcattgataaagtttacataccaaattcagggccattaacatgcgcgtttgatgcttatcattttagtactgaaccaggaagcctacaagaaatgattgacatcgtaggggctcaaccaccttttagcacggaacatttgagtttgtatgccaagtggaggaaagataacatcatgattttggatgacaaccatgtgcatgttgaaaaacacaatgaaagtagcaacacatttgctgtgattcaatttgagcatggagaaacaaatgcggatataggtcactttttaccagtgaccatcaagcgtgtgaaaccaactccaatctacttctatcacagagatcccaatgccatagtagagagagatcacatagtcaaaaaccggtacgggaaaatgtatagttctacatgcttaccgacttggagtccaaaagacaatttaagttgtgagataacctatcacaatataacagtagatgttagagtgagtgaggcaataaaaccattaaaattagagaaaattgagaatgaatggtatttgactaataacctagagaccagacttcatttaattgacaaggagaaaatccatgctaagttaccaaaaatatttgaaaaatacataagtaaaatagagtatggacttgcgcttaaattacccagcaatgaaattgaagaatatcgtcatattgacaaagaactcccagtaaattatgagactgaattagaagcagaactactcgagattctaagagtattcgcaaggttgagtgaactagctggtcaagtgccatttagagatattaaacaaacacaccaaggacatattagtagctggtttgggaaatccaaattcagcatccctggtggcaaaacacataagatgaagaaaatggacgttgtcatgctgaagatccaaggaaaatggattaaatccacaattgtggggtttgatagaaataatcctgttttagattatgtagctgtgtgtgagcaaagggcatcactggtagagttaaaagaatctatgggtagtcaaatcagagagttagttggtttatgccaatcttatgtagacctgaaaacacttaaatcaaaactagcagaggctaaatttctcacgggacctgccgggttcggaaaatcaaccaaaataggccaatcagccgtacctggtgatttgtgcgtggctatgaccacatcagcagttaaggcattgcaagagaaagtcactagaggagtaaaagtcatgactctggaaagagcattgtattcacacgctaaaacgggtcagacgctattcgttgatgaagcaacaatggtcaattggttatttttggggcacttgatcactgaccaaagcagaattgaattatttggagctgaaaatcaaatcgggaaaagagatatgagcaaaacaccaggtattcgctacaatataacattgtctgatttcgttaaaccagaaaataaaataacagaacatcatacttatagaattggggagccattggttaccctattaagatcagtagaaccaaaattgatgacgaaagcatcacacaaaaccacttacaccataacagtactcgatccagctatggttgaaaacatcaataacattgttaaggatagaaaaccagaggtgattatcaccccttattcttacaaccgtaatttaatagaacaatttttaaaacatgaaagagtgccagttgtcacaactcatgcataccaaggggttgaggtttcaagatcaatggtggtgcttaaagcagatgctggtaatagatgggatttaaatggacatccagaatacctaaattctgcattgacaagagcaaagtaccatgtggacattataatatacggcaattatactgatgtcaagtccttagaggacatcatgactcaggtgggtggaatggattatgaatatttacaatatttcaatgaaaacatagaaagcgctacaacagagattgcagaggttaaccaatctaatgaaacaaacaaaggcgacaaattgactctgaaaacaggaaccgcactgcctgacgttattactataaacaccatgcatgaactgagtgaggaaatggtcaaccaactcaatgagttgaacatttcaatgcaaggtgctaaactaacgtaccaaaaattgcatgagggtactagtgtgacaacccaatttgctggtgcaacagtgagcaaagtaactaatattaatggcattgtgaatgtagatgcaaacccgataataaaatccaaaattatgcaaaatttggacacaccaatagatgttcctgagttgatcaaggagcaagtcgatgggaagagtcaatctatagagtgtaaaatgacattgcgacaaactaataaaatcagagaattaacttggattttggataaaaccatagatcgtgaactcaaatgcacaatcaatggcgttaacataaaaatgactaaaacagcaagctgtcctttattcgcgggtgtaacgtttgaaacagacacagaaaaattaaccgtatcaaatggctggtaccatgtcacaaacagaaaagtaacaataaacaaggagaggttctatccgggattgacaccgatcataagatggttacaactagacataaaagaattaatattggacagtaacactaacatagggtggttgcaggtactcaagggtgacatggcacattttctatggcagctgaaagaaagagcaacacaagtacacttgtggttgttgaacttcttgacagaaacggacagcccaaagtgttattacaacaatataatcaacacagcaaaatacaataaagccgctcgatccattaatcaaccaatggtcaccaaccacccgtcagttgcggatcacttaaactacatcataaagaaacaaagttggatcaagaaacacgacacctacatactcactaatggtaaccaagtaataattgacattaccagcaatgaagaggaagcaaaatgggaaatttttgctgtagaatgtctagctgatatggtcaaaactggaacaggcatgcaaggaatagcagctgcagaactggacattcctggactgatgatccccttgcacaaacatttagcgctaggaacaacagtacaaactatcatcaacaataatctgttgaacctaaataaacaaacaagaccaggagtgtatgacgtcataagactagataaacaaaactatgcaatgcaaaagcattatttgaaacaccgttatcctaggatgactataacatcaggtaactatgagataataaattctggaattgaattagcactagagcaaatcttacttaacatgagaggaggattaactgagaatagtactggtattgtagcttattgtgggttatgtccgatatcaatctgtatgacaggtaaatactatattaagattgtgttaccagacgtaaactcaaatatcagattcatgtatgacatgcaaaaacctcaaatagattcaatgctggataactttaatgccaaaagggacgcaaagactgagttgtattgggatcacgaaactaagtgtgagaggatcttagcaggaaccagtatttactcactgaccttagaagaaatactatatctactggacaaagcacactgtatgtatgggtggataccaacctttgctagagacaccgacgagtatgtgtatgacagacaattgtattgctacgggtacagaggtggacgggtgactaacaaaataaggaacgacataattgataaagtaaataaaggtgaaccaatcctaatcaaatatgacaagaatgaatacttagaggcaaccgttgtgacagaagtcttcaaccacagattgattaaattacagttcaaaccgataccagtttgtaactatatagacagacgcttaggaacatatatggatataaataatattataaagattaagataccatggatagatttggacttatttagggtcctcaaagatagacaaatcatcaccattaaagaattgacaataaacaaacggttcttaagaaacattctcttacgtttaatgacaggtgatgacacgccacacggggcattggagtacgccaaaactttagaatccacccaggtaattacagaaaaaggaatagatgatttaacagccagcaatctgttagtcacactcaataccacatggtatgccatttatattcataacaattatctagagaaattcaagactctaatacattacttaaattatacagatggtaggccagttgcagttttaatgctagaacaaatactgactggtataggcaatttaatgggaatggtgtcagataaagtctcagacatagcagagcaatttataacgtacttaaacaagaattacaatttgacaaacaaaatggcagattgtataagagaggcggaaaagaccaattggactccagaaaccaaacaggtttactttaacagattttacttctcaaaagatgatgaattcacgttacgatcttggatgacaggggatgatgacaataatgatgacgatgacgatgctggaaaagacgacgacaacgtgacggaagataacaacgatattataaccaccgattctacatcacttccaaacattggatacgaagggccaggaacgtccgctaacgccgaggatgtaggcacaagtacaacagaacttcaagaatcaagcactagcacaaccacaaacgatagcgatgatagaattagaaaactgatgatacaacctggaaaaccatataaaaacacaagattaccaatacaagtcatgcggtttgtcgatgaaaaaggagcaaccattattagtaggaaacaaacgattggtgttttaaagactttgcaattgtacggtgatttcaatgaagagcagttaatcaaagctgccaaattaattgacgaagactacatggtgcatagggacttgttgcatgcaccctggaaccttaaaacactatcagctaaggttgaagacgctttaggggtttcactggaaaggaaatacaatgaagaggaaccgtcaaagtataatattcaattgtactctgcatcatctggaagggatatcaatataagttatagtgaacatttcatgatacccaaaataatttggttttactggcatgagacaagtgtaccagaacttataatgagatgcatcaattcttgggcaacatttaatgatagctatatgattgtagtgctgacaaaacaggaattatcccaattaataccaaaagagataacagattatgtggagaatacgacaccccaattcgcgtcagactgggtaagaacgtttgttttatctagatttggaggggtttgggccgatgcgagcattatatgtacagggacaattgacaggttggtagaaagaactttgcaaaatacgattggattattacagataagtctcgggagcaaacaagtgaaaatcaaaacgagtgaaaattggtttatcatctcaagcacatacaacccaattattactatgtggaataacattttgactgacctgatgaaagaaacaaaaccaagtggagaagggtgtagtgtatggattaaaaagaaataccccagtgaatactctaaaataaccaaaacaatggctgccgatagcgtggactatctaagatcctatgttctagagtcgattgttagccaaatcactgggttattcccagaaacaatatgtaaagatgaagggcaactaacaacctttgatgatttaccacattcgaattgggacaccctactagaccaatacacgacgaaaactaaaagaccagatttaataatacctctagtaaaaatgatagatagtcacagaataatcataactgacgcccttctagatggaattaaaccggaaacaggaagtttactacatgagatctatggtatggacttcaatttgaaattgcacaccctacaacaggtacaagaaagactaagtagagcaataaaggagaattttgaaccagttaaaaaagaatttgagctaactagaggtctccagatttttaaaacagaattctcgtatggcatggcaaaattaaccagcatgttaaataattcaatgactgttcaggaaattcaaatggtcaggccagcactggaattcttggtcaagagtggttgtcatttatacatcacagaggaagagttagtgattatgttaggcatggtactcgggaaaatgaaacacatgaaagatctacgagaagagactcagatttgggtggttttagaacacatcacggatactaaacaaattgatttagagaagtggtttgaaacaaatgaattaacaacaatgagattgaacgtgagcaatagactaccaaccaagcctgattacgtgacacacgggaacagaagaataccaaagatagtatggtcatattgggataaaactgaggttgcagaattccaggtaaaaatgatcaataactggtattatcacaatcaggattatcgaataattattctaaacgaagatactttgttgaaaatggtgggcaaaaacacacacgcattgttaatgcgacaaacaccacaattcagatctgattgggttaggttattcatcttaagcaattttggtggagtatgggttgattttagtgggttattcacaaaatctatacataacttagttgaggcgacggttaagaacagtgctggttattgtcagatttcacttaacaaaaggactgacaagaaaattgtcctggaaagctggctcatcatttgtgttgagaattgtaaaacaattcaaagctggtttgatgaaacgaaggaaatgacaaagttcgtagatccatcaggttacaatgcattagaatggatgaccagcacatatggttcagagtatcaactagccaaagagtacatcttgccaaatttaaggacttatcttagggtgtacattatccaagtgattgttagactaagggttaaagacgatccagttatcatttacagtgacgaagctaatgtgtccatgttccataatttatcagctaatgcatggttgaatttatgggattatgtggctacaaaaccaaaagttgagattgatgttggtgtgcctttcataaagtggataggtattcaaagaagcatcataatagaaaattacaattgtcatcatcacaatataacgccaataagtctcctaggagaagagttgaattaccccagcatcacatacaacgtgatgtctaacgcagaattaactttaccaaatagagaaggatccacaacgaagaaaaccaacaatattataattaataaatataccaattgtaagactttgttaatatgtgtaggaagtgccggtgacgtgttgcaattcaaaacgatttatgagatagccgacagcgaagggcaatctccagtaatcataactcataaagaccattccaaatatttcgagaacaagaaagctcattattttgatgttgagtcagaagaactaatggccttagtgaacattgtgttgaatgaagttgacttatggatggacattaaagctagccacctagtgagacaaatttcagatgacattacagcaatagcaagaaattatgaacaaataatagagaaagtaattgtgaacagtgcagtgccaaacttgacagagctcggtaaaatgttaccatgcgactggttggaagtttcgacgtttacagataatgtggtattcaatccaaagaaaaccaccggacttaaaggttctattttaagagccaaggaatggttacatcacaatatcattaaaagcgaacttaaggaggaaaatgtcaggtcactgcgtaaattttgttcagggtatcccttattttacccatatgtaatgtcagtgtgtggaccactaacaatttggagtatgcccagtaatcacaatgaaatgataatgagcgaacaagacgtactaattacttttggaagttgtgataacacaataaccacaaagagcaaaatcaaattaatcgaaaatttcatagactgtggttatagagttacatatcacgataaatatcaaatagcagtaccagggtcagtgttattcaacgctatggaacaatacccggggaagtttggaatcgtgaataattacgacttacgaagcgtcaaaggaggaaagtttgtcttggtaacacacggagggcacggaactataatggaagcattgttaacgaattgtaagataatgatccaccccataatagcggatcaatttagcatttgtgacacaatggtgcaacaaaggatggcagtgaaactgactgacataaccaacgtcaacgattgtagacaagctatagcaggtttgaataggttgattgacacaacattggcagtgaaaccagtcatatcagtgttcttcaaaccgttgatattttggttgaaaccagaatacaaaattgatagtccagatgaaaccttaaaaatacttgatgacgccgaagttatgggtgactatgataacgtcgggagcggaatatataggatcttagatgtagaacatcaaatactgtatgaccctcaagtgccaaatagatgcgttacccatagcttagaatatatgttacaaggatcaggacaagaaaaatatttaacttgcaatacaatcgctgtgatgaggttacaacagcactcagtaacggagcaagagttaattgacggagttttaagcatgggagttaatgtgattttggtgtacagcaacgggactggtttggtagttaaaacaatgaacgggccgacaatgtgcttttatgttgatagaagtagaactccatggcatgtgtgcgcagctaggttggtaaaacatggggaagtcatagacttaatgaagagaaatgccttcattagagaactgccacacagtattgactatgagatcaatgagttgcacaagaatttctcaactgcgatgttatgtatacccaagttaatggctcaacaattcgggaaatcgtttttcaaaaatttcttagctcgtactaaatcaacgaatctacaggtgctttcatctagaacagatttacatgtggcttacataactattaaacagcattttgacgcatggattggggacaccatttacccagacacaccattaggagtgggatgggttattaccgcacaaggatgggtgctagcaaactatttcattaaagatggcataatagttgtattctcagacgacggaatactcgagcaaacaatcttgatcaatctgcatctacagtaccctgtagaaagatcaaaatcagtgatattgtcaaccaaacaagaattggttagtttgaacaaaccaactatcatgtacactacattaaatcattgtgtgccaaggtcaagcaacttagtttccaatttccacaaacaaaatattttgatagtggctgattttgataacagaaaacatcatatgtttgatgaaatggacatgattaaaagagcagcaaaagtgatttttcatacgaataagcaaattaaggtggaagatctagctagcagtcataatgcgccattaaataggatggtaatcaaacaaggaaaagtgttgtatgagcatgagttcgaagagaaaatgaggcaaagacaagtagttaagttgttcggacttaatgtaatgagtgaacaacaatgcattacggcctcacccttgacagaagaacaaatcaattacatatacaaatattttgtcaagagtggtaataaactcgtggcaattgataatgaaagttacaatgacaaagaaattaaaccaagcgattgggttataactctaatccaaaatagcgaagtaatgtcaaatgatgtaattaataacttaatcaaattagtcaaagaacattcaatgtggcacatttatgatcaacacaattatgaattaagtatgacacaagctggggatgtggtaacactagaacatggagatttatgggttaaatcttatggaatcgttttggtgtatgttcgagttggtggtcaaagagagagattaagttggaagctagacacagacagtgcccaaataaacaatccaaaaccaggagactggtggggcttagaaaccaagacacaaactaaagtgaacagcaatttcaagaatgtgttggcaataaatgagttgaaataccatgaaccagaaacattgttagtagacgggtccaatgtagtagagagtgatgatttattagatatgtacatcccaccataccattatgggtacacaggcagtgtcatcgaaccattgttagatttcccagataatatagcaatgcagttatgggaagatacagatcaaaccgattggctgtcattatatgcacccagcaaccaatgtcagctcaaatcaagagaattaccagggaagataatccaaacagagaagataactttaacaaaatggccaatacgcagcagagcagtgttaacaaaagtctgttttgaagaaggaaggagtattttgggtagaatgaaatcagttgcatttatacggactgtgacaccagacccttacaaattagtaatggatatggcagacacttacttcatcaaaggttgggttaccaaagtaaatgagtttagagctaaaaggttggtgattttaccagaagacgtaaagcgttgggtggaaactaacaaggatgcaaagagaatagagcctgagttattggaattgttgagtggtgaaatattagtaaaaccgatgaatgacgtaaatattcatcttaaactagagagtctgttaaaagacaacacgacaattatgacgaaacaacaacaggctaggatcattgtttggcaacgaaaagctgtatgcgcaatatattccaatttatttgtgaaggtgaaagataggttaaaatctattttgcatgacaaaataatttacgcagatggattgagaccagatgaaatttcagctagagtaagattatgcaaagacatagctggtttctttgaaaatgacttgacaaaacaagatagacaaaccgacgcaccgattataaccactgaaatgtacatgtacgacttgttaggagttcaccctaatgtgatagcctcctggagagagatgcatgaggtttggagatttaaatcaaaccattactggggacaaggtcaaggtatgaggctaactggacaagcaactacagctattggtaattgcataaccaatttgcaagtgcatcaggaattcgtcaagaaaaatttctcaatcttagagttagctttgtttttaggagatgatatgtgtatggtttttagagaaaaaccggacacaaaaaatctaaggaaaaatatagcaactaagttcaacatgcaaagcaaagatgcatggtatcgaaatggagcaacattttgcagcatggtcatgagtcgcacaccaacaggcgctgagctatgtccagatgtggttagacttaaatttagatacgaagtgaccaatggagtgcatgaggcaaatgctgagaacattcttatgcgaaaagcgtcttacatcatgatgttaggtgaaggcccaaatgtgaaggagacggtcacaaaattgaacttgccgattaaaccattagtctggtatgactttgaatccatgttaagggcggttggagacaaatatgacatgtctcatgtgcaggtgttagatgtgtattataacttactacaaatgctaaattccgagaagttgtataggcacacatttagacatttttccaacatagaaggaaagtaatggaaggaaggataattttttgaggaaggtgtatagaacaccccccccccccc

SEQ ID NO: 890 - DNA, 16176 bp, Lonicera maackii endornavirus
  source 1..16176: mol_type = other DNA
agttggccttatttaaacatgtcaaacgatccagcaaaagttacaagcacatcacacacaaaattaacggaaccttcccccaccgaggttccgttattaaaagaaaagaagtggtctaggccatcagttgatttaggaatcgacttggataaaccaattaaaagagaccttatgacgacaggtgccatagactgcttcctaacaggtgggataacaacgaaaccagttgttaaatcaggcaagagcaatcttgacagatttaatgaaatgagtagtacactcttcagatctggaatgcacaccagtaaaaacttctccaaaactgcagagtttgggggaggtttatttggacaaaaaaaaagtttgaatgcaacaatacacagagttgacctaaaattttgtcacacccagcgcagagtgttagaagacataactaaaactaaaccacaacaaccaagaggttttaacctagcaaagctgaaagacaaattttgttgtaatgctagtgctgatagtaacggaaaattgattttagtgtgtggcgattgtgagaagtgcaaaattaacaacaatatgggaaacaaagaaaggttgccaagaggtcgttttagagttcggccgctaactaaatacaatggaactgaaaccacagagaaaccacaagagaaacgaagtcaagcggtgaaggagagatttgtgaaatattgcaggccaatatacaagttattgaagaaaaatgaggaaacacctgtcacattctcaaatgacagactccttgcaacaggaatatatgggactactaatgccacagttaacaaggaaagtgacatgttaggtcgtgatatgggactttgtattgatatttgcaaaccaggtcttggaatgataaattatgttaaatatggttacaagaataaactattgacgcattatatcacttcaaaggattatgaacagtacaaaaaatggctcaaggaaggcatgaaagacaaaacactaaaaattacagcagagtctctcaaacggtgcacgcatttataccccaaggacgacaatagacatattggcgggaatttattgtacaaagccataatgttgctgattcaaacaatcaaaccacaaaacctgaaaagattggttaccagtgaaaccggactaaccatgaaacgggttggaaagaagaccgtaatgaaattacctaaaatggagcatagaattacagatggttatgacgggaaggaatttggaactgcaatgcagggtcatctaatgactagagaaacagttaaggcgatcgatggcccgatgttggacagagtgtatgggcacaaatgtaaatactgtaaaggagtgaccataataaccaatggtcatacaggaacgaattataatatggctgccacagttacacgtggtagaattttgaatgccattaagtatgctgtcagcagtgacaagccattggcagaattgtatttagcaacttcgatagtgagagactattccaaacatggattaaacaggataaatgataatcacatggagactcattgtggtttttgcggacatgatataatagaagacccaccgtccttaattgaaaacattgagaaattattcgtagttcatcatgtggatgtgaagatgggattactccaccaattggaaaggatgggttacttggatggatcgacgttagacgcaacaggggaaaagaacataattcaacaagacttgatcacactgaaacatcagttgtcgagaatgagacaggacgtggttttgctcccatcgagcatgtcatctgaagctttaacaacgttaaatagagtcttaatggaactagaaatgcgaaccgatgtggtaccaagaataaatgaaagttgtacactagggacgacaagggccctattatcattggcaagttcgatgaatgaatatcaaaatacgtatttatatggtgactgtgacttagtcatagagaacgctaagtgcagtaatttgtggcaattcagaccacaattgtactataataaagtaggtgaaacttacgagaaaatcaacaagaaaaatgagaacaacatattgttgttcgacctcaacatattgcgagttgaccctgccgaactagtcacaactttgattagtaacggagtagaaacaatgtattatatagtgccaaaaattactagtaaccatgtgagagatacgaaggtttgtgaaggcgagttacaagtaaggccaactgaagatgccatatacattattccaagttggtcggacaggccaataagatgtgatagagacgtcgctttaacctggatgcatgcagattatataatcacaaatgagaggtgttgctctatcaccacggaaagatttgcaaatggattgtgtttaaaaaaatttgaaatgcagttggcgcaattagactccatacctaaacaggttgccacagtagcagacacaatatcgctaacaatgccaacattgagagtttttgagtcaaaaggtaaattcaaattttcgatgtgtggagagagaaccgtcctgttgaacagagagttgtacagaagaatgatgattagaaacataagtggcacaaactcgtataaggagttggtggattatggtttgggagtagcgaatatgaaatacaacattaacgacactgtgatctcgtttagcgacataaatcataatatcatcaaacacacagcggcttttgtatattcaaaaatgatcacaaaaaataatgtaaacatccttacagaaaagttaatagcaaatattaacacaattgacgggttcgtagcttgttttgtaataaactccatggatgtgataataaacttagctaatttggacacaaatataatttccaacataaaacactggttaaaagagaaatcaactcagacgaagatcaagggtattgcatcacacattgacggattagacattgacaatttaatgtgttatgcgcgggagccagtaatcaaagagtatagaggcatcaaattgaagctcaattacaaacaagctcaatgtgagcatgatgtggaagacgaaacatcaataagaggaaagaaatgtgagtgttgcaacattaagaatgtgaagccagatgaaaaattttgtgtcgcgtgtgacgaacactctgatcacaagtgcgagcacaaatgcagaatgaaccacaaagttgaatcactcgtgatatgcagttgctgcaattgcaaaatgactggtagtgagtgcgagtgttgcaaagatgtaggacaattagaacaaattataacctcggtgccggattcggtggaggaaatagctgaggaaaaatacaaacgaactaataaacaccacatgttaaaaaaacaaaaaattaaatcaactccagacagcaagctcaaatctgctgtagctgaaccagatatgaaaatacaattaactgacgaactaatgtcgaaaatggtagataatattacaatagatgcggaattgaaacggatcagcatggctgaaaaggaaaaaaaaattgccaaccttaaagaaaaatatgagatagttggaactgaggatattgataaaaaaacaacaattggcgatttactagaggtggtatcaaaagatgatgaaagcatggagttatggataagattatgtgctaagacaaacgaattctacgcggatctatttctatatggtagtgaagaaggttgggctagaaatgcactaaaggcacagccaccaaacttggccacaatggaatcatacttaacatttataccaatgggagacacaataattagaaatgaaaatatcaaaattgagaaaacatacgaagcgtctggaagtggaaatttgtgtggattacatagtttgcaaatattgtatccggaaaagaattttagattagaggacttacaggcagtttgctcgaatacagcaaactttaccagtgatgatttgatgaaatttgcactagtaaataatttgaacctgatagttgtaaatgaaagcatttcaaatataacaaaatcaatcgaagacgacaaatttaaagctataatacacagtaaagccatgggaattaacatagaccactggcaaccaggagtaattacacaaactggactacatgtaggattgccatattatccaaaccatttcagttatgaagatagattgaaaaattgtaaaaagaatggtatggatagaagatcattgatgactaaagagttaggaaacataaacctactcaaattggaggtaaatcttttcgaaagtttggttgaaacgaatctaaacccggcagaaagaatgttcacgattacctcgggagcagatgaaatgacactctcaaacaacaagcaaaaaaaaatggagccaaataacggtttattcagtgtcaaagttaacaaagagaatattgacctttgcgaaaaaattgttaattgcttgatgagaccgtcagacttcataggagatgattggttttatgatcgatcagacgaagtgcctgctgacgccacagagggaatacgaaatttaattgaacaaaatattagggaattagctcaaattatggaagcgagtaaaaacgaatattataatccatcattggtttcaacacacacaacaatccaatatgagaagatgagagacaatttgtttaaaatttcaggatctgtgaatctaaagccgggagattgcattataggtacagtaaccggtataaaagaagaaaaatatgttgaatcaaaggtaattggttatgttctcaggcaaatgggagagtggagcatatgttcctgccaaaaatgcccaaagggaaccagaattaaggtgaaagtgctaaagaagaacactggtagtatatacaggtttttgttctcagctttaagatgggacttccgtcgtgatatgaaggaagtaattgccaaggcggtgggtgttgacgcagtggctggttggggtaaaaccacagaaataagaaatatcagcgataacaccacaactattgtggcacagacacgtgcggctgtcaacaacctaaaggaaaaaagcgtcaaagctcatagtattataagtgccgaaaaagcaatgattgaaaaggttaaaactaaacgactaataattgatgaagcttcaatgattacttgggaaacactttccataatgatgggtaaagaagtggatgaggtgatgttgtatggaaacactaagcaaatatgtgttgtggacatgttctctacacaaggattgaggagttcaaagagcatacttaatcagtgcaaaaacatcataacccattatgagtcgcgaaggatagggaatccactcgcagaagagttgagtctatttgacaaaagcttctcaacacaagctgaccattcgacagagttctccacaatcagctggacggatatgaagtgggatgaattgaataagattgtcgaaactgtggagacttgcagcatcctatgcttttataacaatgctgtaagactagttacaaacaaattgaggtataaatgcccagttagtaccatacacaaatttcaaggtttggaagatgacaacataattgtgttgcaatggtgtccgcaaggtaattacccagggcgaataacattggatgcaaatcggtgcttttctgctgccacaagagcaactaaaagattgatttggatatcagtaaacgaatacagtaaccaagtgccactgcacaatcgatttggatcttcaagtggtggaaatgaaggaaaaataagggagcaagtgaacataaatgattatatagtgagaattgcaagcagtatggtaagtaaggtaatactttacagtaaggataaaacggtggagagattaaacgagtgcctggaacattacaaactggaagggtcacgtaagttggtgaagcaaaccgtaacggataatgatatagattacctggaaataaaaccagaagacatgaaggaccagacaataacttcacctttcaagaaaagtttgagagctatgtttaagtccagcaagaaggtagacagcaagaagacaagacttaacaaattgctggagtattcgcaaggtcaaaacttgaacaagtacaaattggacgatggtattattaaaatgtaccaagccacaaaggagtcttgcgagaaagcagggaaagatttcaaaactaccttcttaccaataatggaagaaatgttcaaggtggacaacagtgtcgtcgacataaagtcaaactttgataatgagttagaagtactgacaattgaggcaagtgtactaaaaatcaagcaagtcacgatacgaatggattacaagaatggtgtaggcaaagttttcactggaaaaacgtctatagtagataagacagatgcgaggttctctaaattgttcgatccaatacataaatgtaaaagctaccacatattgaagaacaaaaacttaaagaaagacataagagtaaagaaaactcaacatttagaaaagatactatgggtggtgaaccattttggagtagctttagaaagcggcaatttgacgatggaggtgagaatcaatggtttaacatacattttagcaagctacggtggatgttcactgtgcggtggcatgattgtatactgtaatggaaaaatgattttggttatagaacctagttataataccggagatgaaagaaaaattttgtttgacaattggagcgactgggttttgagtccaatattaagccacttcaaattatatgacgtgatggacgcattagctttacaatatgaagagcctccttactttgtgaaatccgacatagacagcataataaaaggtaacgtgatgacagcattagtattcgagagaatggtgaaattgccatgggtaatcatctctaaattgaaaggcataattaaagggaaaaccggagatctgtgtgatttttatgacaatagttacaatgagagaatacaaaacatggtaaggaagttgagagctatgggattcaataacataaacacaggattgtgtgaaataagttacacaaatatacaaagcaggcctgtagtggctacatttgatggaacttactacacctgttttatggatcaagatggaaccataagcgtgtacactgaagaaacaacggcaaatactatgttgcctgaggtcattaagttgtcaaaatatgacatgaaaaagaaaatcattaagagtataatgactggagtggagttttggatgacaaattgcagagtagatgaagaagttgaaatgggcatgataaggaaatccggagcattattaagacccatgagtgagcacatgcaacaaaatacgatggttgcagcggccgcgaaaaagtttagaggacaggttgaggccaagataatgaagatgagagtcgggaaaatatattttacacagaaaatgatggccgactatgaattcctgtccagccacttgtcaaggtactacaatgtgtttgcaatagcaacactgtatccagaaaataatctacatggaatggttgaaatgctgttggcgcagagtttgtaccacagcggttatacggacactctttacatcacaagtaatgctagcaccactgtggtctgtggcttatggagttggttcgcaaaaccaagtgacaataagtatatagaaagcaaatttttgagttccaggcgatatgcaattggaaatttggcaaatataatccgcatatatcaatctgacattgaatctttggaaaaaagagagcaattaagtgatgaagagaagaaggagcttttagaaaagaaagcagaagttcaagcaattagagatcaaatcgaagggaataacgagcagtggtatggaacggacgctggtggaaaaacttttaaaaacgtagtggttagcatggaaaacagcaacataaaattgagtgaactaatcaaaatatccacagacaacaacataaaaacgataacgttattgctcccagccacgatggtagtgagtgaaaccagcttacacaaagttgaagtctttggcaacgatcaagtaatggtgagtttcaaagacagtcgagaagtgatccaacccaacaagcagatagtaaacatggtcaacaatggaagcgccattgatcattctgaccacatcataacgtcccacactaagtcaataatgtatggtattcaagttgttgatttgacaattgaaaaaaaagaaaagacattggggaatgatgcgagaatattcagccctttcagaaatggcttagaagttgagaaagtgtggatacagtacccaagtgtgaacatcaatttgatgaccggagacagcagtaagttaatcattacgaaacacaaaaaactcgtgagcaaaaaattggtgttaaaattatacgagagagctttgcgtgatgattgcaatctatctgatttgcaagcttatggcaggtcttacctgcaaacacaaatgtacactgagaagtatgtcaccacaattaacaaagatgggttagacgaactaaatgcagcgtgtatggtagcaatagcggaaaaaaatggcctaaacgaccagttggatgcaacaatgaaattgatagagaaatttaaggtgaacaatgatgactgcatacagaaaattctaatgaaaggcaatgccaaatctttgttggagttagtaaataaaaatatggctaaattgcaggattatgttggtattcctgacaactttagtgagctattgaaaaaattaaattcgaacatgagcgcaacttttatagatgaagagtctgggagaacacaaacctggggccacaacaaagaagtaactttaagtaacgtgttcaaagaatggtggaacaccaacactgaaaatctcgaatggataaacgtcgggtatgtggatgattatagacgcatagtaagacgttcaaagagaaggaagccgaagcagagtaagactggtggtacatctgattatattaaattgatgactggcagccaaacccaacggttgatgcgccagtctgattgggacgctagatcaaccgctttaccagagccaattgcaggaattggtgaaagcgacgtagagacaatgttgactaggggcagtatgatcgccaaaagttcaaaccaaccacacattagtggctacaagatggttaaggcaaaatccaaactaagttctattggtttcaaaacaattagaagctttataaacagagccgctgaggttttaggagtaatacaaaatttagatgcaaatgatgtaaaaacaatttttagtttagtgaaacaaagcttaatggaaggctcagtaaataatgcagaaggatggaagatagcagaggatttgagatctttgctggacttggatgcactcacaactgatgaagtggctgcaatcctaagttcaatggagaaaatgtctgacaaatttttgttgacggactcgagaaatgttggttggagtgcagttgattggattaaaagtagcgacaatataagtgatctaacggatgaacaaattggaatggtgctcaacctgaagaaaatagataagcttaacgatatcaagcaaaatatcgtgacagatgaggatggaaactatctaacaaaagaagatgccattaaattaagatgcaagttgagaaaccaatggtcacaaaccaataccggcacagttaattcaataggagtcaaattatctgtccacaacttattgaaagagctgaaccatagtgagataagtggtctggaaaataagaggagaaaggagagaatgtggctagatatggcctctgtgccaaataatcaaatactacgtgtgtcaacggaaaacatggcaataacatatgaacctgttgacaccagcacatgtgtgtgggattgcattgaacaatacttcaagaggaaggtggccgctagcttcaagttgaacgcgagcatcaaggctataatgggaaacaaaaaacaattaaccaccaaagagtgtgtgacactgtgcggcttattgtgcagaaattgtataatgttcacggaggatggaagtggcatggcatacataaatgacaaccactgggaaacgataacactcatgcgagttgcgcaacctggtatggtagaccactgtgtcttagttgaagttgaaagaattacgataactgggtttaaagcagatttggtgcctgcaaccattgaaccattagtttcaaagtctcgctgccacattgacgacaaagataggttagatttggtagacaccactaaaagttgtttgaatcacgtccatgtagatggagaaggaatcaacctccagatgaatcgttgctttacagatggagtggtagaattggcggaatgcaagttagtaatgcccccactaaataacttgatcccgagactgacgagaaaagtaatgtgcaattacttaattgagcgcgtccgagtcaaatacgaggcagttaatgaagatgggaaaactgtggtcagaacagaagagaactggtatgagagtgggagtgcgaatacaacgaaacctggagatggtctattgatcagctcccaaggcggctacaagttagtcatgtgcttagcaacagcgcaaggagatgtagatgatggcttcaagaaatacgttaggttaacagaggaccatggtcaaatggccgtagtttttgattgcggttaccacatgatagaaaaaaaattgcgagttctgactagccggccaaccaacactgataataaagtttgggcattgaatatcgagtcacaaaaatatgtagaaaacagcttgggtttaagaactgctgttggtgcaggtgaaggcattttgcacatataccattacgacaataaaagtcaccataagtataatgagaaaaacattttagacaactttggcattgatcaaatggtaatacattccgttgtcggaaaagatgaaatcaattggaattacaaagcactcctaaaggacaggagtacttttagagctgctgtactgtatggagtgcctacgatgattatgtattgtgaaacggatgatgaaaccaacattgcggagtggtggttcaaatatcttaaaaaagacattttaaaggatagaagacttgtgttctcatacaacattgatagtgtgaatgaaataagaaaaattaatgagctttatgaattatactcggaagaatcaaaaaataataatacaataataagatacaatgagtcggatatggacacgatggacgtcgaggatgtcatcaatgaagttagttactatggtgatgatgatagcacattgcgcgctctgctgatttcactatctaccaatttaatgcatgaaactggagatctggtgtattaccagttgcgtaaattaattgagccattacaggtaaatgatgatgatttgttattaacaagtggcataataaccaatggagctgatagattaaatcacgtccaaccctggtcggacataaccatcataccgttaaatgggagaaacataaacgatatcaactatgaatttgaacgggagagaagtctagacgacgatgagaactcaaagagtggagacgaaagtgagattgacgaaagtgtctcggcttctaaatcgggattattggaattggaggccagtggtggtacaaaaggagatgatacgataagaggtatagaaacatcaacaacctctaagaaacaaatgatggttaaaacagttcatgaattcgtcaaaaggtacaaaccagatgtgagtaacagtgccaactggcccgaaagggtgcaacaattaactggtgccccgagttcaacattgagtgacacaactctagttgagccctacacaaaagtgactgttaacactgacatagtggatgaatttggaagtgttaggcagaatgtcaaaagcaataggagatggtatgtgcaatatgggagattatcactgtacaacccgtgttggtggtacttagcaataccggaaatgagagagttgcaacaatacaaaaccaaacataacatcaagatcaaaatgaattatttgggccataacgtttatcgattaaatagaatacggttcagggagaaagattcgatcttcacgcattgcgtgaaacctgaagtcttcttcgatatcttaaaacataacagtaacaatcaattagaattcccaaaagaattacaggatatagctaatcaatacctacatggaagggtgtcgtggcacgtgatatttggaaaggattacaacaagacttttgagcccacttgtagaagattaattcaaaagtttgagaaagtaatagtactaacagattatccatactcatataatggaatatgtgaagatgcaaatttagcatcgaaattggttcttattaaattagccagtcaatcggaaccgtgtagagccatatggtggaggttttcaatattgtacgcagacattcccgatgactgtgagctatacatattaaatggaagggacatgactgaagatgaattcaccatgattgatattttaatggaggaagacatggaaggatttgacatagtgagcgccctccacagccagacattcaatgtgtgttgtggttacgcgaaatacaaccatagagttttcaacgattatgcaacattcagagacatatatgataaatatggaaacagttatggaggtgacgagatatttatgtcgcgatttcacataaaaatgatgtggttacactacttaatacacggcgtgttatgttatcaggtggagggaaaatggttgaactacgcaaataatacaacttttataatagaagtcactaagggtacaagaattcgtatagacggtgtaactggactattctgcactgcaaacttctttgaagtaaatcatgaatcaaaaggaatatatgactacacatccataggttggaccgttgatggaatcctatggaaaaggggactgcaagactgtgctgaaagattagatgaccaaaaaatcaaatggtggctgaacaaggagaacgtgatatcaaaacaaatagatagtcaagctaaactgaaccaaagcgtgcaagtaagagaattgattttcaatagcaatgctgaatcagttgatgaattagtggttgagttggtggaaaacgtggataattgcttaataaccattagaaatgtggcggaaagcagtattaagataagctcaactgaccaactgttattagtgagaataagaataagtaaagaggtaatagaaatagacggttcaattgatcaaagtacaaaaaattttttgaataatcaaaccatgtgggtgaacacagacagagttcatgttggttggagcgcagaattagtcaaattggtgcaaagcagatacaaaggaaaagttattgttgtagaggggatggttactaaaatggtagacttaatgttagaaccacaatttggctctggtgtgcacattggaaaggaaattgatgaattaatatggttgcccaagaatgtggacacagaattactaaaattgcaaaacttggagttgcaggtgaagaagggcaaactaactttgggttcaactgatgagaagctgtacaacattttaagactagcagatgtaaacgcttggcgctattggttagaaacaggaaacactcaaagattgctgagctttgattccaggatagttcgcagccattcggaatgtgttccaacagatctagggtccatggtgggtcaaaagttgccacttagtcaagttttacagaaaaccttagcagagtgtgctaaccacgtagatctcaatgactcagtgtggagaaaaatggtcaagagagatagtagtacagttctaattgattcaatcaaagatacagtattaaccacgggcaaaattaactgtgtccagaggtcctcttcaaaatccgtcatcatactatgccagggaataagtgtgaccatcgtcaaccaatcaagtggaggtggagacgtgactacatctgttgaaacggttgatgaagctaagcaaatttacactacctggaatagtttggttgaaagtggcaaatcaaatcaactcccattcggtatgtcccccactgcttaccaagaaaaatttttgaacgttaagaaaactactttatcacaacaggacaagctaaaccaattagagcattttgactttgtggatgcttatgcgcttttggatcacaacataaccgatttggtaccaaaagttggtattgaagcatatgatttaattcccgactcaataaaaacagattatgaattgatagagccaattggaggagatttaaacattaatgcggaattaggcgaatcaagaaacagagatgtaaacgctagaataatagacttatgggaggacacagacttaagggaatggataacaatgtatggcccaagaaacaaagtcacagttcatagcagggtggatccaggtccagaaaaaattaacatcaaaaccatacttggcagccacccagcttatagtaggcctgtagtttcaaaaacaattggaatggaatttaatgctgtgacagggaggctaggaaacatgttgctattacgaaaggaaaaaattaacatacaacatgaaatcagaaaatttagatccgcgtactacagacctgattggcaagaattagttgcgagttacaaaaatgacacagtaacaataaatgataaagacatcaagatgtggttaagcaaaaggaaagattggttgtcattggcgaccacaacattaaggttgcttgaaagtgggttatcgcataaccccatgaacaaagtgaatgtccatgttaaaactgaatctctgctaaagtccaatccgatagacaattggaggaagacacagggaagaataatagtatggcagccaaaagaactatgtgctttaatgtcaccagcattcataacaattaaaaagagattgaaagaaatattaagagatggtgttttatacacagacggtttgacaccagacatgttatcatctaggttaagaaccatacagtttgattacatttttgaagacgacttagaaaaacaagatagacagactgaccaagaattaatagatctagagtttgaattgatgttagaattaggtttggatatcaaattagctaacttatggagattggtccacaataggtggagatacaaaggtaaagagagttggggacaactagacgcaatgcgactgactggtcaagcaactaccgcactgggcaatgcaatcaccaacttatgcgtgcacagcagttttgttatcgaacacaagcatgcgatcaagctggtgatgattctgggtgatgacaacataatgtttctaaatgagaaaccaagtttagtcaaatacaagagattgatgagtgatagatacaatatggtgagcaagccaaacattgatccaaacgtaggcaccttctgcagtttaatttgctacagaaatagctttggctcggcggaattgggaccagacttaattagattgaaacgaagatttgaggtaactgggggtgggaaccaatacgagttgccaatcgaagttgttcaagtaaaaaaaattgatgatagttacaaaaccaaatactacaacggacggtatatactgaatttgacggatgaatttaaaaatggaaatttaaacgtttgggctacaaatcatggcaacaggagttacatcgccatactagaaattgacactgatctcaagctggatgataaggcatataggaaacatgatttgcgagataaaaacccggaagaaacttacaaaacgcttataaaaataggtgagtccatgggtatggcaaatgcgattatggctggtggcatgtcgtatttgcacatgatagggtccacaaaagaaactgaagatattaatcgtcgcaagggatatgggttgttattgaccaagtggtatgatgttctgagctgcaaaaatgctatatgcagcaagtatggaatgtcaccgacagaattagatgaaaatcttagagatctgttggaaatgcttgataaaccattggtgacacacaagagattcaagaccatatcgaacttcttacaatgaccgtagcagcgcaatagattgcatggcctcgactgcaaacgatcaaatgtgtgtggtgtgcccccc

SEQ ID NO: 891 - DNA, 8310 bp, Macrophomina phaseolina endornavirus 1
  source 1..8310: mol_type = other DNA
tctcacaggcttctacagaaacagactcactcccactgccacaccaacgctagccacaatgagaaagaaccttacacacacaaacaaaccttctgagcaggcgactcgtcagcccccgcctttcagaagacctcgaggggctgacgagataaggatggaaaagatgcgcgcgctggtacgacgcgcgggggattggtggcacgacgacaccctacccgttgttactgctatgactgcggacgatttagacattccgctatgcgaaggatgggaccctttgcgcttgacggcggggcttctgcctgggcccgctgatgaagcgttgtggggctgtcaatggggcagcgggtctcttgctgccctgagggtggccgtggcattgcatcaagccggggaccgctacttgacagctgagcgcgcttttgaacccaacgcgtgttacggctgggtggtgaaggcgtgcgactgctggaaagaggtgccgggcatggcgtgctgctgctgggaccctgtggtgataagcaagtacccggaggattccgctcctgaggcgcgtgaggacggcttgaagtgggcgcttgctatgttgaactgggccggttggcctcgtgcagcagtgcacgcggagcaggatgcatatggatcggagtgctcgcggctgcacaagctggacgggcgctggcaagtgcatggcctgagcggctctgcagtcgcttgtctgagttgcaatgcaatcaacgtgttgatgccgggagaaagccgcgagattgtgtgcggcgcttgtgcctgcgaaatgttgctgaattttgaccctctaaagttgagcttagaccgcgcaatattgttttggcctggctggtggctggagttggttgatagagcggtgcggattcgggtgtcgaactaccctgaatggaatcgcacgagagctggtcacctgcgagatttgttggcaggtgccataggtgacagggcggatgccatcattgcaggaaccaaattgggcaaggtgttggacgcgcgggatgaggcaacggcaaggaagatcatacagatgtcagccggcagggaagtccacgtggacggggccatgtcggaagacattctcaaggatctcgtacggacgtttcccgattacgagattataccgacattgtccagtccccacaaacacggttttcatcacgcttgtagggtgatgctggaagatcggtttctccggcgaattggtacgcacgtcccggtgtacgatgtggggggtgcagttcaccgtcacgtgcgccggaagcgcttcaacgtgcacagttgccggccaatactgagcccggacgattacgcccgccacgctgaacacaatgctgacactagcaacatgctgggaaaccatgcccgcaaagctgcacaagacaccgccggaaggccagtatcaacgtggggtcctgtagaacaatgggccttgaacgcacggactcccaagctggtagcatgtgaaagtccggccgaggcgtgcactttccgtgcgaaggtgccgggagcactgttatacgtggactctctgtacgacgtaaggccggagacggtgcttgctcagatgtgcaaccacaacgccaaccggttcctggcctgcatgaccattcctcctgcggtttggagtgataccagtggatggctggctcacaacgagggtcgctgggtgctccgggacgagtggctccacctctcattccggggttcttcacagacctaccggaacaacttcaacaatgcacggctattctttgaaaatccggtgtggctggcaaaatctgcaggcttgtacatccgggtgcaagggtattacggagaccacgtgtgccttgaaggattcggcggcccaatcgagtatttctcagccaatctgcaatactttacaatgtggtttgatgaggacaccgacacagctcgtttcaccatcccgcgtccgagcacttggatggatgcactgaaacaggtagccaaaccggaccagggattcaaggtgaatcgcaagtttttggagctagtgcgcagccggttgctggcgaatccgaagacagatgtggattcggtgctggcttttgctagagcggcgcaaaacgctcaataccacttgtcttcggggaggatgagtcgttttcgattgtccacagacgaggtggtcgatcatgtcattgtggcgctagttctgcatgcaaagatcctggagcggatagagccctacaaggcaggaccgaggaaagtggacgtgtgggacaagctaaagaagatcgccatagacagcactcgtgaagttgtgcaagccggtgcagacgccaatccgctggtacaagcagggctggagtggttgcgcaactggctgttctccgggcaggagaatgtggtgcaggacgcgaactgggcagtgtattggcaacttcgcgattttgtagacgaaacatggtgctcgcgtacctaccgccgcggagtggtgcgcggcctagagttgaccgaggacaaatgcccgccacgtcctgagactatccattttggacggggaccgtgggtgctccatgagggcgaatttggtgatggggtgagcgtgcggcgcctggcccagccggcctccgagttgagcgtggaggccgaggttcaggctgccacgacgagttgggtgcatcaaatacgggctagacgggagggccaacctgcgccccgcgaacgggaccacgccgggcggccagagccaaggcccgtgcaacctggaatggacggagacacgcccacaggcgacttcacggtgaccagcgaccggatcgagttacacgactcagaagaggaattggtggcttccgccccttttgaagtgttgcacgggttggtggaccgctcaggcgcggctgcggacggagcaacgcttcacgaggaattgaggcatgtcggtgcggatgactcggttaccgaagggccggaactatcggcgacgctgtcgggcgttagtgctgcgccagtggcagaacaccaacacgaaacattctctgtgccggaagctgaggagacgacagagatggcggctgacggcgaggctccgacggcagtggcggccgactggccagtcgaggccctgccagatgacactactttcggactgggcacggatcagcacggagtggttggcaacgcccagcaccgcagtcttgggctggagaccgagcgcgccagaaagattgcgttgtatggagctaaagtgccagccactgtgctgacgtggatgttggagggaccaactagactgcggattagctggacatcacagttgggccgggtggaatcgggccccaccgggcactggttgttggatcgcctctccctgctgaatcgtgagccaactccgggcgatgggctgtgcggcatgcacgcagtgcatttctttgcccctgacctggacaagggccaattggagattatgtcggggcgcaaagagtggtggtcagccgacgagctgggttcttgggccaatgctggcggttacaacttggtggctgtgacgcaccccggaaggggcgaggcctggatctgttccgcagatgcgcccgtggtagctgttgtgcacagcaacgcgattggcggaatggggcaacactgggagagtgcgcgtgtgttggtggacgaagtgccagtgaattcacgagtgatcaacccaaggctggatgaggacggccgacgcgcccaggcatacagtcgtgccgcagccgagctgtggcagatttctcctgacgaggtggagctggacggagcacccagcctggaactaatagagcgcgccgagtctagtctgcaggcccagtgggaggcggcacgcttcgtgtgcaagccagacggcgatgcggtggcaggtttgctggtgtttgagcaggacgaggaaaggattttccgagtgtgttcttccgatgcacactcggacgctagcatgcttaattccatgctacagggcctggaaccattgcctgatccacaggtggttttcggcacggacacgctggatgaagcggtggcaaagattcgatgcaacgtgggccgagccataatagggcaggccagaggagaagcggcaactgggccgacgtaccacccaggacccgtaggagccgcactggactggttggccgatcacggagtaaaaccgggcgacgccctgctggtggacgggaatgtgcgctttgctcagggctcggtgggacggcccgcagctcagctgcccgcccgtgagtggcggttgtacacgaacagtctggtgagcttgatcaagcgctgggtggcttgtggagcaacatccggtgactggggaaaagtggatagaaccttgggcgggcccggcagtggaaaaacgagagccctgcacgagtccgacttgccctggtcagtggtggtgccaacgcgtcgtctcaagacgaagttgatacagtcgctccgcggacgcggctcggtacacactgtggaagaggcgctctgcttgcctagcgacaaaggccgtcggatctggttggacgaggcgggcagcgtgagcggcgatgacgccacgattctctgtggtaagtttggccctatgatgttgtcaggcgaccccgaccaaatcgggccggtgaccgagcccactgtggccacgccttgggaagagtgggccggtgacgccttggagcgattgccagtttctggcgcggtagtcaagttggctgggacccgtatgccaggtagcgtggagcggttcctgctcttgcctgacggcggcaaggcgggaacattaacagtgcagaaattgcgaaacgaacaggccgtgagggaggccttagtgcgactggacagagctggcacgcttgtgctggtgtttaggacgagcgagctgaagagggtgcggactctgcacctagatgctgatgtggaaaaagtgcacagcttccaaggcggggagagagagcgggtgatcgtcgtgcaactgcgcgcaagcggtgtcagtggcgatcccagatacctgtacagtgctttcacacgcgcttgcagggagttgattgtgctaacactggcagacacaacggacacagaagtacagagactgggttacatggccctcacggagacccgcgggggctggctacctggctgttttccgcagcacgtcgagagcttattgcggttggcgtgctggaacgaatggttgttgctggacgctaccgggcttaagttgggaccctgggggccggtgccttggctctcgaaggctgcacgcatgatgcacggcgcgctgcagaccttaaatgactggattgagtggtgcgcgccagtgagagatgacgggcacggcgaggccaagagttcacgcgattccacggcggtggtgggcccggcaaggacggagtggccggcaatgcccgaccatagcttgtgggagggcttgaggcccgccctcgctgcaggggccgacacggtgtcgaaccccatagtgaggatggcagtggacggtacagtggtcgtggcaagcgcggatgacccttccccccccccccgggctagcgtggctgacaggctccgattcttgatgggagaaaatttgccataccccgcgaacgagccgcaggggaaggaagaagaacaacaactgcgctgcgtgagtcccaggccgctgagcgaagcggaggacgtggagcgagagctgaggggcctggaattggccatgcctgcgcgccgcatcaccaccaaggagtgggaatctttggccctccctcgcgtgtggcgaacagaggcattggactggttggaggggaccacgggcgaagctgtgtggcgcagtttgccggcagggttggtggtgttgtaccataacgaggagctgtccgtttgggcagacctggagtgcccggtcgagctgagcgcgttcgtggtgctgaccctattggaggtggcgggcagcaggcaggcgggggcgaaagccccacggggcgcaggcccctggttttcgctggccctctccttcttaggtatgatggtctacgtggctgcgttgacattggtcagcagcttcgttgcgtcatgggcgcatcggctgtctcagacgccgatgcgggaatggggcccagcgctaccccgcagacgcgatatctggctatgggtgcagagcttgaagctacgagccgggttcgctcgggtctgggtccccgctagttggaaggatgggaccccaatgcgagagatgccacgggactggttgagcttgacagccgcagaactggccgtcgcgtgtcaacgaagtacaacgcacggctcctacaccatggccggggtaagagtggtggtgacacctcgcagagaggagggggcttacacgatagtgctggcggatgccggggatgagggttgtgcgtggcgagtgcgagtgtcctctaccgcatgctctgtgcacgtcatcctttgccgaacccatgatcacgcgtgcgaacctgccatgctacaggctttgcgcttgacaacgagcgattcagatgccccactgcggggtggaggcaaggctgagttggtgtcccggtggagcccttggactccattcccagaggagcggcacacaggagcatcagaaacttggagctgggtgacaggagccgtggctgccagcatcggggtcggcagcgttccgttgggaccgacggaggccggaacgcgccatccggagataacaggggacagcggcgatccgcacaaacagcccgtgtcggacagcaagctggaaatcacaacagcaatggactggttggactccacacaagtgctggaactggcgccaatatcagcgccccagcatgggtcgatccgggccgatatgtgggcgttcaagccacaacaggccgcgatcatcaccctgggcggcatgtcagaccacagccggccagctctggtgcggctgtactccgcggtatttaatgcagtgagtcggcggctgttcgctaccaagcgctatcgcgtgaacgccttggacactctgtcccatgtggcccggatgggccgcgtgtactgccaaggggccagctggaaggtggcagcagagcctgtggcactggacgaagaagccacggttgcatgggtggaggccgctgacaacccgcaggccttagcgaaagagatgcaggccgtgtgtgagagggcattcctgaccacaggattggaccacgccacggtgttcgccaaaagggagactctgacaaaggaggctctcaaggacagcagcttggatgggatggccagggtcatagtgttccattcccgggccgtggccgcagtgatgtcgccaccgttcatgcaactcaaagaccgcttgaaaaaccgtcttctggatcatatcgtgtatgtggacggcacccgcttcgatgaagtggaggcgttggtgcgcaacaccaaggcacggtacgtgctgagcaacgacctggagaaacaggatgcccagaccgacgcagaccaaatcaacgttgagatggcaatatacgaacagctgggggtggactcagcactgctgaacctatggcgactgtgtcacgagcaatggcacttgagcgggcccgccggaatgagcgcgaagcgcaacggcatgcggtggactggccaggccaccacggccctgggaaacgccatcaacgacttgtgcatcaattgcaaagtggtcgagaggttgggctcagcactgaagttgatgatcttcttgggggatgacaacacgatgttcgttgaccaagtggtagacttgtcagatcttatggcgctgactaaagccgagcacaacaccgtttgcaccccaactttctccgagagttacggcagcttctgcaccctgctaatatcccggcagggagagagtgggtggcgtgtctatcccgaccttgctcgattgattgatcgggtgcgcgtgctgccctcaatggccgtagaaatgggggacgtggaggcccggctgttgagttactgtcacttaatagggggcattccaagcgtggtggaactgtgcaaggaaaaaggatggccggaacctccacttgcaccgtatggtgaagcagaactgctggcagcgcaacccgaacgggacattagctggcatagtgggccgagcgctttggcggcgttcgtggaattggtgcgcaatccggatgtgcagagacacgagtacacagtgctaaggaccaaggagttgtgaacgggtgaccatggaaagcgtgcgcaggagagtgaagaggggccctttggggcccggccagggtttgtttgtgtgtgagatcggaa

SEQ ID NO: 892 - DNA, 8245 bp, Macrophomina phaseolina endornavirus 2
  source 1..8245: mol_type = other DNA
cattgaccgccccagccgacccctgcaacacccacggccaacagcaatcaccaccacaatgacacgtaacgaacacacaaacaaaccttctgcagcggcgtttttccagcccccgcccttcagaagatccacaagggctggagaaataagacaacagaaactgcgagcgttggtacgccgcagcggcgattggtggcacaacgatgtgctgccagccgtgacggccatgacggcggacgacctggacataccactgtgtgagggttgggatcctgcgcgattgacagcagggttgctgccgggcccggctgatgaagcattgtggggctgccaatggggcagtgggtccttagcggcccttcgagttgccgtggcactgcaccaggcgggtgatcgatacctcacagcagagcggccctttgataacgccacccagttcggctggtccgtcacggcatgtgagtgttggctagaggtgccgggcatggcttgcatgtgctgggaccccgtgattgttagtaagtacccggaggactcgccggaagaattgcgtgccgatggtctgcggtgggcggtggctatgctggattgggcaggctggcctcgcagcgcggtccatgcagagcaagatgcgtacaagtcggagtgttcaagagttcacaagagagaagggaagtggcacattcatggtctgaacgggaccgctatcgcgtgcctgagttgtgacgcggtgaatgtgctgatgcccggggagagccgggagattgtgtgtggtgcctgtgcctgcgaaatgttgctcaacttcgatccattgaaattgacgattgaccatttcacgttgttttggcctggctggtggcatgaattgcaggaccgtgcggtacacattagggtgtcgaactaccccgaatggaaccgcacacgcgccggacatttgcgggacttgttggctggtgctataggcgatcgggcggatgcgatcattacaggtaccaagcttggtaaagtgctggacgcgagggatgaagctatggcacgcaagattattcagatgtcggcaggtcgtgaagtccacgtggacggcgctatgtcagaggacatactcaaggatctcgtacgcactttcccagactatgaaatcattcccacactgtccagcccacacaagcatggattccaccatgcttgccgcgtgatgttagaggaccgattcctccggcgggttgggaaccacgttcccgtggtggatgtcggtggtgccgctcatcgacacgtgcgtaggaagcgtttcaacgtccacagctgtcgacccattctgagcccggatgactatgccaggcacgctgaacataatgcggacatcagcaacatgctcggcaatcatgcccggaaagcagcgcaggacactgctggtaagccggtggcatcatgggggcctgtggagcggtgggcacttgatgcccgcacaccgaaactcgtggcgtgtgaatctgcagcagagacttgcacattcaggggcagcatacccggagcactgttgtatgttgattccttgtacgatgtccggcctgaaactgtcctggcgcacatgtgcaatcacaatgcgaatcgattcctggcatgcatgaccataccgccagcggtgtggagcgagactagtgggtggctggcgcacaatgaagggcggtgggtgctgaaggacgagtggttgcatctctcgtttcgtggttcatcgcaaacctatcggaacaacttcaacaatgcacggctcttcttcgaaaaccctatatggttggccagaacggccggtctatatattagagtgcagggttattatggcgaccacgtctgcctcgagggtttcggtggccctgtggaatacttttccgcaaacttccagtacttcactatgtggttcgacgaggacaccgacacggcgcggtttaccattccgcgtccttcgacttggatggatgcactgaagcaggtggccaagcctgatcagggttttaaagttaaccgcaagttcctggagttgattcggagccggttgctggccaatccgaaaactgatgtggactctgtcttagcatttgcccgtgcggcccaaaatgctcaatatcacctgtcgtctgggagaatgagccgcttcaggctaaccaccgacgaggtggtggaccacgtgattgtcgcccttgtgctgcacgcgaaaattctggagcggatcgagccatataaggccggcccgcgcaaagtggatgtgtgggacaagctcaagaaaatcgccatcgacagcacgagggaggtggtgcaagcaggggccgatgctaatcccttagtgcgcgctggactggagtggctccgtaactggttgttttcaggacaggagaacgtggtgcaagatgcgaactgggccgtgtactggcagctgcgcgacttcgtggatgaaacgtggtgctcccgcacgtaccgccgcggcgttgtgcgcggggttgaattgacggctgatgtctgcccgccccgccccgaggcggtccactttggcactgggccgtggactctggatcaaggggaattcggttccggggtgagtgtgcgccacctatctcaaccggtccgagagttgaatgtggaagctgaggtgcaggccgccaccgtgagctgggtgcaccagatgcgcacgcatcgggaatctgggcggacagagagtgggttcaatgtggtccgccagcgcgacccagagactggactgcccgcagatgccgcccacgacgagggtttggatgaaaccatgccagacatattcactgacgaccgcatcgagctgaaggacgcggaagaagagctggtggcatcagcaccttttgatgccctaagggctgcagttgagcgcgcggagcattcgcagccccctgaggtgcatgacttgcctgctaccagaggcgagcttgggtcgggcgcggaaccaggcgcgaacgccaatgtggcggatgcacaagacacagacgcagtgctgccactgcaagagggctccgtgccacctcctccgcaggaagacgactggccggttgtacctatcgttgacgaccacacgtttgggttgggagcagatgcccctggggccacaggcagtgcacagcacaagcacttgggggtggacacggagcgtgcgagaaagctcgccgcctttagtgagagggtaccggcccacatcatgagctggatgctggacggaccgcgccgcctaacagtgcggagctacggtgccaacttggaaatggccagcggagagccgggtcattggctgctggatcgcctcagcctggtgaatcgggaaccgacggctggtgacgggctatgtggcatgcacgcggtgcacttctttgcgccggacttggacagagatagcctgataagatcgtcgggtaggcgggagtggtggtccgccgaagaacttggctcgtgggcaaattctgggggttggaacttagttgctgtgactcgtccgggggccggggaagcatggatatgcgacccttcaggtccggttgctgccatagtgcacagcgaggcgattggaggtttaggtcagcactgggaggcatgcagagtgttggtagatgaggtacctgtgaacgcgcgggtgattagccctgctctcgaccccgatggcaggcgagccctggcgtacagtcgggcggccgccgaattgtggggcgtgcccgtgtctgaggtggagctcgacgggccgccatccctagagctaatagagcgcgctgagacaaccctgcaggagcagtgggagcatgcacgcttcgtggtgaagcccgatggcgaggccttggctgggttgttactctatgagaaagatgaggtgcgcattttccggtgcagttcgtcggacgcacacgctcgggcaagcgaactgaattctatgctccagggcttggaaccccttccgcaagccggggtagtgttggggaccgacacgctgcttgaagcgtcggagaagattcgcgctaatgtggcacgtgctataatcgggcaggtgcgcggtgacgctaccactggaccgcacttgttccctcgcgcttcggcggtgtcgttagattggttggcggaccacggagtgaagcctggcgacgcaatattggtggacggggaagtgcgcttcgtgcaaggcaccattggacggccagcggcgccgatgaacgtgggagaatggaagctgttcaccaacagtttggttagtttgatcaagcgttgggtggctagtttcgaggcgaccggagagtggggcacgatccaccgcaccttggggggtcccggatccggaaaaactcgtgctctgctcacggcagactccccttggacggcaatcgtgccaacgcgacgtctaaaggtgcgccttgcccaacagaggaagggccgaggagcagtgttcaccgttgaagaggcactgtgtctacctgctgataaaggccgactggtgtggatagacgaggccggcagtgttagcggggatgatgccaccctgattaagggaaaatttggcaccatgatgttgtccggcgacccagaccaaataggtccggtgctggaacataccattgccactccttgggaggagtgggcaggagatgccctcgagcggttgccctgctctggggaaacagttcggctcgcaggaacccgcatgcccggtagcgtagagcgcttcttgcttttgcccgatggcggaaaggcgggcaccctgacggtgcaaaaagtgcgcaacgagagcgggttgcaccaggcactagtgcgtctggaccgccctggcagcctcgtcctggtgttccgcaccagcgaactgaaacggctgcgttctctgcacttggatgctgacgtggagaaagcacacacattccaaggaggggaacgcgagcgagtgattgtggttcaaacgcgaacgagcggagtgagcggagacccgcgctacttgtacagcgccatgtcacgagccagccgggaattgatagtgctcaccatggccgatgtcactgacaaggatgtgcaacgcctccattacactgccctttttgaaaatcggggcggttggctgcccggccggttgccacggccggccgaggccctcttacgctttgcgtgttggaatggttggttgcttctcagcccgaccagtgcggatctcggctatgcagctgcgggcgagtggtgcaatgaggcactaagggtactgttgccggcgttagccacactcacacgctggctacggtgggtggcgggcacgcctcctgcgacggacgtgctgcgaagcagtacgtccccggcaccggctgcggactcgggggctttactgggcccggcgcgcagtgaatggcccccaatgcgcgagcacagtctttgggagggcttgcggcctagtctggctgctaatgcggacacggtcacgaatccgattgtgcgattgggagtggatggacgggtcaccgtggccagcgcggatgacccctcaccgccaccccggtctgccgtacaagaccgtcttaagtttttgatgggggagcctttgccatacgatgcgccgggtgatgcggaacctttgcgcagtgtgagcccccgacccgaacccacagacgatgatctggacgcggacttgcgcggtttggaactggctatgcccaaccgccagtgctcagaaggacaatggcggaatctcaagctgcctgcgtcctggcggacccaagcgttggattggatggagggcacctcaaatggggccgagtggcggagcttggagcacggactagtggtgctatatcgcgatggtgagatatctgtttgggccgatttggcatgccctgtcgagctggccgggttcattgtggtatggctcttggagactgtagagccccgcggtggcgcgaaaccgaaggctggggctggaccatggctctcgttggccatgtcgttcctaggaatgatggtgtatgtggccgctttaacgttggtgagcagcttcgtcgcatcctgggcgcaccgtttgtcccagacaccgatgcatgaatgggggccgcgcctaccccgtggcacggaggtttggcgctggatacagggcttgaaattgcgcttggggttggggcgcgtgtgggttcccaagtcatggaaatcaggggagaccttgcgagacatgccccgcgagtggctcgctctaacttcagccgagctggcggtggcagcccagcgcacggaaaagtatggttattacaccatggggggcgtgcgagtgattgtcaccccgcggcgtgagcaaggcgcttatacattggtgctagatcgcccgtctgtgaccgactgcgcgtggagagtgcgtgtgtcggggatggcggcctcggtgcacctggtgcattgtcgcctcagtgacgaagcctgcgagggtttggtgctccaagcactgcgcttgaccaccaactcggaagacgccccactgcgtgggggcggtaaagcggaactagtgtcacggtggagtccttgggcacccttccccaatgagccccacacaggggccagcgaaacatggagttggattacaggggccgtggccgccagtgtgggcgtgggcagcacgcctctaggtcccacagaggaggggacctgccaccctgaagttacattgggaagcgatgatccccatccacagccaggtgtggacagcaagctgcccttaaccgtagcgatggactggctcgattcgacacagctgctggagctggcgccagtgacagcacctgaacgtggctcgatccgggcagacctttgggcagttaaggaacaaaaggctgctataatcactttgggcgacatgtcagaccacagccgacccgcgctggtgcgactttactctgctgtattcaatgccgtgagccggcgcctatttgccacaaaacgttacagagtaaactcgctggacacactctcgcacgtggcccgcatgggccgagtatattgcaagggcgaaagttggcgagtcgcggctgacccagtggccttggacgaggaggctactgtcgcttgggttgaaagtgcgcgtgacccgcagtctttggctaaagagatgcaggcagtttgcgaacgcgcgttcctgacaaccgggctggaccacgccacggttttcgccaagcgagagacgctgacaaaggaggcactgaaagattccagcctggacgggatggcccgagtgatagtgtttcattcgcgcgccgtcgcagcaatcatgtctcctcccttcatgcagctaaagggccgcttcaagaatcggttgcttgaccacataacatacgtggacggtatgcggtttgacgaggttgaggccctggttcgcgacactcgcgcgaagtatgtgctcagcaacgatttggagaagcaagatgcgcaaaccgatgcggaccaaattcaggtggagatggcaatctacgaacaacttggcgtggatagcgccctgctgaacttgtggcgcttgtgccacgacaagtggcacttgagcggaccagccggcatgagcgcgaagcgcaatggaatgcgttggacggggcaagctacgacagccttgggcaatgcaatcaacgacctgtgcatcaattgcaaaacagtagagcgactggggccggccttgaagttaatgatattcctgggtgatgacaacactatgtttgtggaccaggtggtggacttgacggacctgatggcgttgaccagggcagagcacaacacggtgtgcacgcccacattctcggacagttacggcagcttttgcacgttgttgatttcacgacaaggcgagctgggttggcgcgtgtaccccgacttagcacgattgatcgaccgggtgcgcgttttgccggccatgcatattgaaatggccgacattgaagcgcgcctgctaagctactgccacttgatagggggggtgcggagtgtcgtggacctgtgtgaggaaaaaggatggcctgttcctcccacggcgccctacggcgaggcagaactgctcgcagcacaaccagagcgggacgtgacctggcattccggacagagtgcactcacagcctttgtggaactagtgcgcaaaccgagcgtgcaccgacatgagtacacggtgctccgcactaaggagctttaacaggtgtgagcagcgaccgtggaacggggatggctagggggatcgcagggtttgtttgtgtgagcg

SEQ ID NO: 893 - DNA, 16499 bp, Morchella importuna endornavirus 1
  source 1..16499: mol_type = other DNA
tgctcttccgatctcacacaacaaaacaacaccatgccatcccgcgctaacaacaccacatatcgaatgtttatcaagcacactaaattttacaagaataaaccattctgcgggtttaaaaatacagcagataaacaattatcgaaaaccattcttcgccagcaacggcgctcgatattgttgaaaagaacctcatggcgaccaaaagctgtgagaagaatggaaaaaaatctcaaaatccaagccgaaaaagaaaaggctgagaaattgagacaagaactcttaaaaattgcccacgaagagaagctgaagatagctgaaatgaagcaggcaattgagagggttattttagaagaacaaaaccaagaaaaacgcaacagcctaaacacacatttgcaaaacaaacagaacaccataaattacgcacacacgccagtgagcagcattgatggaaaactgaccggaacatgcaatgacggtaagacttgcattattgacaataatgaagagcacaaggtatgtttagtttgcaagaaattgttggtagttggaagcaaaccagaaccagtggtagaagaaattaaacccgctgctgaacccaaaattggtgggaaagccgactgctggtcacacttgccaattgacattcacaagagaggatgggcgatagcttcgggagctccgtttaaattcaacgttggcagtaaaaagcaccagcatagcatgatggcgaagtatcctgatgacccaatgcccatttcagaaatcgtgaatgacctgtcttacatgctcaaaaactccatggctaagaggaaatatttgaacaccaagtatctagacctgatcctgttggataatggggattatcatttggaagagggtgatacataccatgcaggcgatgtttacgaaatactgaaagcaaaatgggattctgttaaggacaacgtcaaacccattcaaccgacgcaactgcttggtggtgaggagaactgttatttagccctccccatttcgcctagatccatgagaattaagcacacgaagaggattatgaaaattagcaagatggtcgacccaaagccagttgaggagattgaggaaaaaatgagactgttcatgaacaggccagaaaacgctaaattcatgaacctcatgtggaaaattcctagatacgttctggaagaattggcaccaggaaagtggcacgttaggttcggagaggataatgagcaatgtgtatcggcttgtcgagttttggaaagactgggcgagatggtgcaaatcaacaaagacaacattaaagctcaggaggcagcgacaaagactgtagaaccagaggaatggaagactgtcctaggcaaacccgggctctatcgccatgactcaggttacgaatcaactgaaaatattgatatcgtgtactgtcaattgggaaaaacagctgtcggtaagttgccttccatgccaaaacccaaagtgataaccatgggttataatgctttagaagaaattgcgaggcacactggcatgcataagagtgatgttgttgatttaactgctgtcgccaatgctaaccgagattatactgccaccatcgtaaaggccgtctatggaggtcttaaaaacaaattgcaccacgccggacctgtggatgacaagaccttgagagccttaactgatgcatttccagaatacgatatcatcaggactccaggatcagcccacccccacccctttaacgcaactgctagaagcttggtaacaagtatattgtatgaaaggttaggctatagacagaccatcatcgacattggtggcaacgcttatacacatagtgttagggataggcataatgttcattgttgttacagaaatgaaactatggaagagaaagacaaaaccgtggatatagtgtcagcaatgatggagcaagcaggaaagtcatatgaaagactgctggcaggatcagacaaagcgaatgacgcagcaataatggcaaaccttatgaacaaaattgaaaataagatgtgcctgaacagatgtgaagactgtgactttattggagacaaaaaattcacttattgtatgtcagtggatacactttatcatatgactacagaacaactagcattgtctttcgccaaacacaacattgtccacggccttcatgccatcttctttccgattgacgctctcgttgtcaacaaaggcaatttgcccatgaatgaaggaacgtgggaagttgttgacggagaattcagaatgagaacacatggagacagcaaagtttacgctcatcctatggacaagatcatccagtggttgacaacacccatcattgtttgccatgatttttcaatagttgtgagaattgaaggtttcagaggaggacacattatcatcagcactaacagaattgacaacaaattcactgttgaagaactgtatcttaggaatgtgtggatgaccgatacaccagatgaacaaatttatcaaatccctatcatcgatgtttatgaacccaaaggacttttggacaatcgtagcattaaggttaagacggttaaaataaacagtaggttgttggatttattgtgtaagagaattgctgatggaccggaaaccccacaagagttgctcacttatgctaaaggcttgacttatacaatccacaccaccacaatcaatattttcaggcctttcgatgtgagtgacgagtctttgcaggaccattgttgcattgccatggaacgcactacgaggttgttggccaacatgaaaccattgtttgatcatgctacttccgcggtggaggagaaagcttggcactggacagcgttggatgctctgattaatttcggtaagaaattcgcgttgcacattgatcccacacaagtagatgttattaaggagttcattagagacaacaggactgacaacatttatagtttcaaaaagttaagtgccgatgccgttaaaggatggcaagcatttgaaaacggatacttgtcaggagccaacgtggtcacttataagtctggagccgtgtaccattctaacatcaccagcccatctgtgtacctgaacaatttcgagatgaaccttgcagtggagaacatgccgcctagtcacactagcaaggggcgatttggtaataacaaagtcaaagccgccaagtgtgaaccattgccttcctgccctcataatcatgatcacgtgttcgaacacattgccaccggattcaaatgtgtttgttgtggtgttgatgatattttgcacaacatgctgtgcagtatttgtaatcaggataccaaatgcaaaccgacagctgcttgtgaccacgagcataagaacatcaaggaacactgttgtggccagttcaaatgcagttgtgttttgaacattaggtgtgaatgctgtaggatttttagtgctaaaacaccttgtaacgcttgttgcaaacccacgagaacgagagccaaatgggtcggtagcgtgtcagaatggtatgccaaagtgagaggatggaacacaaacgatcagggtagattagtcacaccaagcatttccgaatgcattccagtcgttgacgatcaacacggtcatgaatgtcctatgtgcaagaattggtacacacacagtcacaagtatgaaggaaaccttagacacgatatattcagaggtgactgcccattttgcgaagattcgaaaaacttgaaggttggggaaaaatgggagaatgccgatgacgaagagaatcaacaagacggatggttcagttctggaaacctcaagagtggaaaacctggcaaaaaagaagaacaacccggatcagaaggtaaaactgatggaaagaagtcgacacagccgaaccccccaaaagacaaaaatggaaaaggaaccaaggagggaaaagtcgagaacaagtcagaaaccaaggatactggtaagcgaggaacggcctatacgaaggaacgagagaagaccaagttggaagctgtggaagggtacacaccaggtgttaaggtgtggaaccataaaccaacagacacagtagcggttaacgacgatttcacacataatcatcgatgcgtgaaatgcggaggtctgtatcaacacacacatcgttattcgtatttgaatcatgctcagcatgtagatgaatgccctcattgcaatgatgatcctaaaccaggaaaacgctcacgtgtacgacccatctctagcatgagtgaaggagccactgtgaaggtgggacccaaaccaatatcaacaccatgcttcaacgccaattccgtctcaactgaatacaaacctaataagataatcttagccttggttagtaagtacatcacgcagcgcgacatgagagcgaaaccggaagacaaagttgagtataagaaccacaagaacgaaataattggtacttatgctgtgggcggagctaagaagacatacacgtatcggttggccggggctgacaagccattgaggaccaagctaccatggtcgctcaaagatgttttcgtgtttaaccgcagtttccaggacacttattctctaatcgactccaacataatgaccaacactgcgcaagagccttggaacgacattttagagaaaattcacaacaagggccggactaacaaaatgattgtcaatcatcctgatgtgaacgttatgtttagatccaaagggaaaattatttatgaccttgttgacaggttcagagtggtgactgatcagtttgaacccattaactcaaacaaccttacaagcaccatattgagattaatcagttattataggaaacaggctttggcgaatgaaattatttcggatgatagaaccacagtgtcataccccaaccagcacagaatgcacgtgctcgacaccagggattatgatgaagatgagagtgtagaaactggcacagatgatgagagcgcttccgggagcgacgatagctcagatcttgatctggatgaaaacatacagtttgttcacagtctcaacaatggagaacacaaggttaagattgacaacagggtaacttatgactggaagatcacaaaagatgttggcacgccaggttcacactggatcaaaccaaccaatgacgaaaataattacaggttggtgggtacaacacacgatcagatggatacaatgaaagttgaaaaaattgaaaaactaccaggattctcattaataacttccagcaaaggcatacaatggttggccaaaactccatcttacgagatcgacgatgatgtcataaactggtgcaaggaaaacaagtacgtcagcttaggacccgacgaagaaggatgcagagaaatcgacactcacaaacaaccagattggatacagaagaatgtcgttgcaaatatgtctgacataatgttggtggaaacatctctcgatgtctcacaatgcaacctgaatgacattgtgagcgttaatgatgtgaagtggttacaaaatgaaggcactggcgactgtgggtacagggctttaagacattttatggcactagacttgaatactgttgaaacgctgacaggaacaaccatgtggcatagttctgacgagttgggcatgttggctaaccacaaaggaaggaatttgatcacttacaagaacggagaattcaaagtgtacagagccaatcacaatccggagtgcatctttattatggatgctacagcccaaggattcaaaaaccattgggtggcagctcaatttggaaaatgttatggtaacattggccaggtccatgagaccaattatttcttcaggaagagagaatggataaaccagaacagtatggaaccagacatttcttatcttgaggctctaagctatgtgatgagtccagaagacaaggccacattccatgccactctgaaacactcaggtgcccttgtaccccaggtcttaaaaatgttggtgcccttcggcttgaaaaatactggtaacttccacgagtacaccactaaagttttcgacaggagcgaatttgataaattcgtggtccgtgaagttattggaggaagacaaatatcgcgttggaaccatcctacgtcatttggaaaaacaacacaggccccgaaaagattgctcactcattacaaaggaccttttgatcaaatggtgttagttgtgccttatgttgccattgctcgaggaacttgggaggattactccaaagattacaaacacctcagcatttattatagagccggtgagattgatcagttcaatttgtgcaatgctagcaacaaaaacgatgcggtaatcaaaatcttcacaagagccaccttcgccaaccaactggcatccagtccattgaaagagaaaactattgtttgttttgatgaggttcacgccatggatggatacttgtacaacgccttgtcatgcatgaaagtcaatcgcaaccctattattttaatgtcagccacgcaaggtgatttgtcagcttacaagcccgagtcaaaaattcccatcaacgtgaagtttggtaatgttgaacctagtatggttatgaaatatatagaggatcccgaaaatgctaataagagaattgctatcatttgtcccactgttacttacggcagggagaaattcaggttcaaccagaaactgagaaagcaggtagaagagatcaacagaaacagtttatctaaaaccaagtttgctaatcgtatttttatgtgcacgagcattatggctgtaggggtgaacattccaaagctagacgtaatatttgagatgggagaaagaatcgaagtattgcctcagcctttctcaaacgttatcacacccgaaaatgtatctaatgcaacaatggtctcttatggtggtgtgaccatggcagcggctttgcaaactttgggccgcgttggaagaggcagttctccgacagcggaagctttcattgccattcccacagcatccgatgaactccccttctcattttatatggaagcaggtattgacgtacccgtagcttttgaagacatgttgaatgtgcttaaaacttatagattttctagggcccataacccaaggaatgtatcatccgatgatctcgagcgttatcaaactttgcaaacattggcaattgcggcaaagaaattaaacgttaactataacatcttgagacctcagaccgcggatgaaattattcgatcagttctaacatctccaactataaagaaactatcgtccatgaatgctgttttgactctgggcgctaatcccgttggaaacaaatcccgcgctggtaaaccgaatgctgactcttggaacgcaacgtgttacgattgtggtgaaacattcatgtcattgtacgatttagaggggtcctgctgtcattccaacctagctagtgtaaataaggaaaatttagaaaccgtatggaaagtatcagagagattcaattggtcacacaagttcaacgagagcatggtgcccactctgaaccttgaagatttgtccaagaacgggagaatgactgtgaaagatctcaggaccatcctaactactgttcacgttattaagttaggcgatgatttaatgacagcgttcaatgaggtggctaccacgcaaccgtaccagagaaccaaaaagtgcaacattttcaaagttaacgtcaaacccacggaagaagggctgaagttcgtggcaaactatgatttatacgacatacaaacctcacgtggagtcggtttgctagtaggagaaaaaatcgtcacaccgtgcacgttcagtgaggggagaataaacccaagaaccagagtggaaggcatttgcttcttgattgtatctagaatgaaaactggccacattttgcacgagatgagcgcttgtactagccccactaacacttcattaaaagaaattaataaaagaattgatgaggcggatgtgaaatccggagtggcttcttcaggcaaaacacactatttcttatctagtggatatacaattgtgacgaaacaagtagacatggttagaaaggaccaaactggtcagttcgtatcggctggtatggctatgcataaaccgctgcccaacaaagtatgttttgacgaagctacgatgtggcaccgagccgaaatgatcttctataattgggataaggttaacaaggtggccttcattggagacaatgatcagatagcaacacagaacaacgtcaacgaatttctggtcttgccaactcagaatctgggcggtctattagccaaggatgagaacccgttgagaagagcaagaacagtgggaccacaattcggtagagccattattcaattcatgaacttcgaatacaatcctgactacccgaccaatgtgaaagttttgcctatcaacagtcccactgggaaaaaggtgatgcaaaaacttcatggacaacccatatcccagattgttactgtcggcaataaactacgtgacgaaataatgttggaattgtcgcggtcaaccgatgtgaaagttaaggctataccagttaccactataactaggtaccaaggaggacgctgtgaacacttggtgtgtatattcgaaaacgttgctgagatgagctcaagaacagaagtagcgtataccatgttaactagatttatgaagaacggaactttgttggttgaacctgaagctgcacgacacaatttaattatgaatgaagtagcggaaaaagccagaacgagtgttgattccgataacattcggtcaggtaatttgaactttaatattacttggacagcattgctgaaagaagtgaatttttttagaaaattacaagaacagtacaccatgatgggagagaatagggcttttggtagtgtagtatacttgctgtgcaaattgttccgcgttgatatgcttccaaggtttgtaggcaaattgataactgaaggcattattactgaacacaaaattgtcaacaacaatctcaagtgcgccacaaggtctgttattaacagttctatgcaatccgacccggatgtatcacaaatggaagaagcgatggaggaccatgatgaagaaaagggagttttatggcagacaaaatggaacaaggacatcactgattgtttggcggaacacaaatttccgatgccaaaaaagacgtgcatgaccacattgcgttattacaatgaagctgaaatacgattcatgactaatatagctggaaacgttaactcagattgcccacccccatcggcctattatcatgttgaaggcacaggttggtcaccagctcatcaagcgtatatcagtgtggatttgtcagatgattacgtatcaacaaacggtattatttataaaaacattcctgattggttgactgagaccgcggacgaggttgggcctccagtctttgatactgaaagaattgacaatatcgtagtaatgccaacaatggaagaatgttgctgccacgataatgggaccaagtgcttgtattgtgtgaatgtcgataatgaacataaaaatgccatgatgatcgattgttttaataggagagtcgtgttggagacaagtggtgaaggtttgatgtgcggactaaatgctatttcaatgcaggtggacattgatgaagacgttctcaaaaaggctattctcagcagtaaaaatgaggaaacgggggagaacaatttcgaaatagcagatttactcactggatgcgatcagatcggtcttggtctggtagtgaaaactagagagaattattattttgcaaatgatcattttaccggttctgataatgacgcatatgtttactatagcggagcccattattctgccacaatgttaagctcggagagaggtggatttttgtactctgacagtcaaacgccaaagaaattcgataggaaagccaggttgaagaaaatcctcaaagacgcttggcatcagcacgattatttcgtgaatgtgtattattacaatcacgtgtcaagaaggttgatgcgatggcttaagactttgtgggcatctttcaaacacaacgttagtgctgtcatagaaattatcgtcgattatcttagacgcgcatatctgaacgtgaagacagccattgtgggaggaacgcctctgcgattgcaagacgtagctactgcacaacacatggatgtattgatgaagttgaacgagaggaagaaccccacaatcaccatagtatcagacgacgtcaaaatattggaacccattgccccagaacactggatgaggaaagatttgtgggactggcctaggaaccccaacgatgatgaaatgctgcagtacgcagagtacctagagacgttcgactcaaatttgaacttaccagattggttctttgttgatgaaattatcctcactatggattccactggtgaaagatttaaaaacatcagcgttcgttcagccttcttcccgaagatcactgatgcaaacactaaagagatggagttgcacatgacgacaattagaggcctcagcagtccagagtggattgcggacgctaacgttgaagccaacatgaagatcataagtagccatagaaccggactatacaacttgtggacagagtggaaaactactaacgaacggttatctaaaatgaagaagacagtatttttcgatagtaacgataatgtttacaaacgcattcagatgggtttgtcaccatttgtttcagcttttagatcatcagataagatcgtactcagactggttaaggaccttactgtttcagatgatgttatggcctttttaaacgagaacggggtgttctttgagggtcgcgatttgctcaccatcagcttacaaccagaaaatttgggttgggaaacctacgatagatttagagtgttaatgcaaacacaggacatatttggagaagcacctttccctgaaagagaaaatctaattctatacggaacaactggctatgagattacaggtgattctcgcgatgacgccacgtggtcgtgcggcggcatgattgcgagccttaagtctaacattcttatcttgagaggatacaatggtaacatggagaacatgatcaacacttcttgcagttaccttattacgctgttggagtcttctacatcggatgcaaaagctatgattaagggcgccatggtacaccactctacagatggttatgtcactcaaactgtgggtcaggatcaaactaaacccgtggggcctggtaaccaaatagaagaaatcactaggaaattatccttgagattgcaagtgacgaatgaggtgaaagtcgacagtaattccatcatgtcatatctgaaatcatcattgatcggaaattacagggttattacaggacagggtttgaaaacggccacggaacttaatcagtctggattccttaaccgggagtgtggggactgtggcaaggtgagaggaacttatcagaaaacagcgaagttcacctgctcgatatgcttaggatttgacgctgttaaagaacaacctggacgggtcaacacacgcattaaggccgcggatggcttgccagctttttacactttaggagaatatgttaacacagggttgatgttggacattctatggagcaagaagaacaattacgaaaaaccaactgaagtcaaagggtacagaggcagtgccggaacagggaaaacttacaagctcgaaagagaccacgatatggtgttcaaggctggcgatttcaattggcaaacatggataatgtctttggccagatctgaaaccgccacggtcgtaattgacgaattgtcactcgtgccagccgactttattgcatggttaactcatcaaacaacggtatttggcactcttgatccgaatcagtcagaagctccttgcctattgatcgatcatactaaaattgaagtgatcactaacaaactagaattgttgacagtgtgccacagattcggtccattgggttgtaagttgactagcattttgtcgtcctacgaggtcagtgcatttgatggaaacagagtcgatcgtattgtcagatttaatggcaatttgaacacgtaccatgcaattgtggacgcggacataacgatcatattggaccacgaaactgagggaggagaaaagattttccaaggaaatgaagctcgtgttgtatccgtcgtggttatgccatctttctcatggaatcctgaatggcaaaaaatcctttatacagctatgactagatataaaactagtctattcatatggtacaagacagggaaaggtccgatcatgagtttcatggacatgatagctccagtggacataggtgcattagtcacagcgcgaggacaccatgatgtggaattattgaacgtaactctaaagctcaaaaacgtgagcgatgaggacagatctttggcaataatatccgtcggacaagaatacatccaagcccctatcaaagagccgaaagaattcaacagggaagagtggaattataatttcgctaatagaagaactagagagtcaatttatgaaaacatgggattctctcaaacttggatagccaaggcttcaggatcaaacatttacgcacagagaactagcacagccggagtcactttcttgacgtggggtgaagagggtcaaccagatactatcaccgccatgctggaagagaatctacagtcaaacggtgatatcattgttgagttgtacatgaataagaaacctacgatgttacagaagatggccgtaaaagcagcactgtccatgtggccaggaggatcaacgcccgaagagacagtatcaaactttaggaaaatgatcaaaccgttgcctggcaagctgaacgctatgattgaatcaagcagtgacgtgttttcaaaaatagcagggaacatcatcaattggtttcacgacatgttcatgtacattctgagcagtatcaaccatggagctgcaaagttggtgttcaacagtgagcagaaatattatgtagaagaaatggacattggacattatttggattatctgacacaagattcaatcaaaacagtggatggaccgattagcaccatcaaaacaatgtttgggtatgttatcaactacaacaatcttaaaacatacgtttcagttagaggacaaggcaaaactcagatagtaaatgtgtctgtagacgataaggccgacgggctgaaaggaattcttttgttggacgacatcatcagaatattgtctactaatcctcaactgtaccagggatcatacgaggagtacaccatgaaagattcggttattgtagatgtcagaatgaaagatatagtaagatattcgttggtgggtaacacaatgttgaaacacgagtcggataaatctgttatgagtgttcgaaacgaaatggggcaatcaatagaaatcgccactataatgaaaatgggagaaaatcgagttttgattaagcccaacctgaccaacgctgtgtcactcgatagcattattgccaacctcgaacacttttgcgatgacaacaaacgcggaggtaatgtgggagcatggaaagccttcaagttgattctcaacaccgtttggctcaagatcaaaacatggtatcacaagtgcagagtttacctgacatctaaacccatcaaacagcaaccagaacccatcacctgcagtcagggttggtacaacgacttcgtttacgatagcagctgcagtgaagaaggaaccagattcttcagggaatttggcaaatcatccacaacaactattctgagtgattgtgctatagtcgagaccaccaactcattcatcgtaatcgaatacaaacgcggagctatgcatttgaggttctctaggaaaatgagagagttcaaaccatttgtcgctcgaccttggggcgctgtgagcggatttttgagcgactatttgcatcttgcgaaagttttgatgagaaacgaaaaagccatggatcatgaacaatggatagcagcctggagtgcaagggaaaaagacagagttatgcagatgattgattcataccgaaagtacaaaactgagaagaagcgccagatattcggtgaccagtacgatgagcaaggattctttattggaagaaaagttacggacagtcctgtggataaatatgatactttcccggaaactggtcgaactccaagtaagttcgttgttcctgaatttgtgctcgacgatgacaggacacaaagtcaacgaggcgcaggtatggacatggaaaggcttatcgctagttggttgggaaaacccgtggaagaacaatctctgccagagacatggaagaaagtccaagatcaaatgactagtaggtggaaccagtacgtgaatatcaacgatgatccaggaattgaattagaaccatctcaacaactgtatgacaatttcgaggaggacgacaggaacgcaccatgggcattcaaaacaatatttgtgtgcataccaccagggggagggaaaaccaccttgaaaaatatggatcccgaaaattttattgatgtggatgacattagggaacacaaagattggaccacagtacctagtgccaacctatcacacatgttggctgttgacgcatccaaaaccaaggatagtttggaaaaaatgtgcaggggaaagtcggattatgggaagatcatattgtgccaccacccatctcaagtgcccaacaataaaagtgctgatgtcgttattagtgttcatacttggacgaccggaaaaatgcacgaggaaatggggaaaaatgatttggtgaacctaggaaagaaatacagcatgtataaacactcctccattgaggatttgcgtcagatgttgaaagacttcaaagtgagccaactaatggcggaaatcaacgagggcgacatacatgcaaacccagaacaacccatgttcccatcagcagtagcctattatgagagcatgtcctatagtgatatttatgaaataccacacccaaccgagggtactattaaaattaaaatgcctcaatacaagaagaaagaaacaagtcgggttgtgatggggaaatggccagcggagtataacagaccggtgttccatgataaagctgacgcaatatattgtgccacgtcaaagagattatggggagttcaaaaactgaggaaagtgaaacagaacaagcatgaagtgtttgagcggttcaagaaagcttatttcgtcggggatcaagaaagaatgctcaaagagtttgagactaacaaagtcgctataagtgacaaaggcaccggcgaatggattagaactcataaaaagatggagcaggtaatagcagaactgtacaaaatgtttaaagagagcggcaccaacaacctgttgaacatgttcaataaccacgtgaaggctgaatccctttacaaagaagatgtaattaaccactacagtgaaatagtcccaagacttattgtttggcatccgaaaatatttgccagtttgttttgccctgttatgaatgagcttaaaagaagattgaagatgctgttcaaaaccaacgtagtgtatactgatggattaacgcatcaaggcattgaagaaaaactagcgagattttcgccggattggaagcaatgggaaatggacttttctaagcaagataggcaaactgaccagaacgccatggaatttgagttccatttgtatgagaaattgggcatggatcaagagaccctggagctatggaaatcatgccatgccacatggataagcagatcctctcacaccaaagggaaaagagaatggatgaggaaaactggagatgcttcaactgctctcgggaacgccattaataattttagggcgatcctgcgattagcagaagacccaagatttagaggtgcattgatattgggagacgacagccacgtattttacgagggagaagattttgacctcaagtggatacagaggtccatagaaagggaaagtaacatgaaagccaccaaagaatccaatttgttaggctctttttgtcaacttatcgtttcatacatacccaacaaaggatggtcagtgtgtcccgacttaaaacgattgtacgagagattcactaacactaacaaagcaatgtgttttgatgaggaggaacatagagtacgagccgctagttacgtttacatgattggaaacaacgaaatgactcggaaaatttgccgtacgttgaaattggccacaccacccaatcgtagacattctctcgaggacctcatagcaaaaacatgtttgaaacgaggccttacgtatggtagcgtctcagaaatgactcggtatttgtttcaggagttagagaataacatgacgactgcttataaagccacattctttgtgcactcccgttagattgccgacaaatttggagctaaaaacattcctgtcaaaaaccgttccatccacaaaccacttagttaacgagtgagcagttgattgtggaggcccagttgggttccatataaggcaagcaa

SEQ ID NO: 894 - DNA, 15394 bp, Morchella importuna endornavirus 2
  source 1..15394: mol_type = other DNA
gtcgtcaacaccaacacctaccaactcacaccaaccaaccaaactacataccaccattgattacaaatctttgtccgagaacagcccctcggacaaagattaccaaaacaacccccataaattgggggccaagggctgcgactcgctagaagtcgtaaattcatctagcacaataactgaatggattcattccaagcggaacgacaaatccattcaaagatacaaatcacgcggatttacgacatgggatgctgttcacagtacgccgttcggaatatccgttgagaaagaaactgagttagctgagaaatttctcaatgaattagcaacacgcagctcagaattgaaacaatgttacaacgaacaagtggtgtgggaagaagatgaaaaacctgaaccagaaggtccggaatttgaagacctgcagccgctgaccgttggagccgccacacactgctggttgaacataccattcatgatggaaatttggctgcaacacattaaggaccaagagcttaccgaaggcaatttcgaaacgattccagttgctgatctattagagatgttgaagaaagtttttggtaggatgaagcggaaagactatcgagccaagaagaagcaattcctcctcacagaaactggaaaatggcagcaccatttagaatggacttcaaacaccaaagatgaatacgccttcaacttgattgaactagccgatgagcttgaagctagcgcagaagattgggaagaagcgcatccacccccaccaccaccaccgccgccgaaagaaaaagtgatgagagaggagtacacagggccaacccaagttggtggctcttcagactgttggagcgcgttacccctgatgtggcaaggcgagccctggcatctcggaggtcatgttccaccaatgcgagatcaaacgctgaccatcgatgaagtgttggaggctttggaagcatcaaaacaagccaacattaccttctgctggccaacagacgaacccagatacactattgatttcgcagccttatacacgaagaaaaaggcttacaaattcactaggtcgcgaaaactagtgcacattgaaccttgtgttgaattcgacgggaaagtatccttagaattcatccacaaaacgctcaaagtgcttaaaaacttggaggaaaaagaaaacgctgataaacccgccgagacacctgaaaaattcgttattggattagatccagggttctttttggctaacagctttgtcgaaggacttagactcgcaacgggcgacgatggaagtgcacagtaccgtgaagcagtgaacaatcacgacgaccgcgttgtcaacaacacgttcgcgcgcatagagctgcaactagttaaaaccgtgaaaccgagtagcaacttgctgtctggtaattactcatcgatggagcgtacatctttcgtgacaagtgagcaaacagaacaaagtgcagacaaagagttcctgttggacgtttgcgcaacgtacgcttacaacaacgtggaccacgacgttaccacatacgacgatgccacagctgaaaggctcgacagacaaacctggtttgagcgcaaaaccatggatattcagccaacaactgctcaaagcacgtactacgtagcaattgaacccgaattcaaccgtgccatgatcaccgattttacggtaattatcgggccggaactcggtccagacaattctggcaagttcgggggtgcgttaggctggtaccaaacagtggagggactaacttactatagctttaacactgagtcaaaggggacacaagtcggatggtggcacgaatttctgcgtggcaacaatcactctacaatcaggggcgtaccgttcgactgcgtagcgagaaagtcattctacggaatgcaagtggttattatcacgaacttgaagtacaacttgctaacggtcatggagagcaatgaacacttcttcgacattcctgttgtggacacaacgttcctatctaacttcggattgccaaaaataattgtcagacgaatgcgattgaacaaagatctactcaacagattaatgacgaaaaatctaacgggtaaagtagggaaagacagcttgacggagtacggcatggctctcagctggtattcatacaacaaacgtggcgtagaactagccaactacaaaataacccccgaagacgtgaaaacccacgtttacgtcgcaatggtcttgcaggcgagagaatcattctacgatgctatttatgaacagttgctaaaccccggtttaccaaaggtattgtttgcggcgttcagctccacagccactgtggccatggacatgcttggcgatacaactaagaccattgacttcatgactaagattgaggactacattaaactgccaaacgtccgttcaatgatagggcacagcatggagaactggatgtctattgacgtttggtctcagagctcttcgattattggggtgaaattaaatgattattcaatttgcgcccaccacacaatgtgcttagaagcaatcaccgattatagatgcacttgttgcagagcacagacggctccaattgaaaatagccgctgtatatgctgtgcttataacccaaacccatgttatcacgaactaaatgatgagcacaaagacccagaatcaagcaacaagtgcaaatgctgcaaccgcagtagcagcgcatccctttgcattgactgtaggggaaacacggctgaatatatcacgttggagacaacagcagcagcgagcacgaaactgggcgtcacaaaacatcacagggcaaaaaaggaggtagtcaaaacgtcgacaaagccagacggggaaacagataaaccaacagaccagctgaaaacaacgcacactccgcacgatgattggattacacaacaaggttacacctggcatgacaagtttaagaaatttgtgcatgaagtggatgacaccaacgcttgcattgacctgaacgacacaggcaaccatcaacataggtgttggaaatgcaacacagtgtatgagcacagtcatgctcacaagtccactttacatccgcaattctttggtgattgtcccacttgtcccaaacgtccacctccggaaaaacgggaagaaaggaaaccaaccactatcagctacactcacgctcaattggctcaatccattccgtcaaatgcactagcaattctcactggcaggattaaattgaacgaactcgcacacgtagacgacgcacaccccttattgagtgcaattccatttatctgtgttggaacacccacaattccgaagaccatgttcaccatcagcgatgtacaagacgtaacaatttctgattgcggtttggattgcgtaaaaacctatattggaatagacttctcagaagtgcgcgcaatgaaaacaattaggaaattgaggggtttgggcgcaagcgacattcaaaaattgcttaaggattactcaatcaactcatgcatagtggatgcagcaggtgctcatttcagtaggtccaatgcttcggaaaattttgcagtaattgtacacggaacggcaattgataacgacaatgacaagtcacattggcagatatgcaaactccggtggaaagaagacgcaaaagtcgagtatttttgcgacccactatccactccccaaaaacaccacacggaagccgcaaacgtgtacaagtgcaagtactcagaactgtcaaatgatgagaagctagcattagcttttatgatgattgataagcacacagttgccataacatccgatctcgagacaccaaaggtacataacgggtacttgtataactccgaaacgcatgagatgaggaacggtcagtacaacttcaagctaaaagagaaacacgccgaaatggctaccgctatggttgaatgttttgaaaccggcgtcatgccagaaattctaactggggcttgggacatcgatctctccagcattttggacgtacaaacgcatgttgacatggccataagagatgaattacacaagatttgctcttttctcgctgaaccaactctgcatggcaccattacgtccaagtatctaacgacagacttaaagggtaaatcaaaattggacttgactgatacaaaactgaaaaacggcgacttgatcatgattagagaaggcacttctttcaagccgaaggtgctatctttgaaaagcggaatggttgacgtaaagtccaacgacaaaaccggtttcgcatcgattgacatagtagtgccaaaagccagtttcatgagctctataataaaactattcgcactaacaagatgcaacacgacagaatcagacctaatcaattcttacaagcacaagtcaacaagaatcactgttggagcaggcggaaccggaaagtccaccaacgtttcaacagaaattaagaaatggctggaaaaacaagacaaatttaccaaaccactggtaatagcctgtacatcgggaggcgttgacagtttaaggaaaaagttacctaaatcaatcatggtttactcacgagaaagagcgtcgtacatagagttacctgatcacgacgttgtgatatttgacgagtgcaccacaattttgccgtgggagctaggattgatcgttagcgctggtaagccaatgtggctgctcggagacccaacacagataagtgtgatcgacttctctagcggtggtggaggcaaggtgatgctaaatgctatccaggcaggcgaacgataccaaaaagtgaagaagctaacttctacataccgatacgggaaaacacttgttggaatgctgagccaacatccggcaatggcagacctagaaagtgtcgctcctcacgacacgaccgtcaatttgaaatggttggagaaatggaacaccgacgatatattggatttgatcggggatgctcaagtaatcctttgcttctataacgcacacgtcaagacgctaaccaaggccatgcagaaagcgaggaagtcgatcagaacgatcacgactgtgcacacataccaaggcttggacgcagacaaggtagcagttgtacaggcgccgttaagtgctaccgcagacacgcatttgtcatttggtcattgcgtatcggcagcgacacgatgtcgcaccagcctggtatggataactataaatgactacagcccttcaacgtcactagcgggtagactaggcactttcataggtgcaggccgtatgtcaaccggcgaggtgtacaccaacacgtctaaagttcctctactaatgaggaaaatagaagctaacaacagattacgcgacatacctgatggtgagccttatgttattgactccgttaggccgtttatggcatttgtaccacgtggctggcgagcatgtgcactaattagccccacggaacaacaattaggatcttatattctcagtacagacgtaagacagatacaactgtggtttgaatatgaatggggctgctgcacttggtcggccacacccatatcatccgaccccatgcacctacagttttcaactgcgtggaacagcaatcaactaatcgccacgcaaaagaatagattagacttaccactgttaaccgttggcgacgcagacgaactggtgcgactgtcacaaaatgagaactggtcgttgaacgtcaatgggatagctaacaatttcttcgtggagagattgtgtttagcaggtttgttgcagccacacatggtcgtgatccgagcaggaaagctgtgctcgggtagtgcacaatcctacgagtatgctccgatctacgaagaaagatcggtagagattgacacaaacgatgaaatattaactccatcgcttgagaagcggcagccagaactatacaacagcgtaaccagcgcatctatgagctcaaagaatttcgtgtttggggtagggaaatattttgaaattctaagtagtggcggaaagaatgaggcgtccaaaccaccaagcaacaacgatcttgcagaagcgatcaacatcgtaacacaaacaactgaggcgggaaccaccactgttgaccatgaaacagctgagattgtgaacaaaattaacatggaactacccgatcccgatacaaacttaacggactttaacccgggattgtttatgcggacacttcaatgctttcctggaaccagcgttgtaacagtgactactgagcaaaatgaaaatggtgcagttgaaggtattaatttaaaagtcatcggactcaatgcacgaattaactttaacttggaaacgaatgaactagaattcacaaatgtgccaaccaaatacgttaaatcattaacgacgttaataaggcattgcagcaccggcgtggacgtggaaaattgcggaccggctatgaccaatctacttgagatcggctggtggagaattcgaatcatcgcatacgtggctaaagtgtaccatgcaaataaaatggcacttgttttaacgggtaggcttgaagggtggactgtggagaccatcgggacctgttgcgccgcctgtgctggagtaaaattcaccaacggaaaccacatcgtagttgtgacgaaagattatatgacagccgccgctaggacggtggtgggtgagcaatgtatgacgatagccgatgcattaaaccaagtaccaacatgggactaccttgatcctgagctcgacaacaaagcttacagtcatgcaattttaactgaaagaatttccaccgcccttaaagacatcccacacggattgacgggcttccaaaattggatgtggtataacaaatctgacaacgttttgctacgcactgagataaaacagactttaaacaaagacatagaaataactaattatgatgatatgagcttgtacccattctttggtaccaacgcaacggctctgaatgtttggaacgctatgaacaccaaactcggtgccacttccttgctagctaccgtaccggtgagttgccatacaggcgggaaacggcaggtaatacaagtactacctcccattaacttgcaaggatatataaacgttgctctcaaccacctgtatgacatgtttagagatgacgctacggccaggctaattgccaagaaatacatgggaaagattggagctaaggaaatcgagaggctgccagggatggcggaatcgattgcttggcacaaagctaggaataccgcgacatacagaaacatagtcagtagattgtcaaagcaagaaattaaagccctaaaggatgaacgaaaaattgcgttcgttccgacggaatgtaagatagtactggacaagtatgagatgggtgcttcaattgcatgcaataaccgaaacacggtatgcgatggagcaagcagcgcatttgacgtctacacctgtggtcttgttagccacaagaacaaacaaattcaattaatgggttcaaccatttacgcagcctatactatacaagacaaacaagtaaaatcatggtaccacccaactgacgattggtctatgttgcaatttagactagacacaccattatatcgtgatatgatcaaactacacaactcaaggttggggtttgaggacccagaatatcagttaaacgatgctgaattgaggggcgggaaggtatggacgggaatgcatgatgatttcaccacagtaacagttgtttccaacccatacatgctatcatactcagggtcagagttagaagaaaaatacaactcttgcgctcgaataattatgtgggctccgcgggaagtgcatgaacaatctggcattcgttttgtacgggtgccgaattcgcagaaaatctttacggttcacaaagaccaagctcaagcaatcgacagcgggaagatggttaaaggaacatcgctcaaatggcatgtacttagcagccacggaccaatagtaatttacgaactaacgaatgacccagtatggtttgaaccagcatactactcacaaaggacgataataatagatacgccaactttcttgattgatccaacagaaatattgaaacaaagaagtttcgttaaaacgaaagcaattgcatacaacttagacatggtttccaacctgcgtaggagactattgcgtcccggcactgattgggatgacttgctcgtacaagctagaacactcgttaatgtagcgcagtttggcacccacacagtatcagcaaggtacagaacaaatgtagctgaagcaaaaatggcatgcagactggcttggatgactcaccaaatggaagaaactcaattttcactgttgggaatggacggggataatttggtgagaccaaaagaaatggctgctttggcgttgggcaaactcactgaaaaactatttccagatgttgatgaaaccgacctagcaaaagctatcaatgagtttctgcaaattgacaaagccaagtgtttaatttacaacttctttaactgtttgaataaattgaaactcaaaattgatgaagggaagcgcagggtgctcagcggtgatgatgttccatggcaaccaacggacagaaatttctggagtaacaagccatcagcgttcgaaaaagttgctttcaatgagactgacgacgacataaccatttacgttcactgtccacactgtgctaacccaagtcaccgagccgcggcagaagtgctaagtgaaggaaagattaacttttcaacacaccaaaaggccatcggacaatacttaataacatcagaatgtacgcacaaccagcgtgatggaatcaagattcagtggcatgggtacagctctggaaaattggacgggaaaacagtattgtggtcatcggaacaccgaagaattaacacaaccgtaaaaatagccgttgaagacaatcatctcataatagaagacgaagtgctgaacctaccggctgacttaaatgttatcggcatcaactcttacccaatcatttctaactgcattgttaacgtagaaagcatcactgcggaagtcgaactgctgcttggcaactgctactcctgttccatcacgtatccatgcaaattagacgccgggtttgactttggaaagagggcgaacaatgttcaattctacaaggaaggtgacaggacagtgagaattattgacgaagccattgcagacgcaagtgacgacgaggaaatggtcgcaataactaaaaagattgacacgacagaatcattattccctgaagtggacgtagctaacttccttgaactatcaaaaaatttcacttacgaggaaacttctggtgcgggtatgagatgcggtgctaacgcttacgcacaatgcttcaacctagacccagatgacgttaacgtaatgctcgagacgataactcatgaagaaggcaacttcgaagtaacagcgctgttgcaactggccgagatagaagaaagggctttagctatttacgttagaggagaaggtgttgctttcacaacaaggtgtgaaatatcagagtcgatgaaagttataatccacaacgtaaaccattactccagtgtcaacctttgtggcagccatgatattccaacagcgctcatattcacaaatggagaaaaaattgatagaaatgcgatgaaagtgccatgtcaccatgatgaacagactgttacacatgacaacctacgcctaattgatacactactggaggatgcgaaattggaatcaataaccaagcggaaaagaacgagagtggagcaaccaagagaaagttatgagccagacacgaaaataaaaacggagaaacaaccctttaaaagaaccgttcaagaacgcacgcgagagacacgtcaacagaaaccggtaggagatccagaatacgaatttttcaacaaaatgatgaagatcgacgacggcgcgagaccgacactgtcaaatgctttaatccaggctctcaaagacaacaaaaatgatagagttccaatatatacaaatcccggtgtaggtctagttaataagcgtttcagcttaggaagaaatatgctacacactgacagtactcattttgtggatagagtgtatagaaacggagctagagtgacaaattggatggcactatggttgagcgaattcgaagcgcgcatcgcgacactaaacccaaaacctgacgatatttggtacgtgtattctttgagagacggattcgccactagaagccccagtgtgggaaaaggaagacatataaacataggccaacatagtgagaaaatgcggtcactaggatacgaaacgcttgaactcgatgaagaaccaggcagatttggggcttgcctacgcgttatttttgcaatgttgctaccatgctacaagaaagtttactttcggtccggaagaccaggtttgcacgtgttatgggctgaacatatgcaaacgagaattgagtgcaccgaaaaccacgtgatcatacccacaaacaccttcggtccgtttatcgacggaatatgcatcactaaacctctgtcagttacttcgattgctaaattcttagcatcgaacatgaactaccatgcaatatacggaattgatgagtgtgattactcatggttcgaaattaaggtttgttacttcgcacccgaaagcaagtatgcttattcaaactacaacttaaacccacggtacgccgaaatcgttaaagaaattacaatgattcccgttgacacggcaaataaagaaaataacttaaaggatataccgtttgaaatgatacaattgtcgttcacatcaatagcaacaacttggccagttgctctgtatcttgatcctgaattgccgttagtgtccagagagggtgccaaaccaaaagacagcaagttagtcactgagtggctagcatgcaggaacaacatcgacggaacaccgtcaggtgaagagtggaaaacggggagcttgctgcccaggatggtgattaataataattacactccaaagagcccactgattcaacacgtaaaaatggggaaaaccaacgttttattttcaagcgatacaaacaaatactgcgttagaaacgcactgtactattgcttgcacaggcgagccgcaatcaaatcgcacgagttcacatacaacatcaacctaatccagaacatttgcaaatttaaaccctttcaaacccaagctgaaactataagcatgtggacgatgctgggattgaacgtttgtttgaccgggggacagccagaacttgctgtaaccgtaaatgacggacctgttgactatttaagtattagggttgacataatgggaaaccaacatatgaccgtggtggaagaaggagacgttgacgtcggaggtgagtactcagcgacggaggtgagactcgaaggcgaacttatcacgactggtgagatgaatcaccaaattagtgaattttggatcctaagcgagtatttgatgacgagcgtcgacttgcataagtacgagtacatcactaggaaccaagatctcaacgaaaggttagtcaacgctagacagaggatgcggggcaggtatgacgtcaccgtggctaacacgggtggtgctcactggaaagaccacgtggtcaaagccaccatcggagaacaatcggatagacaattcttcataaacaactcattagtaccaggcagaacgtacatgttcagggctgcgcacggaatggttgcaagggttgctggcaaattgggaaacaatgtactaattccaagcggcgactttattccgaacgtgtacattgacatcgctgcatctgtggataaaaagaaaccaacaaagttaccaaagagaacactacgttctggcgcaaaaatgggattctttaaagctagtgagaagcactgggcaattgccaattatccgacttgggccaattacccggtaatggatgaaccagacgtgttgttgctcgtagattttgacaacatggaccatcatggaagaccatatcgtacgaggatgctagacatacccccgggaaatataagaattccaaacgaaatagacatcgaggaaatcaccctattacgactgggcggcccactcaggctgggagtaaaagccggtgaatggtatgtgagcactgttgtcgagagcagatggacagaagaagatttagtcaaagtggtgaaaaaactggacagacaatacagtccgacaaaaatcgtaaaaatgtggtccgccgtgaaatgggaacacgcaacgtggcgagatgagcaagggaaagaaacagtcggcaaccgcttgcagccactaaaacaaaaactcactattaacttgttgcatataaggaacgaaccacttactgatgagagcttgaggataataaacaataatgcttttgaaggcattgacgtaactggcgatgaattgacaagagccataataacttggtttccaaacttggactgtgagccgattgtcaaagagggtaaatatagagtcagaattcttccttttaatggagtactaggtgaaacagtgttaagtggaaaagaattacacgacccccactctttcacaacagtcacatttgaactaatcggattcggcagagacaagccggacaagttcatcacggtcaaagcttcaagttcatcgccggttgaatcactagacgaaatgaaagaaagaaaccacctgggcataaaagaatactgtctgcaacctacactagctcaacacctggtgatagtaggtgagttcggactgaatccgaatgaaaccaagaaatcagaaattgttaaatcactgtgtaaatactcaggcgtggatgaagaagcattctacggactaaccagcaggtgggcaataaatccaccacaaggttggcgaaaagctgcaattgtggcagattctagagatacgcagcatattttgaccaaccacccacatattggtttggcattcgagtacggatggggaacatggacaataaacaaaggattttcgtttgaaggaaaaccgataaccaaaaatagaacatcatacactactattagttcaaggaaaatcgaggactatcacctaggattcatcgatgtaaccaagttcatcaaaggaacagccgacagcgtattatcaatcgtaaatgcattgaacggaacgaggcacttcgagcaattcaaagcccattgtcaagtttcgatgcgaccgacttacacttgctggcacatttggaaaatagttcacagtgtctgcaaaatcgagaacgacacgatgtgttttagcgccaccgaaggtggatttgatcactcacatgaaattggggacaactcacagtgggaacaaagtctcaacgacctcgaatcgagggcggaaacgacgtgtgtattacgaagtcgtcaagtgagatccatggtgtactttgttgaccctgagtatgacgaggaatggataaacgatgatttaccagtgcgaataacgatcaagccaagggtttctgacttggtcagggaaaactttgactgggtctcaagatcgtatgggtccatcacaactcttgacgggtggacgttagagttctcacctgtggggttcggtcgtgataacaactcaacggacgtggacaaccaaattcgcatagacgacataaaaactaagggcgtggcgaaatatcaatattgggccaaagagattgaagtgacgatgaagaatgaaatgcctgacatagtcttaaacatgacaaaagaacaagaaagcgccattagaactaccaatgttataaatgagttgacatacgtggattgggataaagaaatcgtggagacgaaatacaacgcaggcaatgtatttgtagtaggaaacggaacgatgactagcccaaccaatgatgacgtagtggaagagatggtccccccgtcagttatcaattactgggatgatgaaaccgcaatgattgacggagtgattaatttacctaagagaaacataaaaatgaaagtaaaccctgaatttacaggtttaaaagaggtgagcaaagctaccatgacaaagtatccaacacacgctttgccgggctataacgtaagaatgaacgctggagcacaagcagtagccgaactgttcgggacacacttgtcactaaggacagtcgaacatgatccagagacagacgctaggcaattcatgagcatatacacacatcatggcgcagtggctgcactagagcaggtgaacatcgagccagatgaaattattgagtggcttaaagaacgaccggacaatctgaaaataactaaagaagtagaccagatattggcagacggcttggacatcactggcttagacaaagtcaatgtacacatgaagctggagtcaagactgaaggacgtgttgtgtgccgatcataaggacgccaatggcatgccccttaccatcgaagagcaaagaattagattaatcgtatggcagaaaaaaggaatcacggccctattcgctccggttttcaaaaaggttaaagaaaacttaaaaagatgcatgaagcaaaacgtggtttacactgacggcatgacacccatgcagatcagtgctttgctgaacaatattcaagctacaggcgtcacattcgccgaggacgactgtaagaagcaagacaggcaaactgataaaactcttattagaactgaaatgcagatatacaagaaactgggtgccaatccaagtgttataacaatgtgggccactgttcacgaccattggagagcgaaaggtatcggtatcaaattcgttggtgacgcgtctagacatactggacaagcaacgacagcaattgggaacgcaatagttaatttgttggtccacatgcgattcgtcaaaaagatggacaccaacatgaaaatgatgttgattctgggtgatgacaacataatggtgacaactggagcgattacggagaaagacatatcactcaatagtgccagacactttaacatggtatctgaaccattcgttcacgagagatacggcacatttctcagaaatatggtgtacaaaaacagcaataatcaaattgagttgggaccggacttcgtgaggttaagacggaaatttgaggttctaaatggcgtttccgaagccaacgatgaaaacataatgatgcgaagtatgagttacgctataatgatgggtgcaatacccagactactatcggtggtggaatcaaagggatggcccattaaattggagatgtggtatgagtaccactcggtgatcaaagccaccgcggaaaaatatggcactacggaagctcatattgagtcgcacgtgaacaaattgatcaacatgataagggatcagacgttaatcactagaacaaagttaatgttcaccgaaaaaggacattaagtgggagcacgcaaagcttatgtggaggttatgtaatcgatgtgtggc

SEQ ID NO: 895 - DNA, 14296 bp, Morchella importuna endornavirus 3
  source 1..14296: mol_type = other DNA
cgatctgacccttccaacaaaatgtccaacaccaacaacaacacccaagttcccaacaccatgaccaacgcatccatttatccgaataagtttggtagttctttagaaaactacccgtgtgtgtctgatacaacacacacgacaaataacgataatataaatatcgctgagcacatgctcgccgttgtatcaggcaagctaagctcagagaaatccactcaagctaacctttggttagctgatgtgacatcagggaaaaaaactctgatgagaaacatgctgatgaatcaggcacctgaactgcaaggcgtacaacttactgtgtgtgatgacaacaccagtaaaacactttatgaaattgtggttgggttgtatagagaacttagtttcaagttaactcctcataacttagctagtggtagctgtaactccctgacccttagacagccaagagttaaaaagataacagtgttgaggtctgaagatgtggcggaagctgacactagtgagccagttattgggtggcctggagactgttggcgggtgctgttaccacagaaaactgaggctcctagcttaataaccccatctcagctatgggaattgctagctgacacagtagcatggttcaggaaaggaaaaaccttcaacatgtggatcaagtacgaaaagcatgggaaaaactatcacattttgagctgtcaggatgcaccctttagaatcccaattttcgacatacctgaaggttatgagccattgaccgttattgagacatggtgtaaaccacaagcccaagctgagtctataccggttgaggtatcagcctatgagcttgattctgggatcgaattggactacgatatctctgatctttgggaagcagaatatctgacacgttgcagcgaaacgttaaaagggaatgatccagacatggaagaaggccttgttggtgctagggattacatagagaatgttctccaaggcctcggcataaatccagcatcagttaagcgtaacgcaaacattgaagcactgattaacagtaccaatgaacgactgttggaacccgcactacggccgactgggaaaaggcagttagaagtcagcacttcattggacagtactgtatgtgaacaattgcgtacagactggccagaaacagagttagttatggtacgtaaggccaccaacccacacacgtatttagcagctagccgcactgccatcacaaggtggttagtttcaataatgcccaaacacactgcgttgtttgacattggaggtgactttgccttgcatgttgatgatggtgacttgcatgtgcacagttgttacaagcatgctagcccacaggaccaagcgcgttacattaatttgaccggaagggctaaaaccctgctgctcaagaaattagcgaagaactcagctgctgatcaagaacaagctgatagggcatccatcccaaatgtgctcaataacctatcgcctgaaaacctatcttggtgcgacaaagcagcagaagactgccttttacagccggttgatcaatactcgtatggcatgtcagttgacacactctattacattaaaccaattgacctgttaaagatttatgcccacaaaagaattgtcaagtgcactcacgccattaccttgcccaaagactataaatacaaaaatgagggagccctaccgtttaatgaaggtacatggcacaaggtcaatgggaagttaatcatgacaatgactggcttgtcacaatcttatattaatgatttggagaccattgatttctacttgaacaaccctgtcattgttgcagacaattttatggtgtattgtaaggttgagggaagacgtggcccatatatgattgtagaacactacgtgatggcccgccatttcttgcacagtgactcaatgttacacactgtttggcaaaccactgacgataatgtggtaatgttgttccctgtcatagatatacataaaccagtatcattgttgatgagggaaccgtttgttatgcaaccaacagtgttcaacaggtttttcctagaaaaattactaaataggttgatgatgccttatacatgggaccaattgacagcttatgcgagcgggctgatcgggcgccactatgtcagtgcttcaggagtcacccaaacttgggatcaaaccacattcactaatgatatcgtgatcaagcattgcacttgggcatactggtataaaagtgatttgactgagtctatcatgcccttgattaaaaaagctgataatactacgcataaaacgttgtggtgggagcaagcttggaaagccatgaaaactttcttgatggaattagggcgacaatttgacccaacagacaatgaacttgtaaatgagttcatatcaacttattcagaagacacctcacacatccgagccctgtggatgcagctgggcatggccaagtcagcgtacaacactgtgcttgagctgggagctaatgtgagtttggttgatgtaattgccgttcaatacaacatcaaaacagatcaagttccagatgtcgctggaagcttgctagttaaagaccgcagtgtgaagcgaaacgtaatgagtttattgacagagtcagcaaacaacactataacactgcagtgcaacaagttaagccactgcccccatgaccacaatgaggcacacacacacatctacatatcccacacaaacaccatccacaactgcaattgctgtggcatcaactcaacgctgttcaatggttggtgtacattatgcctacagcactacccctgcactggaaaaaatcaaacttgcttgcatgaacataagttgaaaaatgacgaatgttgtgggctaagccattgtaagtgtaagaaagacgttaggtgtatctgctgtggacatttgagtctttccacactgtgcagggtgtgtatagatgagaacgaggatgaaaaaaacagctcggaaacgagtgagtcatctgatgatgacattgaaactagctcgagctcaaatgactcagtctttgctggaaaggaaaagatgcctaagaaagggactgaaaataaaaagaaaagtaagaaaaatgaaagcaaagagaaaaagaaagaaggaggtccagccaaagaaggtgacactgatgctaaagacaacaccatgacaggagtgaaaagccctgaagtgaagccagacgtgacagaagttgaagcacccggtcaagataaaggaacagatgtggaaaaggaaatggatcaacctgctgatgatacagacatagaagagtatgattacatgccagtaaatggcaagttcaactttaagggggtggtaacaaaggcctactgcgagcaaaatgttgctatacccacatacgcctacaatcacttgcataaatgcctttggtgtcataaagtatatcaacatgaacacttttacacacaaacaaagcattaccaagcagtgtacgattgtccaaattgttatgcagagacaaacataccagctacattgatcgaggacagtttcgcaccagatgatgctgaatttatttcaagaacctcagttgcaactccactgtttgctaacaccctgttagggaaagaagaaaaatacaccatttggcccactgctcacagtctcaaagctagtgcgccatctgtgtggcgtgagtgtttagaataccaagcttatatcacgtttcaagagcatggcagcttgaccattcctgacccagccttgggaatgatagaaatgttaggggaaaagagagagagacaggcaagacttaactgggctgatgatttatctgagagcagtggtgattccaaggggaacaagggagaggttcgtgttgaagcaccacaggccaagcaacccgaagagaccaacacacaagaactggacgcaccacgtgacatagacaatgaagagtccaccaaagttgataagggtaaaggtgttgacaccagcccgagcgataaaacttttagcagtctgcacatacaacacatgcccctaatagacagaaacaaaccctcttatgagcctatgcaagtaccacaacaagaattttttcataccctggatttctccgctatcgtaataaattatggtgaggccgacggagatggattctgtggggctcactctttagcccaattatggaagatggatagtgggttaatctgccaaaatcttaaatacatgactgacagaccagattggtggactgctgacgaattgggtgcttatgcaatagtgatgggcaagaatttagctgtcacatcaggcttttgctctagactgtactgtggaaacagcaagtcatgggaatacgactgcattactagcttaagtgagatcacaggagattcacattgggtgccggcaaatttgcgctatgcgtatttggccaattggaagttacaatcactagtagagttcaacagtaagattgcagcagtagcttcagcaatagaacgcggtgaagatccagaggaagttgcgagatatgatgacaggaaactactgaccgcgcaatggactttaggaggagctaattgcgcattccactttaatcaaagtcaggtatacgaaacatggaaaacatttcctggtaagtttattgatggtaggatagtccacacatcaaagtcatttaaaggaaagaaattgacagactacactttaaaacggccaagtggacttcgcttatgctacgcaccaaccggcatgggaaagaccactagaatatgggaagtggtgcaatccaagaagatcctgttaatcaccccttcagttgctactgttaaaggtgcagtcagccacatgacaaacatcatgaagaagaccaaaggcagcaaagcgatgacggtggttggaagagcacaagagaaatggtggccagcaggaaagacagcgcaagatgcagcgaatgcaaatgtgttagttatgacagtcaacgctgcgtatgctagatattgccaagataaagtgcaagctagtgtcttaaatctgataaaagacaggtttgttgtattagatgaattgcacatgatgactccgaattattacgcactgtgcagggtgctgggtaaccatgttaaacttgtgatgacagccactccccatggtgtgactgcttcttcagacactgcgtaccctgtaacaacgattatatcagatcaacccctcgcaacttacttggacgatagtccaccagtagacggcacattcattgtgtgcaaaagtgagagagaagctgatgacgacacgcttagcttaagaaatgaggtgcgtgacgagaacaaaccactgtaccaaacaatagtgagcaaaaccttgccgcatataaacttggacacagtgcatggtggaggtgtgactgagtgtgtgactacaggtgcaaccttgccccttgcaagggtgtgggtggataaaggcgtgcgttgggacatgtattacacttgtcagcctgccaatgagggtatgccctacatattcagtaaagatagggatgacaatacagtcacacagattaacaaaaatacaacgctagcatacacagccaaacgctgtatacgcatgcaactgcaagatgctgatcaaatcaacgtcggtgtatctgagattatacagtcaaggggtcgtgtgggtaggactgctgaaggtaccgcctatatgccatatgtgagctcaggcaggataggcaatcctggtgaaatcattgattactgcctcaaaggtgggttacccataccagagtgccttagggaacaatttgaaaagttaaaaaatttcaagaaaatcaatattgacaatgtcaagagagcatgtgagatagccataaaattaggttacccagatgaaacccaccagatggtgagtgatgcacagtcatggaatgactggagggttgagctagaacccctgctgaaaaatgcagtgttcacagcagacgagtatggcatggattttgtaatgtctaaagtatatgagtgcttggaacaaccatcgctattgatagctgctgacaagcaaatggtgaagaaagccagccaaataaaccaagggccatctactggtgaggcaagtggtttaagtaggttggcagtatccaagtcacatataaagtcaaccgtggtctcttttgtgcaaccaaccttcgtatgctattgcggcaaggctgcagatttggtggtggcatgttcacagtgtgtcttcatgctacctagaaccaccaccaacatcgctccaacattgaaacagtggaattttactgagcccttgcgcgctaaagaatcaatgattgttgcgatggggcagagcgccagcaagcaacacaataaagacatatcgcaagcgctaatgaacacatttgcgtcttcatataatgccatatattaccgagtgcgaaggaatataactgatggtgtgagcaagtttgccgacagcgtgtacactagtgaattcaccaatactaaagcacctgagttcccgtcactaaaaaaattgaacgatggcgaaattggaattgtatatgtgcccagaacaaaacacgcacacatcgtgttgtataaatcaggcagttgggtgggcatgccaaatgttttatcggggcaactttcagtgcacatgcacaacaacaaccacattttgggcatggcatgtatggtagacaacatggagccaatcgacccatccagatgcaggtcagtgatagcaaattcccaaatctggataggcggggcagggactggaaaaacaactcaaatgttaaaagaaactgcatctgagagtctaccagtagtgtccaaacaatctttaatgttgaacactgtcttgaagcagcggggtgagacgccaatatcgtatctgatcagagccaacaaacctaaatcagtgtgcattgatgagatcgggatgttcgacacaatagagttaattgtgatggcgcaattcgtggataaaatgtaccttgcaggcgacttgaaccaaaagaccccacatggcgagtacttgtcaacaaaagcagatatcgcaatggcagacctactcaaggaaataccagaaagcagcaagcatgatttgttgacagtgtacaggtacggtgaaccaactggaaaggtgattaaaagattcatgaacccaaaaaccacattcaaagggttagatgacgggggaattgagttccaccaaatgtttgacacaactgctaaagccatacaagataaaatagtaaatcacaagatggaattggctgtaacccacaccaatagttatgcaaacgccatcattgagcaagccgcacacacagcattggaagttacaacaaccggtcgggcacaagggtatgaagcagacaatgtagcatattttgcttgttgcaccgccctgaaagcatatgatgcaagtgagttgtacgtggcaatgacaaggcacaagaagaaacttaatgtgttttatgacaaccgagggtacatggctctgtcaagactactagaaaagtcattcattcccagccgtaatggaaataacaatagggatgactacacattggttgaaaaattgctaatggtactcaatgaaattgtcctagtgggaaaacagacattccaaaggatgtttgcagcattaacagaaaaagccaaaagattcatcaaaagaatcctagtggtgttaagcagagccaagcccacaggatcagaaaggaatgcgcaccctgggtttgacctttaccattggttgttgtttgccagcaacaagttggaagcagcctgcgcaaaagcatgtgaatgggttgatgaatattacaagtccgccagtgagtcaatcaaggccaaatacaaaaaattgatcgcaggtgactcactggttgtagccgcggacggtcaatctgttgattcagaagcagaaaacattgtggatgtaggcttagttggctccatggcacgcatgcatcatgtggcctcatgcatagacccaatcgcaagttcagcagaaagcgtaagacgcaggacgatgacagtaatcaccactcgttggttaaaaaacactgataacatttcaagaaggatgtacaacaggttaaccacgaataaccaaatgtcagatgatgtacaagggtgtgtgaatgctttggttgcaatcgcatataatgaagggattacggaactggaccaatttgactatgttcacacaaatatagcgtcaacaagtcaccgagcaacagccactatatacacggttcatgtgagtgaagatttccacgatgctaattgggcaatagaaacattgacatcggatttcgagtggactattgtggagcatggcactaaaaactcatttgtccgtaggcatggtgccaacacaacagggcgccagctgaatgaacccccaaggagcacgttaatttgggaacatgatttagttgacgtcagtctagataatgacagcccagaaggcaatcaagaaatgataaacatgccaagagataggttgctcatattgaaagagactttgcattgtatgttggattgggtgaaacatcacatgcccaaactttgggatgatgaaaaaaaacaatacacatttggcacgccagaaaaccgccggctctttgctagattgaaacttgaggaagggttatattgcagtgaagatgaagacagtttggaggagttgttacaggatgagccatgggtgccatatcttaagcacaatgtgaaagaaggcatgatgctatttaaggaaaccatgctaaacgtgttgcggggagtaccacacctatggaagctcatcagaccatggttgtataaacaaatcaacaaaatgcgaaaccatgttgctagtgtgagtcttaataagttgaagatcaagaacaagctgcaagcagtaatatcaaaaacaggacaattcttgatagagagttttgaagctatgttggacggttacacaaccgtaggctacgtgtttgccgacaacattttaggtcaagtgtggctcaattcaatggctcgggatgaaccagtcatcttagctggttgggtaatgactattgtcttaaacccagtgctgagagaccggtgtggattgacaaacctaagccaagctatgcgagaaatttcaaacttaaacacaaatgtaccaagactaactattccagttatcgcagaagaggtacaagatgcttgggaatttgcgttggcctacttggaattaaatggggtttttgtagattcaacaacgtacgacgggaaatcaatcttgtttgcattgccggctcctgatagctttgaattttgcaggcctgcggtgttcaatccaaacaattacgaggtcaaatcaggatttggaactgtggctagccgtgaattcgcagtgtcaccgattggcaaccaataccagatacgtggtataaatatgcacatccgccgaatgggctgcatcaatgaccccatagacatgttcaccaagatcatggaaacatgggaaggtaataaaacagcgtttgttgaacaaacccgggcagtctgcccaggttatgataacgactaccaaccagacacatcacctttcagaaaattgttttgtgaattaggtactgttgtgatagaaacagtacacacattagggaaagttatgatcaacatcagcagtgcaactttgctgaaattaagtcatgctgttgctagcggcttgcaatacctggcaaggaggattgaagagtggaacaatctacccgatgatgcgttggagaatagcatcgagacgttgtttggagcagcgaaaattaaaatagctgcattttctgacagaataccaaaggaatttacacactcgacaaacacaactggaaccagggcaggtgccaatgacgatgatgattgcaccgaatttatcacgaaacgtgtcgagtccatgggtaatgctgcaatggtaaaggtcaatgaaatattagacaatttcacatgctgtacgagtgaagcaaattacaatgactggttgaagagaacattccctgacacttatgaccaagaaatagagttcgctttaaagcagcgtggctcattcaattacacaatgaagcgcgtcatagctgtggttaaggagaggctaacaaaggctgggatagaggtttgtgacaacttgctgaaacccactcaattgttgtgcacctacttgcagcagaattacccaaacatgtacaaaaatattgagttcagccagatttgcgttgtgacaaaatcagcattcaataaactgtatgagcagctggtggacttagaacttgtgccaactactctgttgcaaaaaattggtatctatgctattgggatggcaagcataacagtagatgtttgtgagactgcactgacagtgatgaaaattaccaaaagaaaagttgagcagaaagctgttgactgctttgaatcaatccaaacttacttggaggagagagtaacacaggccaatgtggatgactcaagggcatttatcaatgagtggtacaacaaactcgatgcagaatcaaagaaaatagcaacatatgaggactacgtgagagagtttattgacagcaaattttctaagccctttaaagccattcaggaacaatttgctgaggctgcaaaacgtgacctagatgaagaaattgagaaattaaatgaaacatctaggaaattattgccaccaatgatacacgacaacgcctcagagtactacagtgctataagtgatgctggtaatgtggaaggtgtggggctgatagataaaacaaatccgttaatgagtcccgtgtcagggtatgacgatgtgattaacaaaatgcttgatgatcatggtttagagcccgcagggcacatcaatgcaaacccagccaccgataaattgcatgagaacagccaccttgtagcttatgtgacaaaagtgatggaagaaatgatagaatgggaagacattgatcaagtgaaaccaacccggaagtcaagggaaatgatacaacacttgttaaacagggtgtttccaacatctggttctacaatcaacaacagcataacacacgattctattaggcaatcaaaatcaggctggttcgcctcaatagacaatagcaaaccaaatgtgactagtttcaaatttcccctagtgccagaagccagaatgatgttcctgaccaagactcatgcggtactaaccattgacaaggtagcggtgtacatcgtctcaaaaggaaaacaatgcacaatgtattggagtgacaccaacttgatgagaaatgacaagttgatatcaaaagcacatggaatgctggccaaatttgctggtagcaatgatgtaatagtaaagactatgcaatacgtgctacgtgaggctgaaaaatttttgagagtgatgcgtgatgaggtggtgtggagagtcaaagcagccactggactaattcattttgaggagcacgaagttgacatgtcagtgagaacgttgtacctggcaatgttaagtgaccttaagatgattggatggtcgaaattgaacaaagggaaaattactagataccgaaaccacattttctttgaccgcagatcaaaaaacaggatactagattgccacacacacatccatgttgaaaagataagcagggagaaaagcagggtcaaaatttacagtggtaaagcggagacatttaacctgatgttaatggcaagcccgtggctgcaaatggtgacagccactagagacatgccacttgatgagcattcgttggacttcacgaacatcgctggacacttgcgtactcacagcacccccgtaagtgaaaacattgagcaatttaggcaacagttccaatttgaaaaccaacgagctggggacagaataatggacaatttcgcaaagtttggcattcataaagatgtcaacagcatattggacttgatcaactcacaaactgtagcagatgtgtatgctgccctacattccagccccctgtttgcacagctaaacgtaaccatggaaaataatttcatgcagacgaagactgatgccctgaaggaagaaatactgtcagaaatgatggccaatgagggttacagccatgtggagaaggcaggaaaagtgttgatcatattaatggcatccggaactggtaagacaacgctaaaaaataattggcaaagtttgggtctaaacgaaatctgtgaagtgtacgatgtggatgacggcttaacaggcttagaagacatagcgcagttgccatggcatagcaaagccttcctcccctcatacagaagttatgtcggcaaagtaattgaaaacgcaaaattagatagaaaatccgttgttttgttgtgccactacccagaacaagttcctgactttgacaaatacgctagtttggtcgtccacagaactgatgtggacaacttggcgattaggccgtggtcaatggaaaatcatgcgatgttgaatatggttgatgggccacgttgcacccacgtaacagtagattctttttcgaagcagaacatttgcatcatcaatggtattaaatcgagtatgtcccacttttccgtgaatgtgtcgacagacatagacatggcaccattgcaagtacaatatggtacggagttctacgaaaccggtgacagagggccagaaacagtgtggatgttgcccagtgaagggaaaatcatgtcatcagaaacaatgtttgttccagcacataaacaagtgactttagtaggaggaccaactgaaataaatagaccaaccatcagtggagttgctagcgcgtgttttaatgcactggcaaccaggctacatgggatcatgcccttgagaaaggtacaaattgagccactcgaatatgtcgaaaatataaagagtttgttcattaaaggctgtgatgaacacatgaagagatttcaagctgacccaatcacaccctctgcggaaatggtaatggactggctggtaaacaaggggcacaggttagaactactatcagacatggtagcgaacagtgtaaattatgacaaagcgactgattataccagactgtctgcccattacaaggttgagaacttgatgaaggaaaaagtggatgagttggatgaccaaatcggcagattaattgtgtggaacaatcaaaatataaacatgttcatatgtggcgtcataaatgaggcaaagaaaaggttcaaggctttgttgaacaaagagttaatcacatatgctgacggtctagacatggtaatgattaacaacaaattgaagaaagtcaaaaaatccacttacatgttagaaatggacctgtcaaagcaagacaggcaaactgacaaaccaataactgaagcggaacatgatctgttgttgcaacttggagtgagccccgaggttgtggcatacatgagacagatctgtgatggatttcagttgcaaacttccgacaaatttaaaagtagacgacctgctatgaggctaactggcggcgcaatgacagctctgggaaatgtcataagaaacttgttaataatggctgacatcaatgagaagtatgatgtgaaccatatatttgtgctgggtgatgatagtctgatcttgacagacgatgaagtgtcagaagattggctgcagatgacgtgcaagcaaaggcacaatgtgattgccactattaatgtaagtgaaaaaactggtgtattcttgcagctgttaatcggttacataccagatcttggctacgttgctagtcacaatttttcaaggttgagggaaagaatgagcgtaatgtcatacgagtatggttcagaagaaagcatagccaagtttgcaagctacttgatgatgataggtaaatgtgcagccactgaccgagcaatgtcacacctaggagcaacaatctatccaccactcggcagcaccatgagtgacagggtaactgtcaatgcaatgaagatgggtgcagatcaaggtgctgttgaaagcttaatagaagagattgttaatgtgataataaacccaatgttgcgacacattgattattactatatggctaagggcacagtgagagacatgaagattggtgtcaagacttacaatatgaccaacactcaatatgcagctgctgccatgatgaagccaatggtcacaaagagaaaagttaataaactgaccctgctgcagacagtagaaagaatgatgttggagcttgaatgattgagcaccaacctcataatggatggcaggacaaaacaaaattgaaattgtattatatcgttatttgtgg

SEQ ID NO: 896 - DNA, 13829 bp, Neofusicoccum parvum endornavirus 1
  source 1..13829: mol_type = other DNA
tagatttagagagagaattggattaaataaggatgacaacaatctagagggcgggtccggaaacggacccgcccgaagattacaaattttaaggggctcccgcacccctataataaagcgggaaagaaagtccataagactgcgagaattgacaaggaagtatgttaacaaatctagtggattgttggaggctaacgccatcgacaaatcactaattcagacatccctcggattcatgcagtcaatgggcatgtacccagacagttcactgctggttgggttaaatgatgattgcctgttccaaatgttactaatgcaattcatcaagaataattttaaaaacactgagttctcagaattcgaatcagtcaaattaagagcatcacttttagcacttaataaggccaagggtttggcagtgggttttaagaaccagcttgctgagacgaattggtttgttgattttccttccactttcatcaatctgtgcttggctgacggacaaatatcctctgcacagttcaagggtgatggctatacggtccacgacttggctaagtttgaggatgattccgatgaattcacactcaagatggagccacacaagacgctggttactttggattgggcaactatgccgtctaagactcatatcaagtgttcagctgttagatgtcactcttgtggccatgcagttaacataccaaggtacactcgtgtacatgcatcagaatatgacgacgatttccttaacgacaggtcatcagagatcattgctttgttcaacaacgagtatgtggatgtgcaaaacatgttctgtccttattgtttacaatctttggatcaagaagtcccaatcatggacaatgagtggattttcaaaaccatcgtagatgatgctatcgatcgtatccacgctggtagtcaactcgatgatcttggcttgatggggtatctatctggcattgatttggctaaagcttcagagtatagaaacattgccaccaaccatgacctgcgtattgttaggaatcaacttagccgtctcgatatacgggtcctatcgttgcctgggagtatgtccgagcaacacaagaaactgcttgctagattttatcccagatacgaaattatgagtggttccatggctagttccactagtccattgttgttagctaacgccatctgtgcaatgtcaacaatcccagaaatggctgatggtagaggtttaccaaccataatcactcaatccatcaacgagatgagaaatgttgtaaatattgaatccgtgttgttatccaccacccctgcagccaatagcaggctggtatgttatgatggaaccacttgtgatatagtttactcaacattgcactcgttaatatcacatctgccacaacagattgtggttatcttcccggcagcagaatacttaacaaaacgtgaaggccaccttagccacgattcgggtacttgggttactaacacaaattccgtgctagttatgcagtcaaccacatcagacgttgtttgccacgacaaacagttgctaaccaatattcttaccaagcaatttttaaaagtcaacaacactgtataccggatcgagctgatggacgaaggtcctacattaacaaaagctgtgttaatacatgtagcacatcttgccgtcgcagacattggtaaaaggattgtagtagaaacgaaacgtgaattcaatgtaccaactttgacatacaacacggttctaggaactatgaacatcccaaacatagtgaccaagagagtcacagtgaattcgaaggttctgcaaaccataatgactagagggttaactggcaatatgggcatccaaggctcacttgattatgctttggcaattgcacatgccagatactcgattgacgataccacctacaacatttataatctggatgcacaaggggccatagaacacgcttctattgcttatgctcttaataaacgagcggcggctaagcgcggtctgaacgttatgatgcaagaacttagcccatctctgcggtacttgggtcaggcaatcgcgtcaaccgtgcaatcaggattggaagtaattaaggctatgacccctaatgtaacgagtacagtaagccaaattctcgatgggttggacatgaatagtatgaatgtgttgacgagatacgcttcgaacccagtttgggatgaactagatgattgggtcacgaaagcaacacttgctgatgtgtcctcctttgagattaaagcaacagtgacagtgcatgcgtactgcaatcatcagcatgacgagtgtcaacatttgggtaacggtcaatgcaagtgttgttcgagtcctactgacgatgatatgtgtgattgttgtgatagcacctgcacacacgattgtacccaccaatgcatagggcatgataccggcattggcgagtggagcacttgcccatgctgtggaaaacaaatgcgtacaaatcaagaggtttgcataagttgtgaagactcacttgaagattgggacagtggcgtcgattatgacaggttctggacattcattggtcgtgaaactgataagggacgtaatgtagacgcccttcaagttaagccaaagtacaacaacgagtttatgttccgcatggcaaatggcaccactaaaccagccagaccagcaatcgaaccatgtacagttgtggatgccaaacaagggcttcacacgcacttgtgctattgtggcacaaggtatcagcattctcacccattcaaatccctgttgcacccactcttcaatggcgattgtccaaagtgtgatggtaacactaacaacctcgtcgtgtatgattcaaaggatgtgcaaaaaaccctagagagcgaaacattggaacgggaagcaaccgcaacgggagaagccatccagactagggcggtggatgaagtccagaaaccagagataaccccctttgcagacacaaccaacactagtaaactcttggttgccactgatacagtgtttgtcgacgcattggttggattctctggttctgactcaacatggccgacaactgatcacttgaggcctggtgaccacccaacaatgtccagagtcacatgggttgcacttggtgactatttcatgtcgcaaaccattctatctatgttagcagagttaccaagcacagaattggggcctatatgtggttacacatcatggcatgctgtggatccgaatgggccaacgtatgacgtaatatgtaatatcacaggtaagactgagtggttcgatcgtgatgatttgcataggtgtgctttatccacgaactcaaatttaataacggtgactgatgttgacaccagggtcacaaagggccagcctgatgattattttactgttcttttccatagctccgccatgcgtggattgactgtgaatcattggcaccctgttaaatgcattcaaatcaactacactagtgtgggatttacttatcattccgcagtgtccgtcaagcacatcatgaatgttaccaagcgattgactggtgggaccacatccacttacgatagtggtgagctggataagacaatgcgggtgaagttgcacttggagcttgcaaaatcggataccctaagttcgacatgggctaattctggattgtgggagtttgttttcgcagataaacttgatcctccaaggtttatacgaaaccgcgtcgatcaagcaatttttgaaagttcaattgatctgcaacagtacaataattggagtgtgactgtgccgaattgggcatacacagctatacgtgtgctgtgtgacaacacaccaatttctttgagaaacccgtggttaaatgcgccactaaactatgactttgatgctgatgcctcccatgatttggcacttgaggagaggttgcgatcattggtttacaattacaagataggctcttgcttccaacacatgcttgcaggtgatcaacagatcaattggattgatttaccaatagtgaatctaggcacaaagggtgttgtgttggacacgctcgacaccaaaatcaagaccggtgacattatcgtcttgccaagtaaaggcacagagaataaagatagattggtgcaattgactgttcgtgacagatatatcagtgttgctggaacgaaaacccctagttcaaaactcatgacagtcggcataccgcgtcagtcagccggcagttcattacgagccatattgtcattactaacaactcaagtgtcgagcgcacgcgttgatacgttgttggataatgctgtgggcgtcatggcaccgggtgggtggggcaaatcaacccacatggcgaatgtagctgatagcgattcgactatggtcgcgtatacaagctctgcagtggagtcgatcaagcaaaagttgcacgcgctaggaaagtccgttgtagtgatgtctgtagagcgtgccgccattaccaaagtggccaccaaaaacctgttcgttgatgaagcaacaatggttgacaaaattactttgaggatgttgttgactaatgatgttgaacaactacacttgtatggtgacgaatcccagattggcgtcattgataccctggcactgcccggtatgcgctttaacaacagcataattaccgcagcaccaaacattataagagaaaccggtacaaggcgcatcggcaaccctttggcgtccgagttgcataaggttgataaggcatacctggcattgtctgatcattccactgactttgatgttgtcaacatgcaagaaatggacttggataagattagcaggatcgtcaatacgtctggtgtcgacgccgtgctgtgtttccacaattctacgttgtcagcaatcaggcgcaggttgtctggtgttggtaatgttaaagtggcaaaaccaccgatagtcaccactgtacacaggtttcaatcaaaagaagctaacaatgtgttagtggtgcaatcaaggttgggtgacaggtctggcatagaagtcgagcgtgattactgcatttctgcagcaactagagctaaggtcaagttgatatggttaagtgtgggaatgttcaacacgtcaacaccgctgtcagacaggtttgggaccggaagtgtcgtgggtggtttgatgaatccgtttagacaattgattccaagaatgttaaccaagggaaacgtctctgatcgacaagttggaattattaaagatgtacaattcaataacgcaaagaaatcttatgagaaacaatatggtgtcaaggtcaaactaatccatgctaccgataaagacattatcgttatcacactgcttgggtttttggtcggcaaactcatagtaactggtagccaagatgatcctcacataagtgtggagtcggacccaactggaaaaatcactgctgacagggtcaagcaaatggtagacatgatcaagttgtctagtgcattgccaatcaacgtgatacaattagaaccaccaatgcaattgccatcaaaacacagaggagacataacacgcgagggtgcagataaactcaattggttgtgtgccaatgttgcactcaaacaagcatcttcaacacagcacgtggagaagatctgtggtatggtcgctgacatgcgtatttccggatcattcaaatcactagtcaaacttgatgtgatgagcgggaagcatgcatgcagtttgcagttcagtatgtattcaaccaaaaaatgttcgctatccgcaaaagacacagtcaactccaaacgcatggcgttagcaattgccgattgggtgggcttaatggcaccatcgtggaacgacgacatgtggtcgaaagtcagcacattttcggcgaccactgatttcacatgccctagaaattattcgctagtgcacttaatcacatcatatgtggatccaatgtggtccaatgcatctgacttgatgtcggcagttatgccggccgcaaagctggccagcggtgatgaattgaattcttgcatgaacaagatggcgtccttgggcgctgagatatttgttggagacgagcccgttgactatgttttcccaacctcattcgtggctaaaatgaagagttcaaaatggttggtgatggttgtagatggtacaccaaatgtgttccttgtggagggcaatcgtgatgatttgcttgccacaagtgatgagtttgcgctggcaaacattgatcaactaccaaatgtgttggccaagtatcatggatctagtttgcctttaaaagtgctatccaagttgtttggtggcaatcaggctaaccaattagcaggaattgacattgaaggtcttatgatgacaatggaagatcataaacggctgaatacacaagtaatgtcatacttgcaggacaaggcggcaaagttgagagtgcaaacatttaagaaaagacccaggccattatatgtgcgcataggcacgaaatccaagtatagagcgatgttgggacacatcgccaacgatttaccaatcaacataactaacgtgattgagtacaagcatgagcctttagaactagctgaaatgcttgcggttcattatgtgtgtggagcgattgggcaaccccaaggtgattctttgcttatatacactgcattgccgcatgtgccattaatgcaatcatactttagcgccacttcaaaaatagttgacacaaaagacatcaatattccacactcatcgttgagcatcaacgtggccaaccatgtgatcaacacactattaaggaaaccgaacactgccactgaggatatgatcgattccgttaaatctttgtcaggaattaaacaacggttagctgcacacaatgatgggtccaacccgttatggttacaagacagacccgaacaaccttttgcaaccattttgttcaatgcaacgaccgcaagcaagtcagttgaatatatcacaagggaaatgtatttgctacaagctgagagatattacatggtgacctgtgtaggcgatgaaattcgtgatggcagcgacgtctatagattcctatcgaaagatttgggcatgtgtgtctcagatgcttgtaggaaactagaatcacaaggtggttggactcacgatcaccatgtggtacatggaagagttgtcgcggccatggggatctgccgagtgtgggagcttcaactcttggatgtcaccaccgagccaagttggatgcacgcggtggtgactccattagatccggtcagcaaagtgaccatcagggtgccacatttgaccattgacgctttgcagctcacgcggtcaccattaataacaacccgagtggtaagagtcactcgtcaggtttttaaatcgatgtccttgcgcatgctgcgcaatggcacatcgtttggagacttgctggtgtatggccgcatgctgttgcataccaagtactttagccatgatggaatttcttcacaacataatgagacaccgagtgaagttcttgatgccgcattagcagtttggtccatctatggacccatggttacggggatgaggcatgcacagaacttgcttcagacatcagatgataaagagagcacaataatgcaactgatcaacccaacacttgagcatctaaaagacaattcaattggggtgctctcacagattgcaagtatttttggtctcgatatgtcattatctgattggataaacaccgtggctgatgccattagtggtggtgggaagactgccttgcatgaaatcgccgatcaggcagcaatgtggcaatccaaagtgttggaggaccgccggcagatcgtggaataccatgcacacacatccaagcgcatggttttgtcacaaggaatcactgaatcagaaatgtcgtcgaagccagtactcaagacgattgccaggataaccggtgctattgtaaacagtggtgtgtcaatagttaaaggaaggcagaacatggtagaaccttggctcaaaaatcgtgcgagccaacacctgatgccgcaaccgcgtcaaattggtgatgcaacagaagggtttgaccacgttcatcaggttggggtggatgtgcgtgatttcaacatattaataataaccacaggttcaaaaggtgacgtcgcaccaatcatacagctagctgactggctgtcgaccgtggccagcagtgtcgctgtcttgtgtccatcacatctgataccaacaacaaaatcattttcaaggattaagtttttccctgctgattttgatactgacaagcatcttgaaacgatggcaaaactcaaaagtagccccattgacaacatcgacaaacttttacatggtttcactgagcaactcaatttcgacaccattgacccggccatgtttaaggttgatcaaagatttgacctggtacttggcactgcaattactccgcaagcttcaacaatagctgaatactttgacgcaaggtacgtgcaagtgaacatgatgccatggtttgtacgaaatgtgttcggcaatgacagttggttaacagagaaaatgatgaacctacaagaaccgatgcttgacataatgcacatcgaaggcgttaacaggctccggtccagcattgggctacaacccttatctgtatctgacatagctaaattcaatcctcatcgcatatatatgattgatgaggccatgatgaaattgcgaggcatgactgcatcatggcaggctggctacttcggcgcgtcgcgcacatcaccattatcacaacttgatagccgtgattatgttgccgtaacgtatgggtcaatgcttgatgattggttggtggagcatagtcttcagcttgtatcccatctattggctgttggcgaaaaggtgctgtggttgaccggtggattaacaggcaaattgcagaaggatgacaaattcactaagctttgcaagaacgaatgcgttgaagtgatgcagtttggtgatcaccatgaaacaatgcggagatgccacaccgtgttccatcatggcggcgccggcacaacccaagaggcacataggcaaggttgcttttcagtgatcacgcctgtagcctatgatcaaggattttgggttgcattgacgactagtaagggtctggggtgcgccattgaacgcagtccaaggattgagagtgtgatcacagctttgcgcatgagtcgcaccaatcaaccagtgatcatggctacaataacagggagcaatgacaagtcaaagcacaggtttagagaagcattgatccgtagctatcatgagaaaggtcaaagactgctgtttccaaaattgttggtgactggagatgcgtctgacgtcgaccacttggtgttagtagatgaacccgtgcccgaagcagctgtgcgttatgctaaccagattgcggtgcctttcttacgaacagtactcagtgatggggcaatgctattggacgagtggcttgcgctacacagaccgtgttgtgacatcaacaatcgaacttcggaattgtatggtgagtatgtgcttgcaatctgtcatgacgtgtttgtccatatcagttaccaacagggcagttggagattgggctacaccacagtagaacacacgattcatcaaccagttctgccgttcgatacatccagaggcacggcatcctttgccacttacccaatgcatgcacatggacagattgtgataccgggacaacagttgggtcgacatgtagagatacacacaccggcaggggtcaaacaggcaatagaatcaaacagatggagagaattggtaaaaatgactactaggaaaaccataacgggaggtaagacgccgccgttacatggcacctgccgattatgcaaaaatgacgattgtgtggacctaagggcgtactgtgctcagtgcgctgcagtgacagattttatgcaagatgagtcattaatgatgcagcaacaccttgagactattaagtcgcttgatcaagcagtcagtgcaccaatcacctcacacactgctacaaccagtcgggatgatacgctgtggttcttgtcaaggttacctctcgagccatcttcatccatacatagcaacggagtttatgtcgtgaatgtaccgaatccaattgtaacttacagcccatccgatgatgggtattgtgtgcatagagctgtgtcacacattgcaagtaaacacagccggtggggtgatgcggcaatagtatttgactcattgataaaagttggggtgcctgcgtttttacccgtagatgacataatgccacttgtactcagtatgggcttcaattgtctgttgatacgcggcaacacgggcacaatgacccaaaggtccaaagttgacccatacatggtactgaagattgagggcacttcacgggtggtacactgtgtggcgtgcaacgtcaatataaacactgatgtaaagatcgtgaggtcagtaagtgtcaccaccacagacgtgcatccagcacaactggatagtcattgtgaagtgacgggattggggagcatcgtcatgccaggtaagcttgatgattgtgaggatcatagacatgtcaatctacacgacgtgagtaaagcgatgtcgattcttaagaacgatgtgggcaaaccgcacgcatgtgcgaatcaaaaacaggttgtgaacaaacatggttcaatcttcaataacaatacggttatgcacgaattcagtagaatgtacgtcgatcttaatatcagagccagttctggacattatgtcagtgtaatgtcaagaggttctggttgggcagggacagcgttgtcggcacgcggtaatggcgtatactggctcaattcgcaaccattcaattctggtgacattgtggtaatggttggtgacaccgatggtttcggtcttgtcacgcaacatgccgggattcaatacattataaccgacaccactaactcagtatactatgcttgttacaggtccagtgttcggtggttggcctcgatccatcagcgtagagacgtcaagacccgcaatgttgagcaatcggctctaaacaatcccacactaacatggatgcgaatggttgatcaaaaatacgacggactaaaagtgatgaaaatgccgacacaagtgctgtatgtcacacattatgatggcaggcaccaccacaatgataaggagttcatcaaaatcaaagacaccatgacaactggtgggaaaatcgtcaatggggcaacaatggcggatgtcaccaatctatttaaacgggtgatgttggacaatccaccgctgaacctctggtttaatgcgggggatacgcgattgatttgccacgttctcaacgcaagccaggtagattggcggtttattggcaatttcttttcaaatgacaccgtagtggagcacgatcaggccgtttcatgggggtttgtcaatgacgacgattttgataaagagctatctacagcaagtagcgcaatccaattgataacagaagagcgcggctccatcagggccattaaggactggaggcttggaacaactgatgacatacgaacagtgaaagatataataactaagttccatgagcacatgagtgatggtgatatcgaatatctgcacaggcttggtgacaccatggaagtgagttgccacttcattgagtctaacttgggactggccagtgagtcgtttgtgtggcgcaatgccactggtcgatttggagcaaatcatttgattgcaagtatccgcatgatagttgttggtgtccctagtgtcagagtgacgagaaagttcacatctttacaggtgacttccgtgagagattctgaggcattattcgatgacagtgatgaaggcgaagtgcaagcgcctcaaacttctgacctgcactcgagtaagacatcccaaacccaggaagatcaggtaagtggcagttccaaaaacgtggttggaggttacaccacaaaggatctggtcgcagtcaacaaaattcaatcggacacaagcatactcagtgggactgaacgacctatgtggtttgatgattctaaggtggataggtccatgttcaccgggtcagagagttggtggggcataaagctacgtaaaggccaattggtcaagccgacgacacaacaagacgacagtgaattggacgtcaaggaccatgccgtcaatgccttggaactcaatacgatgacatgcggcacgatatcaaatggtatccgtcaggcgctatcaccaaacagcaaggctttcatgccattcataccagccatgctagatgatttggagcttgtgccagagtatcgtgaacctgtcacgccggctgtcatgaacgtgctagacaatccagattacacgcattggaatacaaagatagctccgaaaacgggaaagatcaaaacaaatgagatgttaactgaattcgtaacgacgaataaaactgccatgactcagtacccggaggaaaataggccagtactaaccaaagggcctaaccaaacttttaatgctgtatcaacaaggttgcattcagttgttacgatgcggaaattcagtttagatcccgaggaggaaatacagggaatgtccgaatgtttcttccgacaagactggcgtcagcaatgtaatcattggatggatgaagatccaatagattttgatactgatgaagttaagaaatggcttaaaggcaggccaggtgcgctgcaagtgaatgcagaattggagagtgtgttgcgtgaaggcttaaccgtgagaaggttaaacgatgtcaaagtgcatgctaaattggaggctttgttaaagggtgcttccgctgaggaaccactgacgcaacagaaaattaggattatagtttggcaagccaaaggcatatgtgccatttttgccccagtgtttatagaggctaagaaacgacttaaatcattgctgaatggcaaaaccatttacgccgatgggtacacaccagatgagctagcagcgagattaagaattgtaactgattgcaactggttacttgaggatgatttgtcaaagcaagacagacaaaccgacatggacatattacgtgtagagtttttgctctacagatatttgggtgtgggagcgaaggttttgtcgttgtggcagcaggtgcataggcactggaaatacaaaggaaccaatgtatcgggaattttggacggtatgagactgactggacaggcgaccacagcactagggaacttcatagtgaacatgatggtgcattggagggtcatcttgcccaacttaaacaaagtgtgtcttgtgatgatgttgggtgatgataatatcatattgagttcagcgcaaattgacagtgaactattaaagaaaataggtagagattactataacatgcagtgcacaagtcagcataataaaaacgtgggtgtgttcttacaactatctgtgtacagatcatcggatggacacatggcatgtgggcctgatccaagacggctgcggttacgctttgagttcaccaatggcgtgtctcagacgaatgacgataatatgatagcacgcagcatgagttatctgatgatgttagggaaaaccaaagaaactgatcaagtgatagctgaactcaagtggccaatcaagccgctgcaatggcacaacctacaggagtcagttcaagcgagtgcacgaaggcacggtcttgacacaacgataattgagaatgattacacacttttgttgaacatgatcaaatcaaggaagacgtacaccatatcatggcaacatccggcagaaaccagaaccatgggcaggaaattgcggtgaacaacactgataaaatttgtaatcttcggggacaacccagccc

SEQ ID NO: 897 - DNA, 10119 bp, Ophiostoma bicolor endornavirus 1
  source 1..10119: mol_type = other DNA
ggccggcctctataaaaatccggccattaaaaataaacaacgggccgagctgaatgacgctcacgaggcagaggcgccggcccacaaactttggccaattaggcaccgcacgcaaggtcggctgctgagtgcccgtgccaatgttgctacgggtgtgtccggcactgtgagagcgagtggtggctgctgggaatgcatatttggctaccaattgggtagtgatgtgtgtatcgacctggacaccatcaagatggccctaattggccaggaggaagaggcaagtcacatccgtgtcctcgtagcaattaatgagggggtactccatttcagcaaccctccgggcctgccaacaggcacaccaagccccgaactgttcgccgctcaacgggccttcatcgagagctatgaaggcccagctgtgaggttgctcgatgtactggactcccataagggtaacatgctggttgggttcgaggctatgacactcgtagagcgcgttgcacgtgacgcgggtgtctctaccaccaatttgttgagcccacaagtcaaaaacgccatggatgagatggtgaataagcgcgctattcgagctctgactagccaccccaattgggcattcacactaccctcgtccacacctaatgacatcatggacgatctaaacaatgaatttggcgctggtgctttcttgcggggcaatctgcctacccacagccatgtctatcatcatgctagccgcgttgcggtgacggaacagatcgccaatatgttccctagaaacgccctgttatatgatataggtggcaacatcaatcgtcaccttgctcataaacgcttcaacgtacactgtgtttatgctacaaccaagtacgaagaccgagctaggcacgtaaagtgggtgaaacaggcggcacaatgggcaagtgcacagttgcagcaaccaactaagcccgacatcacgtcgcaatcggttgcacgagctatacttgacgccggcaactgtatgtggtgcaaagatggcgtaaagaattgccaacacaagccaaagactgtcgcttttggcatgtccatcgatacgctgtgccacattgaccctgccgagctcatcactttctacattgaacaccgtgtcgtgcaggcgactcatgcttttactatcccagataactttagtttcgcggtcgacggtactctacgtcacaacgaggggcgctggcaacgcaacctcgatgcaacctggacactagagttcgtgggtgagagtgtctgctacacccaaggtcttgctgtaaccgacgcctatatgcataggccattgttcatggccggcgacacagtgctctacaacaaagtgtgcggccggaagggcccacatatgatctttgaacactacctcttccctcgcagtgacgtggagcgcgtttatgcgcagcatgtgtcttggttcaacatgaatatggatgaaatattcgtgataattccacagctcgacttcgaaagtgcacctaccctagtgctcaaagaggcatacaccctcaagcgtgtaacaatcaacatccgcttctacgagcggttgttaaaccggctgatgcaagagtacagctgggcggcgacactagcgtatgcttcttcgatgatcggcaaggtctacgcaacgacgaacgggctccatttgaagtggaacatgaccaacgaagaagtgcgcgaccactgcctgctcgcgtattggagcacgaaccgtgttaacgaatcgctcaggccgattatcgcccaagcagagaagagtgagcgcagtcctgacttcttgactggcttgtgggatgccattaagacctggggtcgcgatttcgggggccagtttgatcccacaggttcggagctaatccagacgttcatccgcgaaaactctggcagtgacgcgctacgcgtgagcaggttgtttggtgctacttcgcgctccatcgagtcgcttaatgttgcgacacagatggtgaagtcgcggcgcatcgtggattgggtagcaactgatgttggcgtgattagcaccgtgccgccaagaacaatcgaccactggcgcgagtctttgcccaatgttgccgctgatgtgaccgtctatgacttagctgacgttgatgccagcacgattacgaagttgcagtcctgcaatgcaagcccgttgtgcaagcacaaccactcaggtttccatattcattataccggcaacaacagcgctttggctggcaagtgctcctgctgcgacgtattcagcactttggcgcctgacggtgcttgttatgtttgctcgccgcgaccacctgcccaaggcatgcaaatgcggtgcacgcataagcacctctggatgtcggatgcatgctgtggcaagggtgattgcagctgtaagcacacacacagttgcaagtgctgtggactcaatagtttgagtgactactgccgagtgtgcaaatttaacccatccgaaccaccgaaggggagctcgaagctgagcaacctggtgtcaaacaacacggttagtgcgccacccactgcgccgcctgctatggtggctaaggccccaataccaaagatgggcagcgcgccgatcagtcaaagtgccactggccctactgcgcctggccagaacttgccaactctgccaccaccgccatcgatgaatatcgtcgctagccagaaccctactccggtagccagtgtggcagctccggccatggccacgccagacgctgacaatgttagcgtggagccgccacccgtacgtggtaataccgcgaagcccaatgcccctatttccttcttggatgtgattcaagagctaaacacgcagccaccgaagcttcggccggtttcatccagccaacagaatgttgtcaataacttggtggttgctaaaaaagaagaagacgtgcctgtgtcgtcagaaccacttgcgcctgacgacgccatccctgagattaccattgtggatgcaacagccgatgggactacacccggccaactagctggccggccaattatcgccagctcggaagagactagcagcttacggactgtagacctgtcgcaagtcccgaaccaacggcaacaaatggtaactgccgtgctccgtggcgttaagaatgtccctggcgacggcatgtgcggcattcatgcactgaatgcttggctgggccgcaatgttgatgatttagaacgttgggccgacatagcattcggccactctgactggctagatggtgatgaattagcttacgttgcagctggcttccagcaaaacctggtcgtaatgtctggtgaagaaactaccatttaccgctgcaacagcaaccctgaggcaatagccattgtacatggtgagttcatcgggatgggactgcactggctggcggccaacattgaggtgtctatggtcgatagcactatcaacaaccgtttatacgacaacttcgccaagctgagcgctgccgtgcatgccacaatgactagcgtgatggatacagctgaggcctaccaccttcgatcacttgatgtcgatttcgcccttagcctgggtgggcgtgcctttgtctcgaaccgtatgttgcgcttggagtttgatgctttcgatgccgagcctaccttgcagcaatctccaaacggcttgcaaatgatagtgggcccaacaggaagtggcaagacaacccgagcgttcgaactattgggcaagaagaaactgttggtgatcacgccatcccgttcgacagtgcggagcttgagttatcacatgaaaggggtgtttggccgggctgatagccgttggtggccaaaagagaaccctagccataatgaactgcaaggcgcggatatcatcttcctcacagtcggtgccatctataaggcgcttgaaggcaacaaccagcaatacaagcagttcatagccactcggttggtggtgtgtgatgagatccaccaatttgaccatgagtacggcctggtactgaaacacttggacccccaaagaacttggtttgcgacggctaccatgcctggcatcgcgcaagacatgcggctacggcacagaaatgccatagagttctgtgctcaagatattttgcttgaactggcagaccaagcccaggagggtaatattgagaaaggctgcggtgttatcgttccgtctaagcgaatgacgtataaccaagcccaggtaccaggtattacatctgacaccataggcacctatgatttgcggttggttgaccggttcatagcgactaactgtgtctctacgggtgtgaccataccgcaacttgttgacctgaccgacctcggccaacgctatgtgatccatattaatttctaccctgaacccgagaaaagtaagacgctgttcaccccgcagttgaccacttactcgcgggcagaattcgtgcagacacgaggtcggacgagtcgcgtctcagatggcgtatacacgtgcgctattcctgatgtgaacacaactttatcgaactatgagctcttgcggtgcgcagctttgctcgggacaccctgcagtgatgtttaccaacaggcttgggaaagcacaaacgaccgcatgtttatagcggtgagagaggcccgcgataaatgcgaatctgagtccgagagagaccagtacaatgagtggttggcagtctacagccagttaatgcagctacgcaagcagggtgctaagccgcggttcgtgacgagttctgtgtaccgcgaagacctactattgtgtatccctgatttagtaggccagtcccaaagttctcggccaaagaaggtaggtgcaagccccttcaacctgattctcgacatggagagcattgtgcctagagctgtctatggtgagttcgcaggtgcagaccacaaaaaactagaagttaagatcgagtcgagtgaatcttttattaacctcaacatggatactatgtcagaggctgctaagaaattgcggcttgttaccctagcttccgtgtacaaaacagtacgcacaatagctgctgctatgagaacagttaacaatagccagttgtgcaacaacagtcccagcgattgcccgaccttctcgtcccatgacgcaatgatcaagctgacagggcggtcgccacggcctgatgacctagtgggagtggttgacttccggactggtgacgggagcgtgatgcactacaaagacgcccccgttggtgacagttctctcaagtggagtttgccgacatacaggtcgggccaactgtttgccgacctgcgcctgctaaacaacttgagcctgaatataaacatcagagattacttgcggcagtgcatagtgctctccgggccccccggttctggtaagaccaagcgcatgctggaggagtatcaagtcgaggcagttgccactacgagtgagacacagctgcgcctgcatgatgattggttacccccgcatgcactagccgaccattacggcgtgcttggtgtcgacgaggctgggcttctgagcttggcaacactattcgtcctgatatccaaggcagacaagcttatctttacttgtgatttgaaccagatcacacacgaggtggatcaagccacatatgacgtaacgggcacagactcggctgcaaagttgataatggaaacaagtgaagtggtattgttgaccgattcttggcgcctcggcgtgaatgcgtgccgcttagcggcagaggtcggcacccccatcaattctgcgaccggccatgttgatgaaacccacgcagtggtgtgccaagttggtaacaatgccagcttcagcgaggtgttaacagacgccagccctgatctagtcatctgcgcaagcaatgcgttagcacgtgatttgcgcagcttcgtgcaattgcctattaccacccttaatcggtgccaaggggctgacgtcgaccgtgtgctacttgttgttgcgcgagtggatgttatgaagatccctttggaggcgctgtacgtaggcttaacacggcacaaaacagcactcacaatcgtgtgtgataccaactccgctagcctcatgaacattttaaaggtgacaccaactagcttgatgtcttacgccaaggctgtgggtgggcaaggccatattgactttagtttgtaccaagacatggtggagcgactcagccatcgtgtaggtctggcacacatcgaacgtcttgttagttgcctgtacgaggtcgtacacaaccatgaacagtacatccaccctacgtatagcagtgcatacacgggcaatgacttctccataaatatcaccggctactaccacggtcgagctcaagcgtgtgtgatccgcaccagttatctcttgcgggggaagagatatgtgtgtatgctgaacgctgacgatacggtgcagcaagtgcgccataaggtcttgagcagagtgccaacccgccttattgttgccacgcttataaacgtgggggcacggcgctttacctccctgggtgctgatttctgtactgttatgaaagtctggttaaccaaggttgcgcaggcagacggggctaccctgtttcgctgctttaggggttttgtggctaccgccgtgcaaacagcccaagggttcgtcgagacagtggtcaagttgtgctatcagagcgttgaatccatcagtgagtttactaaccagctagtgagcatgggtaagttaacagccatgtccggcgctgaagcgggcaacgcagttaaagctgcgatgctgcatatctggcattttgagcgcaagcattcgaaagcttatggaggtggagagtcgatcctcgacatgcttctgcgaattttgagatcagcggttgggagagcagtgtctacgatcactgatttgttcaactggttcgtgagtttgctgcgcaagaaagaaaccgccgatgcagagttcgtgccaattgtaatgaccgataatgttttacaaggaccgcctgctgaagatcaagtgaatgagccgctgcaagtagttccaccggaacccattcaagaggacgtaactgaaagaatttccttgaagtcgccacagctcaagccaactacaacttgccacccagatagcttggtccacgttgagttcatagagacaaaactcaacgtcatgacgtataagcccaacttgcttgggagggcattcttcaagaaagatgagacaggactgcacggcggcgtgaatatggggcccctgcatgtcaacttccatatgcatgagtgttgtgatggtttacaaaaagtgatgtatgccaatgcgagtggggctggcatagtttacttgcagcgtgccccgggtggatataacctactctgtgatgcagatagtgtgaagtcagttgacacgtccaagatccagctggctctctccacaatgagcagattcgggggcgacccgtctggctttgtcgacttgctgatggacatgctgaatgctgtttgtaaatttgcaaacaagctatatgacctcgccaagtggaatgctcgggcagtgataggcacttgccaaactacttcgtttgccacagataacgacgttatcagcacgtataggctgtttgcgtctggctacaatcgcacagcttggtctcgccgcaacccagtatcgtataatgtcagtaccatgttgaccacagccaccatacactactcagatgcatctcaggagtgcttcgtggtgataaacggtatagggtgtgatactctagtaacagtttacagcatcggcgagccgccaactgctgttttgcatacggcatcggtgagtgcttccagctatgacgagggcacagtgggcggtaaacgttataacgttgatgctttcatgaggttgggcattaacttgaaggctctgcagtcaacactcacaattgatgaagcaaacttcatcaaagagaccatcgacaggaacccgctggtagcagtgtttgactatagcgctgagacaacgcatactaaggccaaagggttagtagacatgaccatggagcttggccgcatggcggaaattgaagctaccgagaaaatcgcacacaaggtagcttttgtgattgctagcggccatggcaaaaccaccacagttggtaggctgcggcgtgagtatcctacatatactgttttggatgccgacgaagtgcagcaacaagaatctatcctgttcaagccattcagtgagaagatggagagctatcggttgaagatacaagaggaagttaggcggcgacactatgacgccgtgttcatccatgcaccagagtgtgctccgaagggttacaaggtatacaacatcgtcaacacgcaggccgaagttccccgtgatcggatatggtcgcgtgacaatgttatacacaatgagaacaaggtgagtcgggagagcatcctgttcgctgatggctatgacgctgtattccgtacctgccttagggtgctcagccgtcgcgtcgtgaatctgctaactcatgaccgaaatggcttactcattgacaacatcagcgacatagatggtgagaatttctttttgcatgctccccatgtggacagcatagtacgcttgcccgggggcaagcgagacaagctgctgttcgacgacacccgtcatggcatgggtgagcagcgcatctaccagacagggccgcatgtcggcctagccaggcccacaattcaagctgaggcaaacgccctgccaaatgctatcactagccggctgatgggtcggttgccgttgcggacagataatgtgagtgtacttgggtaccatgccttgatgaagaagaattggcacagcaatgcggatgcgatgctagaggcgttcggtagcgaccaaatctccctttcgctacaatctgtgctggactggttggttaacaagggcgataagttccgcttgtacaatgacatgttgaaagacgtcgcgaagaatgagtatgccgttgaccctaaccaggcttccgttcactacaaagttgaaaatcttctcaaagagcaagttaacgatgtgttggaccaggtcggtcgggtcattgtgtggaataatcagaacatcaacatgttcgcttgcccgatagtgaatgaagcaaaggcaaggctaaagctgttgctcaaggacaatgtggtctacactgatggtatgagcacctctgacatcaacgcgaagcttaggacttacaaggctagccacatcctcgagatggatttatccaagcaagataggcagacggataagcagattcttgaatacgagtggtggctgttacggcaacttggggtctcagacaaggccgtcgactttattagtggtgcgatgccaaagttccgcatacgcggcacgaataatgagaccgcaactctaccagccatccatttcagtggtggcgctatgactagcatgggtaatgagattaggaatctgcttctagtggcagactgcatcaaagagtacgttgcgatatttacactgggtgatgatagtctcattttgctaaactacgaaccagatttaagttacatagagagggtgtgcaggtcgcgtcacaatgttgtgaacacagctgtgtcgtctacaacgcatggcttgtttttacagatgattgtcactagagacgacgatggctacttctacgcctcgcatagtttcgctcggttgcgtgagaaattagcgtatagcccttatccaaatgacagtctcgaatggaagatgaaatatgctagttatctgatgatgatcgggtatacgcgtcggaacaaagaagcaatgaagtactcgggttttgtggcgttccccgaactcggcacaacgatgactgagcgcttacacgctaatgcactcgcaaacaattgctcagttgaagctgttgaagtcatcatttcagatatcatcgacttgcggtacgtgcaaagtaagaaacatttgatcacagccaccactatactaaggcccaaccgcttgaagtttggcaataaacgtgtcggcgactacgtttatgacacaaggttcgagagtcggttattatctgctttgcgaggcctcgagtgaagtagcacccaagtgagattgtctagttgtgtggcccccatgatcgatcgaattctttagtgagggtc

SEQ ID NO: 898 - DNA, 13714 bp, Phomopsis vexans endornavirus 1
  source 1..13714: mol_type = other DNA
actaatggattcattagctctacatactaactcaaaccaaaggtatgaacacttaaagggtggagtgctcaatgagcactccactcacattaataaacggccaataactaataaatatcgtcaaactatttcactaggtcaagctaagaaatatagtccatggttaaacgatgacttgtcagggttattgggccaaccgtttgctcttgataaagagctactgacaaggtacaaattttccatggacactttgggtgacacttcattcgaaaaatttatcgatggtgtcgccaatggcactctgaagatgccaagccatgcaaatatgggcaacccagacatagtagattctatcaaagaaattgcgaatttaatgccaaaccgtgcttcaccatttatgaaagcattgttgaccagcttccactataaggtcatgaataaaccaacacctgaaaatataatcaaagtaattaaccgcaaattgactactagcagcctgcaaactttattcatcgaagaactaactggttccagcctgtttcgtcgttatctagaagctacttgctataacacttatacaggtgtgaagtatgaagcatggttgagaccgtgggcaaagatgctattgcgagagggtaaagttgtagctgagtctggccattattcgatagacggaataaacggggcagacgcaagatttatacaatgccagtgctgtggccgaagctgcaggagtgtttatcgtgacatcatacccactgacgaggaggaggagtatggattcgatgaactccagaatacattcatagtggatgtaactgatttattgtgtccatattgtggtatggacctgtgcatcacttccatagattcagctaatccacaagctgaaccatggttgcaaactatcactgaacgcaaacacgcaggtaatcaattaaatgaattaggcctgttaggatatcttagtggtatcgccgtgaatgctgataatatggctcgatctgtaattaacaaccatgataaccgcatcgtcaagttattcttggatcgtcagcgactagacgtagttttagtaccagctggtttatctgcagggactctaggtaggttgaactcacgattcccgcaatacatttactctgaaagaccagcttgggcaacagtatgttcagagctgagagccgcggttatatctaatattatgaatctaagccgtaaggaaactcaaggacaaacactcttaattggcaggaactttaatcaggaagcagaatcatggcccaacaagataattaactcattctctggtttgagcgccaagcataaatctataattattgacttgactacagttggtctaaatgaagagcagtttgcaattagtatagagtcagcacgaaacgctctgcacgtgattacagttgactcaaccaacggagtgaattttgttaacaacggcacaggttttgagggaactcttgaatggttggtgtccggtaaccaatttatcctgaacatggctgatagcagcacacctattcaagtttattccccacttcaggaagctatcactacatataattatataaccctcaacagcaggatgtatgctatctttagaaccaggccctacccaggtattgtaagcataacaatagtgcgagctagtgcttccgaagaagtatacaaggaagtgcaactaactagtcctaacaaggttaaggactttacttaccccatgatctctaatagtgctttcactcacataagtggcctgcccgttatgacggtcgaaaggtctcccataaatgcagaacttctcaagactttattaacccgtaatatgacaggtatggcagcactcaatgacactatgacgtatggtgttggatttgcgcacgctcgttatagtctagaggatagaacaataagtcactttaatatcacaccaacccaggtagcaacaacctcttacctagcagctgtgctagctagtagagcagtggcgaagaggagggcgattgccgacattgttaaagccgatccatcttcaaatcaactgtctagtctagcagtcagtactataaccactgctatagattgggtagtcaagaaccaactcaaagactcaatcaagccaattaatgacgttttggattctattgacaacgcatcacctgggatttattctgaatttgcgaaccatgcagtatgggacgaactggaagattggttgagcaaaacaacctttactaaggctaaaatatataagattacacaagcgaatagcgttgagttactgatatgcccacatcaacctggcgagatcgatccacagtgcgcatgttgtggagacggtatggataatcagacatgcgaacattgcacggtggtttgcactcaccagtgcacacacaaatgtaatggacatgggaacccaggattagctacaatcacttgcccatgctgtggtgtagcatcagctccagctgggtgtccttcatgtttagatcacgtgatcgaggatatggttgaatctagtaaaatattagacttggaattgaaagcgaggagaaggagcggaccaggaagggaagataacttaaagcctaaggaagctactaagaagaagcaacacggcaaggagtccgataagatggaacagggaaatgaacctgaagaactagaggaagaaactatcactgatttagaacgcttagtagataaaactaatgccgagtttgcctccttggttaatatgacagcggggcacaatttgatgaatgatagtccggagattactaactggaactcacaagttacacaaatcaaaaatgcactcattattaaatacattccttatggtacattcattggccataatgacatgtttgctgtaatttccatcgatgaaaacaacaaaccgaaagaatactgtggtttcgatgctctatatcattattatccagatcaagtcagtcttaagagcatgcaaatagcatgtcataagcaaaatatgttcgacgagaatgatattgctaagtatgcgatgaagactaatttaaatatagtgatactaacagatacgagttcaacagtcgttaaatccaacataactaatgaatttgttgcaattattcatggttctgctttggagggttatgcaacagatcattggtatacagggcgtctatctatcatgcgttttatcgatgctcccttatgtttcgaatcagatacagcagtcgcacggctgaacaaggcggccaagtcgttttcaagagggaagatcaattcagcaaatccattaggttttagcaaagacgaacatattaaattccacctattgttaaccagaatgtcagacaatatattgtcgtgggtggataaaggtttatggccgatcactacctcgaaggacgtgataactaagcttagaatcgggttcagtgaatcttcaactgactttgatgatctggaaaaaccaggattagttatagagatgaagtcttggaacgaagaaatactacgtatgttggttggatctgatgagaacacttatcactcccgccggttgaatatgccttggaacttgccagcacagatccaagaggatttgaccgaacaaatagttggtgaaatgaggtcgtgtattataaattatttatcacttatatatgatgaatcgattctcgaccaaaacaacaaagcgatagagtggactgaatgcccactcgtaagaaaccaacatgacgccgtgatgatagacgtctcagaaacagtcattaaaactggtgatattatatttgtgcgtatgacaggcaacgataaacccacgccagtgcaggtaaccattaatcgcggtcgagtggtcataggagcaatgcgcggcgtcatgaaaaagagtgtaacgattggggttccaaagatttctgctggcagtgaattgcgccgcttgtatgctctatccaatgccgaaacgaatggcgagagaataactgacttactactagcatccgaaggtatacttggggttggtggatcaggaaaatccactgaaatagccgctttaatgaagccagacgatgttacaatagcgatgtcaacagttgcaattaatggtgtcagacgtaaggtcgatgaatcactacatccaaacgttatgtcggtagagcgttggtgtttgaacccaactaaggtcgacactctatttatagatgaatgcagtcagataagagctacgaccttagcatgcatattatccgtgactccaaacaaattgcgattgtatggagatactgaccaggtcggtgttttagacactagcaagctgccagggactaggagtcttctcagcttagccgatctggctcctggtttaaaacatacgaagaaaacacttcggtttggagaaccactatccaaggaactcgccaaagctgttaggaatttggaaggtaatgaagaagtggttacaaactacaggttaatcaatgagccgaccatagattatgatacaattattgcattaattaacgaggaaaatccagacgttgtgctaacattctaccactcacatagacgattcttgcagaggaagattaaggctagtacacaaattaaaactgtaagcaacccaaatgacacaaatggaatgttactaaccacggtgcatcggtatcagggtaacgattcacccactgttatggtgatacaaacacgcacttcaccccagccaggaattgaaagcgataggcattacacactatctgccgcatttagagccaaaactaagttaatatggtacacagcaggtatttatcaggaaggcaccactctcggtgagatagtgaatggaacaggttatgctgccggcggcctagcagctggcttgaaaaactggcttggccttctaccagctagtattgaaccacaagttaccaacacaagtgtcaggccaattaacagggccgttttcgaatcaactaaatcgagttacgagagtcaatataacgtcagtgtgaacttgaagatggtgggtgaaatagaccacgtcgtaatcagaaagttcggtcgaccttgggttgtgtttgccgtggatcgcgatatcaacgtcaccgtagttcaagattcattcaatctagtcacggatgagaatattaaagacatggagaaaacactgcgacagacgtctaccatgcggccattggaggctgagaagactgtacataagccaagcacttatgtggccgaacgttcaacacataatgaacagagctatacctattggcgctggctatacttaaactgtgctagcattttatccagtaacacaccatatggaatcttaatgacctttggcaggtgcaacatacaagcggctggtatcaatgataggctacaatcactaacattttcatataaacgtaaacctttcttaaccataactacggactcgaagagttatgcgttcacagcatacatttcaacaaggtggggtggcaaatcgaaggccgcgcaaatatgtgatggattgtctctatccatagaagctttaagtaattacacagtatcgaaatcaacatggatggatgaagtcatggcgtgtgcaccacgtcacttgaatgctatcacgcagttacaaaaatggctatctaaactatcaggtttcttgccttcttggatcaattacgatattgtagctggcggtgattggggaactcaagttgagaagattgcaaattctttagaccatcttaaattaccagtgtttatacctgattcgagctaccgctccttaatgataccatgtgtgatgactgagattaaaggaacacggtgtccaactttcctaattaatgaacacctacgcgtgatttgggattctagcaaacccactccggatcccataagcggtgtaatatttgaacaccctgaagatgtcccaaatttagtagcgactataataaatgattgggttggtaacaagctacttaattatctgattggtaataatcatgataatgctcgggctggtaatttcgaaattgaaggtttgatcttaccgatgtcgaaacacaccgctgatggcgatatagtaagttccactttaataaatcgtctgggaaaattgaccatgcggagtaagcgtggtgaaggcttagctatgtttttgcctaaggaactatttaatatgggttcgcacatagttcgcagccaattcccgaagatcgctattaaccgcagtaattactcatgtttagatgatcactggatggagttggctgagactacgatgatgtatgcacttaacgaatccactgccgacacgacaaacatgatcttaactgcgcgaccccacataatcactcaattgtctgccactaacattagaggactatgggttaagactaaccatccagttgatgacataaacacaatgtctacgtatttgtgtaatgaagtgaccaccactatattgtcaaaacaccaacgaaaccaggctaattcggagaataacaatgaaatgaacccggatctaatctcgcttgttattgatgcatcaaaagacggtaacagctggtttaatggcactactgaaaatgtaccactcgaccaagtagtccatatgggcgttgactgcctcaaattgccacaagatactataaaccagtttattcaagccgttaagtgtcgtgagttaatagtgcacatcccaaagagcaagattgataaagatgaatttaatacatacatagaatttgattctaagaatcgggtgataattgaagcatggccacactatctggtaagtaatggaacaattacctttggtggtaagttgtggaagattagctcttcatttgaccgcggcctgactactgggttcgtattgaatcatgtagtgaagaaccaacacgaatggctctacagcccaccgtctatgttgcgcaacacctacaaggttaaaattgaagttccgagcctaactttagacatcctacagacaaccagggtaccaatcttgtcaagtcgagaggtagaagttgattcaagattagttagagctttagggcttagaatggtgcgcggtgatgcagatttcacgaaaatgttaatattcggccggataatgctcaacagtatttattacacggcatccgacactaaaactcagtacgacgcgtccaactcagaggttctagacacggtattagcatcatactgtatatacggttcgctcgctaagagactgacaggtgcattcaacatcatgggccgcaagagttatgctagtgatgacaaacaaaatctccttagcacaatgctctcagcaaccaccgaacacattaaatcaaatggtttagctattttaaaccaagtggttctgttaaccggtttaaatctcacaacttctgaatggatggaaatcatcaatcgtaacacctctaacgatgaaacatcctttatgaataagttagctaagaagcacgaatattggaaggcaaaattaatcaacgtacgtaggcccatttacgtcatcaacggatacaatggcaacaaagcacctgttataacacgacggcaactaagtatggataaggaattaccacgcggacccgatgtaattgccaaggtatttttgggtgcagttacttcaggaacaagtttcttcaagtcctccaaaccacaatcaaagcactggaaggaacctactaacttagaggtatctgtgaatacaacaaaaaatactgggagatctataatgttaatgactataggtagtactggagacgttgctccttttgttgaattagctaatgggttagctgaagccgggtgtcaagtatccttaatctatccatcggggtccaaatcatctgcactattaaggaagatcaactcatccgttaaccagataccacttgagtttgaggtgaatcaccacttagagttactatcaaagaccaaggaaggtcttaactttgacattgagtcaacactaagagagttcactgaacaactgaactacaaggacctaacaattgacaaaatcccgcagagcatcgacgtagtaattggcacagctattaccccacagggctcaagcctagcagaatactacggcgcgcattatctcgaaataaacctaatgccatggatggtgctgagtccgtttgaaaaggaatcctcactatggacacggactttgactaatatgcaggaaccaatacttaagttagcacatctcgatggtgttaatgcgacccgggataactttggtttaaaaccaatgactcctggagacgtcgttaagcgccgtttcccgagagcttatgcaatagacgaaaacctgatcaaggtaaacagcacgcaagaatcaactcaagttggttatctaaccaatcgtgataattcagcattccatcctcgctctgcgaaatctgcatgcatcacatatggttctatgattgaaccatggttagttgatcacgtactgcaaacatcaaggtttttgttggaaattggctatgaagtcacaatattagcaggatctttggttaaaataatgtctactgatgatagagcacaattaatagccagcggagtgagatttgttactggattcattaaccaacacgaggaatttcaacgccacgggattgttttccaccacggtggtgctggcacaactcatgaagttctaagaagtggggcttacagttgtattacaccagtcgcttttgatcaaggattttgggctgcatgtgctatcaaacgggctttcggttgtacgataaagcgatcaccgtcattggatgaagttattgacgtcactaataaagcacgtataatgtcaaataaaattactcacatggaagaatttaatccaacagtgagcattaataatgttatatcttggatgaatcgtgagactaacactaatatcaaaatcctaaacacagatggtagtagccccaaacatagccatcacgtatatatcgacaagccagtaccaaatcatatacttgcactctgggatgaagttagacccctttatcgagattggatggcaggaaatgtagtatggttagatcaaccagtctcacttggccgtccatgttgcggcgccatgacctcatgggactgggcacttggcttctgtgagaacactgttatcactgcgtctaccacatttagtcgcgagaatcctcagttaaactacagtatatgggaacatacgattgaacagccagtactaccatttgatactattaggggcccagctggcactgctacttacccaatgcatgcacacggtttaataccacatgagaccatgggcagttggaaagaacctgaaatatatactttagccggcactaaacaagtcattgatgaacagatgtggttagctgataccgctgctacagtgcggccactccgtactgacacgtatggtagggctcccgcaccaaccggccgctgtaagttctgcggcaatgtcgcatggatttaccgagaatttgggtgtacgaactgttattcctgtctgagatatttacaacaatcccccataatgatcgatcgagttaatcgatacaacttgaaagtggagattggtgagttagctagtagaaggatcagctccactgacttagtcaggaattactctgacgacacaagattgtccaacctgataacagaaaacatgaacctcgggacataccaactaactttaagtgttataccaccaactgagtatgaccccgatgataacggttattgtgtaagacagacattttatcaagcattaaaatcattgccaatcaatttggataatgaaagtgccagagtaataatgtccgacgttcccattccaaagaatgcacttgtgacagaaatacccggttatgccttcttactaaataccaacttactggttataactaactccagtaaggaagctatattctatctatttgacaagacatggcctgtcatcactctacacctgacggggctcggagcacaatggcattgccaactcctcatgaatcccgaaccacatcacctaatgaatgatccagagttattgttcaattcacaagacaacgttgccggacctgtcgaagtcaattgttctaagagagagagagtgtcactgcaatggaatggtatggccgacgactgtgcaaatcatcgccatatagggaaagatgatctaagtgaaatcattaaatatatacatgagtcaagtatgaaggtactagggagtggttctgcactaactagccagcaagttatgcggtggttggacaacttcactagtgaatctgataaagaactcaggaacgctctgtcatttgatatacctaatgcagttggacgattaactggtggaaacctccgtcacgtatcttcgcgcggatatgacaatagggttatcacaactcgtcactattatggcaatatactgcgagttgaacaatcaccagatagtctattacagaactttaggcaaggggacttagttacaattataagcaatagtggaatcttaccaggtatatgttatactcgcgcgggtgcaaattacgtgatactgtccgagagtttaccagacgctgttagtatagcattggttattaaaaccggtgcttctattttaaccgtgaacaaacccagagccatactaactttacctaacaagacttctagtgtaattaatattcaaacacaaaatatgattgaagactcgaattcgggctgggccggtgtgaaaatctgtgatagaaatgcaagtgtctgttacatgggcgattgggatactcgaactcatcacaatgatcgcgtgaggtcttatttaaatgataaactgaatgaggaagaattcaaggttcttaacttccccactaacttagatatcaccaagcctttaaggttaaccattgataaaactaacccatttaaattcactgtaatcgatgggataaacagcttgaccctattaggaactacaaacccccttaacgggcgaatcctctctaccataacttctagtccaacccgcaacacctcaattggacagtatgctcatattagcattggcatgatggagctgtgtgatatgctacccagattaaatgaacgattctcagttatactgaagtacaatgacaacaaacattcaatagacaacgttaagcggcctgctatgggtatcaaggctgtcctacgatcgaacaaagttcgttcagtattacatgctgatgactaccaattcttgcatgatgctatggaagatgacacagtggtggaactacacttcctagaacacatgacagaccacatgaaccagaggtggtggatgaaagatgatcccatcttcttaaatggtcgattaggtttgccaaagtcactggttgttgtcgatgtacaagatgctatctggaatgaaagtaaacaactagaaacagccgagactccggccgacagtgacaactccagtcagcttgcttttgatttaagcatcctacgaagacatctgttgacgggggagagaattggagattcagcggacgtgaaagaagcgatacgttcatgcgtgagcatgatctctgatgatactccgatacttatcgagactttaattgaggagtttggtatgatagggccaattcgatggactcgtaatatgaaatctactggtgatttcactccaacacaaagggaaggcattatgctgctggggacatccggagttgctcttctggatggtaaaataactctaaaccgaaagttgaaggctggcggttatctgccctcatcagaaatcgatgagcatctccagttaaacgagaaaccggacaatctacaacaaccaaacagagtatattggtttgacgatgccgtccaaaacaggagtatgtttactggtggtgaaacatggtggaaagatacactcaagatgaatcataagaaagaacaatccaaccagagcaacttccggtctgatggtctagaggcattacaaattcaaggtctaaaagtgaaagaattgggccggatgaccgattacaaccacaatggttcactaaaggaagtgatggctccagtaggtcgacattttataccatacattgattcaactacttccgagtttgaactagaggaatttgttaaacccgttatcacgaacttggttatgaatatatatgatgatacagacttgacttcatggaacacaaagatcgcacctaaagagggaagactcaaatcaaacgagttactcaatgaaattcgaatatcggataaaacattgatgaccgaatacccagaaatgtcaaagcccgtcctgcatcgtggccccaatcaaaccttcaatgctgtatctacgagattgcactcggtgatacactacaggaaatataaattaaacattcaagaagaatgggatcggtggactaaagtttacttcaaaccaggttatcaatcaatattagaatcaatgcaaagttcagagaatattataaaactagatactaaagccaccttggactggattaaaggccgacccggggagattgcaatagattccgaattggtaaggctgcttgaggaagggatggcattacatcctatgaattccgccaaagttcataataaattggagtcgttactgaaagaagatgttgttgagcaaccgatgactcaacagcgcataaggatcattgtatggcatgctaaaggcacttctgctatttttgctccagtgtttgcggagatcaagaaacgattaaaaatgctatttaacagcaagatagtatacgcagatggttaccgaccagatgaattaagcgcgagactacgagttataccggctgacacatggaaaaccggtattgatggagcaaagcaggatcgacagtgggatcgcgatgacctaaagttcgaagaacatgtctaccggatgctggggcttgatccagccttactatcattatggatggcatcacatcacgactggaagtataaaggtaacaatgtgtctggattgagagatgctatgcgatggtccggtcaggtaactacgtctttaggaaatttcatagcaaacttgacatggaattctagaactatggagagtaacttcgataagattctaatcatgcttggtttaggggatgacaacttgattatatccaaagagcaattaaatactggtgagattaaaacaacctctaaggattattataatatcggtgtaaccgttgatcagtcaaaagatgtcggtgtcttcttgcaacttctagctcatggtaatgagtcaaactttctatcaatcagccccgatatacgacgattaagaatgaggtacgaggtgactaacggtgtatcctcggcaactgactctaatctaatagcacgaacgatgtcatattgtatgatgttgggggatattaagcctgttagggacctatgtactgctgaaggttgggaccttccacttgtgtcttactactcattggagggtgctctacatgctggtgcagcaagacataaagtggaatatgaagaagttcggaacgacttgaatttactaatcaactacatgactatgcgagagactagagtggtgagctttgagcatctatcagagaggcgtaatttaaattaatgtgagtgggccgaaggccacaccccgagc

SEQ ID NO: 899 - DNA, 11022 bp, Phomopsis vexans endornavirus 2
  source 1..11022: mol_type = other DNA
ctcattttgggtcattacaatcacaccacacaacaaacaaccaacacacgatgacaccacaacacaacaacatcatgaccactcacgccgccaaacataacacaaacaagaggcacctcgagggcctctcaaataatacctcgaggaaaaaccacacacaccatgctgatcccacgcattatgccatcgatatgccaacacgccgagtttggcccaaagttgctaaacccgttcggcggttactacagcaacttgatgatattagcgatgctaccgtgtttaatctgagcgatgatgtgttggttggatccacctcaaattgctggcaatgcatattcgggtatgacatcggtgcaaatgttgaggtgccaattagcatgctcaaaatggcaatcattggccaagaagacgatgctgagcatatatggttgcaagttagccacaatgatggcaagctgcattttgaaaacccatctggactacccacgggggagccgacgccggagctttttgcagcgcagcgaaagttcgtcgccaatggcgtccaggggtgcattcggctaaccgacatcttggcagccgcagatggcaaaactatggttgggtccaaatcagtcacgctttacgagcgtctggctactgaccttggcctgcaaggtacagatgttaacacatctcagatgaaaacagctgttagtgacatggtgaataagcgctcgaccaaggccaccacgcagcacatccacccaccaattatactaccgagcagcacaaacgatgacgtcatcaatgacctcaatgcctcatttggtgctgctgctttcatcagaggtaacaggcctgcccacccacatccctatcacaatggcagcaggaaagcagtcacaaatattgtaatggacttccatccacgaaacgcaatcgtctatgatattggtggcaaccactatgaccacctaactaatggtaggttcaatgtacattgtgtgtacactcatgacaacccagctgacactgcaaggcacatgaaatgggtaaagcgtagtgcagattgggcaaagcggcaaatggacaatcaatcacagctcacagacgcacgtcgtgcgaagatggcggcaggtgcactggacccaaatagcaccgatgtgtggtgtgacaaaggattacaaaattgtgagcatattccaaaaacagctgggttcgctatatccgttgacacactcgtgcatgtcaccccaaccgatctctttgaattttatgctgagcacaagatcttacatgcggtgcacgccatgaccattcctgaagactatatgtatagccggcaaggacttctgaagcacaaagaaggccattggtatcattcaaacgatggtacgtggaccgttgagtttgttggcgagagtctgccctacacccagtccaaagcaactactgataaatacttaaccacgccacttttcgatctaggtgaattgatggtatactcaaaagtgtcaggatataaaggcgcacatttgatcatcgagcattttatcttgcctaaattagacattgagagacacctcatacaacatgtgacatggttcaatacaaatatggacaatatattcgtgatgataccagatattgacatggatagttctcttaccctcatgggcagagagccgtaccaactgaaaaaagtggtgatcaatatagctttttacgaacgtatcctcaatagattgatgcaagcttacacatgggactccacattatcatacgcagctgggttggtcggtcgggtgtatgcaaccaccagcggcctacaccaacgttgggaccttagcaatacgcaagtccgtgatcattgcctggttgcgtactggtcggtcaacagaattaatgaatcaattcgaccattactagaccaagcgaaccgtgatcgccgagcacctgacttcttaacgagtttgtgggaatctgtcaagaaatgggccgttgactttgggtcacaatttgacccatctggcagcagcattgtgcaagactttattcggatgaacaagggagatgttttacggctaacacaactgttcggagcagctagccggagtattgaaagccttaacctggccacacagatggtgcactcacgcaacattgttaagtggaattcagtggcatctggctatgccgccaattcagtcaagtataacattgacacgtggcgctccggtttacactcagtaccaaaagaccctacaacgtatgatctgctggtgaaagggaaactagtagatgttgggtcacgccaagtgtgtgcagccaacattaaatgtttccatgaccacagtgttgagcacgatcacataataccaagcaatctgctgaaggtcggcgcctgtgtgtgttgtggcgtgctcagttcattgatgccaaacaggtcatgtactatctgtagtgaacacccaccatgcactgggaggctagccaggtgtacacatgagcatgtgtacctcaatgatgagtgctgtggcagtgctaggtgctcatgtgttaaggacaaacaatgtagttgttgtgggctgccaagtattggtgtcaattgcaatgtgtgcaactttgaccctgctgccccaagcgtgaatgaattaaaattgggtaggaccacgtgtaccactgactttgagttcccaaaccaaatgcctaaggatacattcgatgatactactacaagtacggccatgcatactcaccaccaatccaacgtggcagcaaccgacaaaggagaaataatcaacaaggacactaccactcacaactccagcaataaatcatttagtgaagcaactaacccttggccgaccattgaaaccattaacaacataccagaaatgagctttgagaaccttgaatcgttaaaacctgggatggggcaaccaatcaccagcacaaacaatgagattgttaatcctatagtcgcagctgttgctgctgaaatgttatccgataataataccagtaccagtaatgctgctgatcaaaccatcaccgccagtccatccacgtctagcagcagtggtgttgacattagtggcctactaccacctgatcaggcaggtatggtaactccatcacttggccttcacgccccagtcatatccacggatcttgttaaatcctgtagcgtaactgacattagtaatagccctacaacatacttatcatcagtttccgtgatcattcgtggttgggcagacgttgctggtgatggcctatgtggtgcaaatgccctacatctagctaccaacatcaaccatgatgaaatcaagcaatggtttacaaatagcaccggtcacgcagactgggtcacaggggaagagattgccttgtgcgcaaacgcttatggtattaactgcatcattgtcaatgacagtctaagcacactgtatagggttaatcacaacaaccaggctgtatcaataatccacggttcagttataggtttgggcgcacactgggtaccaggctgcgttgatattaacctttatgcttcacttgatacgacccgggagcaaaagaatttttacgcacttctatcttaccttgctgacaagcagattagcacctccaacccgactagcgggtactgcatgaaatacgcctctttggatattgaaagcatactcacccttggtggtgaactcactgtaagcaatgacggtatagagctgttacaccgtggtagtgctgtcaagccaaccctagacgttaagaaggattcggttaaataccttctagggccgactggatcaggcaaaactacgacagcgcatcagctgcttggaaagaagacattaattatcacaccttcaaggtccacagtcattggcacggttgactacctcaacaagaacggcaccaaagcggcaggcagagctgatagtcaatggttcccagataatattgatatggctaagattaactcaaaccaagtgattctggtgacagttgacgccatgcacacagccctaacatcgggaaacaagccacatgcaatgtatctagactggaccgtctctaggtcagtggtgtgtgatgaggtgcaccagttaacacacaagtacctcacagtaatgacttatctaagtacagcgaacaccacatttgcttcagctacactgccaagcaatcccgttgacttacgctgccaacatgacacccttacacatttcgttagcccagatgatatagaggatgacattattgatgctgttaatgtgccaaacttcgttgacaacacagcagtgatagtaccatcagtcaaattgacttataccgagtcagccaaaaccggcacagccgctatcagttcttccacgcagtcacaatatgacttgagcaaagtaagtaaagcatgtgcgactgaatgcattaccactggcgtcactctaccaatgattaaccgagtaatagatagctcactacgcatagatgttgacataatggctaatccagattgggccaaaggtaggtaccacatagtgaataaacgcattatctcactaactgagcttattcaggcccgaggcagagttggccgagtatcccatggctattacaaagttggggcttttagccgctcaacacccttgtgcaacgtccaagagatactcatgagctgttatgctggcacaccgtgtagtacaaagcatttcaacttgtggcgctcagtacatcaatcagtgctaactacagctaacactcaattatcaatgctaactggcaacggccacaccgacgaccaagtggatagattgactagctggattgctgactatagtgatctgcttaatgcaaagaacaaaggccaccaaccagtgtttgttaaagataacgttactctagagagtgtgctatcaattgcgccaagtgtagttggaactaagactaggaatactagagttggatctgtgaaagcaaatatatctattgactttggtactctattgcctgaatcagctttcggtgaatacagtaagcgcaggtctggtgatgcagtgctttcactctcagctgataattttattgatctcgtgaatgacaccaatgaggagatctctcacaagctcatcaatgtattggcagcagatgttgtcaataccatcaatagtatccgcaactcactggtgtcatcacacaacagaaaattagccgattctactaaaggtcaattcccagttttcagctcaatgcaacaagcggaatcgcttcaagggagaaaagtaggcaataatgatattgtgggttacattaatgaacggactggcgcaggaatggtgtctcagtacaagaacatgcaaccacaacgtgggtacttttgtctaccaaacttcagcacgtcacactactacaagacagccactgaaattaacagcttgcgcggagttgacacccccataattcagaagttaaggtcaagtgttgcaatatcgggcccgcccggctcaggtaaaacttacgccatgttgaatgaacaccgcccggacttaattgtaacaaccagcaagtcgatgcttgacaaaaacaaaacttggcgtagcccagctcagctatcaggccattatagaagcataggagtggatgaaggtggcatcatggactttgtgacccttgtcactgtactttgccacacagacaaagtaattatgacttgtgatctggatcaattgccaagtaatcaagacttagctgtcagtgatctcattggtgaaacatctgcagccgcagccatattgaagtatggtagcgttgagacgttggggacatcaaggcggttcggtcctgccacatgccgactgcttggcctgactggaaacgtcgttgaaccatataataaaactaaaaccgataccatcacaggcagtgttgtcagccccagcaacaaagccgacatgtcagaaatactccaggaggtatcaccagatatcattattacttcaactaatgcactagcacgtgaagtccgatcatatgccaaccttgcggtttaccccatctcaaagtgccaaggaatagagggaaagtcggtcctcttgctcatccaaaaatttgaccagtcaaaattgactgactctgctttgtatgtcgctttgagtaggcactcggagaggttgactgtggtcgttgatttacctaacgcaccactattggatagattgaggatagatcatgttgccgcccaaagttacgctgacgctgccggcggcatgttgtgcctggctactcaaacgcggtggtggcttgcagacaggctggccatagcattgacgtcggaccatgcctggttagacatgattaacgcaccaccacttgagattaccaccgactgggagatgcgtgaatacatgctagctaatgctggcaaagcatacctgttaggcagggctgaatcttcaaggtatggcacatacgttctatcatattcggaatcagccaatgacgttgacgtctggaccttcgcatgtgataagaagaagtacacagtgccagtgatcaacggtatgactttacttgacataaaccggaggtaccttgagcagctgccattgcggcagctactgagaataatgagcatgtatgtactcagtaaactgaaaaccactggaacgaaagttggaatagccatcgctaaatggtttgagtctaacattagcacatgtgttaactgttattgttcagtcagacttcaaatggcagacggcatgccccaacctgattccactacagctgggggcgcggccaatatcctatctaacataattgacattcttttatgcataaaggatggggtaacgaaagccatacaggacatgcgggtaagtttgagtaaggttaggaagtattttgatggtgctatcgctggcaacaagctcaaagattatgtgacgaacacgctatatggaacatacatggacgggaccaacaaccagagagggaaagacccgtctggaggagccaacagtttgctagaggcattggtagacattataaagctggttggtaagaaagttgtcggctcagtaatggacttatacaattttgtaatcaaattaatatggcctgcatcgccccaaacaagtggtgataacggtagctatgaaatggacgttatgaagttaactcgccatggtccagctgacgcatctatcaagcgcaagccaactacgagattgtacaagccaatgtctttgtatgaagtcagcaactttaatggtgtagaagtgatggaactagagctgtccgagatcaaagatgaatttgagttattgttcgactcaatccatgggccaacctcaccaccagtcatccctgttgggctatcatcgaatattggagcagaggttgttgaaacgttgataaacaatactgggaaatcagttagatggtcagttgccgataagccaagtgaatcatccgaggacagtgatagcgactcaaacactgagaggttacatgtacaaaatgttagctccagcgtgactgacaaccaacagcagaattgcttgctgcgtaaaccactacctgtgcctgacaacctttgcaacccaaagtcagtatctcgccaagtagctgaaaaccccacacgtggtgagatcaacagcagtgaattaagcaatgctgataaccacgacggggaagagccacaaagcccatccatcgtaccagcagcaaacggtcaaagtaatccattagagtcgcaaccaaccgataactgtcaaccagatggccacattgattacgagttggccagcgattataatgattcatcactagtagggaaatgtaagaagtgtgttggtcacacggtggaagccactactatcaagactaagctcaggttcaacacttttaagttgaatcttctcgggcgcatggctgccaaacagcaggctgatggctcaatatcagggaaaatcaacctcggttacttcaatgtgcagttcaatgcaagcccctgttgcaatggcaaataccacgtgcacgcaagcaatagcaatagcacattagccgatgctatcttacagccagtcccaagtggatacattgtatttgtcaaaccaagcgatgacgacattgacattgggcaattaaatgctgcagtcaaagcaatctctgcgatgggtggtgacaacaatgacagcattatgcaattgttacttggtgttttcaaagcgacaagtaaatatgtgagtaaagtcgtcaactttggtagatggaaggttgaagcaatcttgggggcctgtgagttaagtacagtacagttgccaactaatgtagttgattcatatcgagccttagcctcagcgcttaacaggcattacatgctgaggaaccatgttgagttgaccaccaatggtggcaccaccctggctacgatcacaggtaccaccactgatgggtgcagcaacaacaatctcttcattgccatttatggattcggtctgaccacgacagcttgcattttcacccgcgattctaggctgctaaaccatatcacacgtgccataacaagaacatttaaaacaaggacagggccggagtcagcactccatcctgaggtgggaggaagtgccctagctacgttcaggggcttgggccttgatattagcaaagtggtacaaacattagataaccttgatactgatgagatagtcaactggataacttcaaacccattggcagccattttcaacttacagaaccaggatacccacacgtcaatcaagcaatcaattgaggactacaacatgatgggaaaattggtaaccattaacatgcctaaagttgagcgccaaaccatcgcgttttgcataccaagcggccatgggaaaaccacaacagttgcgcgcatcaggcgtgagcacccagagtaccaagtgatagatattgatgaagtccaagagcaagcgtcaatactaaccgattcttttgacaacaaaatgaaatcatataagcgcaaacttgaactagagcttaggaagtcaaaagtgcataaacatgcaatattttgccacatgccaggagtagccccagttgactgcaaacaggtatgcattgtcaacaagttggccaccataccatttgatagaatatggtctaaacaaaacttagagaatttgataagcaagtccaacacaatacattatgtagatgggttggacgatatgtacaatagttgcatcaaatatattaacaacacctacagcggggatatcgtgtttgaggagaataaggaattaattgacaacatcaacaacatactcggggattcatttgttagggatcaaccttatgtggatgacatcttcacgatgccacaagggccacgcgacagattgtcgtacaaagagaacaacattggttcagggcaacagcgcatcttcgttactggcaatcatgttgaagtagcacggccgacaatccagaacatgccttctagcctacacaatgcaatcacaacaagactaatgggacgggtgaaacaccgcactgagcagatcagcattccggagtaccacgcaagcctcaaaaaactgctaaacaagaattgtgataagctgttagcagcatatgagttagatacaatcagcttgtcagtgaaagctgtgctggattggttgattaacaaaggaaataaacttgaactagtgacaaacatgctaaaaaatgtaatacgcgatgagcatgctactgacccagccaatataaacgtgcattacaaagtggaaacgctactcaaagagcaagtgaacgatgtgcttgaccaagttggccgagtgatagtgtggaataaccaaaacattaatatgtttatatgcccaataatcaatgaagccaaggccaggttcaagactctattaagacctaacgttatttatacagatgggatggcaatagctgagctgaatcactcactacggcagtatgaaggaaaatatctactagagatggacctatcaaagcaagaccgtcagactgataagccaattctgcaatacgaatggtggctcatggaaaggctgggtgtgtcacatgacgtagttgattatatgacgtcatttatgccaacattcaggataaaggggagtaacggcgaatcagcaactctgccagcaatacactttagtggcggtgctatgactagcttaggcaatgaaatacgcaatctattgctgctgtccgattgtgtttcatcatcatatgtcgcaatatatacactaggggatgatagtttagttatcatgaatgttgagccaaatttacccctgtacaataggctatgccggaccaggcacaatgttgttaacactgccacatggagcaaaacaacggccacattcctacaattaattattgcccgagacgttaacaacaacttttacgcctgccacaatgtaagccggctgcgtgagaaaatagcgtattccacataccccaactggagctcagactggaaagcaaagtatgcatcatacctaatgatgataggggaaactaaattgacgcatgccgctatggcatactgtgggttcacagtatttcctaatttaggcacgactatgagtgaacgactgcatgccaatagtctacacaatggaaccaatgaagcagacgtggttaacacaatatcagatattgtccacatgaaggacgtgcagtcagttgaagttaaactggaaatacccatgttattaccatacaacaaactagggttgggaagaaaaacggttgggccctacaaggaatcacataacaccctcatccaaaacgtactacagcaactccaggagtactaagatgcagatacacaaggagccacgggcctcaccatgtagcagtaacgcgactatggttgcctcactgaatgaaatcaagtgccctttatgggaaaaactcgccacaaaactaaagtgctagcattaatatcttaatcctagcacgttgttgaaagtttgtgttgtggatggccccccc

SEQ ID NO: 900 - DNA, 14345 bp, Phytophthora endornavirus 2
  source 1..14345: mol_type = other DNA
gtgataatccgtcacattaatatgtttgctaagtttactcaacagagatcgagtaaaactaggggcacccatatccccaatgggtgcccggaaattattaacgacaaagtattaaaagacatgcgtgaaaagttccacctgaaggtcaagacaggcggtaatctcgtacacaagtacaagactgaatttaagcgcaggcgaaagaaagaaggggtcaataatactatagtacccatttgtgagggaatgaagaaaaccattctggatcaaatgcagtacgtagaaatgtacctagatgacatgaaccccaaggaggtcattgcctacgagtatcatatcaaaaacaataaaggtggctgagtacatagccggagcaaggatgtcagacgattcttggttcgggctattggttcaaaaatacaatgagaagaatcacatctgtgatgaagtcagccccttcatgggggatggaattgaccctgctttgcacaaagtcatgcgtcacatcaagaagaagtacaataacagcatgatggaaatgtggaaggagtactgtgcgagcaacaccccctacagacccaaattagttagccttggaggacaagtttacaagattagggacaatgtgataggtaccaaggaccctatctacaaatgctccttctgtaatgccctcaactacagtgacgatgttgccaatgatctatgtggatgctgtctgggttctctagacattggcctggaatccaccctgaaaaacactagtcttatgcgcatccttaccagtctggaaatgatggaacatggatcaaatgaactattccaattaatgcaatctggttacaccgatggtggtctattaagtgacgatgcagaattcatgcgagtcctttatgagcacgacctaagacttgtgcgcaacgcaatgacgagaatgactataagaatggcgaactacgatcgcggaatttcccgagaacagttgtcagaactccagcagcatttcccagatgttgtttggcgcgtgagccccaagtacacaaccaagccgccaatgacgtcaagcgaagtacaagggcaccttgcggtgatcaggaccatgactcccagctctcacaccttactgatcagagatcaacacaactggaccggagcgagtactgagttgatcacagacaatcccgtatgcgaggacggcaaccactccatcagcaactgttcctgcttcaacgatgccaacacagtcattgtatttgtgggactgcccggggaggacgcatcacgcgtggttcgagagtgccactgcaacttcaacaatcaggttgtacacctcatttctatcctacccaatggtcagcaccacggtgatataggtgtaaacgaagagttggagatgaatgtggatggggacagcctattgtgcagccccaatcatagcagtgtgacctgggagtgctcatcccacgaattggtggtttggaccactaagtcaatggtaatttacggggacatgcacgtgaagtgtttcactatggcagacacctcccacacgacttggcgcaccttgaatttaacgccgaacattggttcagacagtcaacccactgggctgacgcacttgcaccccaagaatgttaccatgcaggtcccgagagtgaacaaacaggggttattgccgcaagccggcatcccagcatttacatttgagacggtggaggtcaacctgcctctactgagagcgttgaacaaccgcaacatgaatggcaaggtgacgcatcaaactctggtggagtatggcattgccatggcgcactctaaatacaccactatctctcgcaccattaagaagtcaatcaactaccaaatgattttggaccacgccatgttgagtgtaatcatgatgtcgttagtggcggccaacaccaatctaattcacaccacgctcgcatcagctgacgccaagcgcaatttaatgcacggagtggtgggagttgggatcaccactatgctagaaagacttttgaagatggtacaagacaacgtagaggaagtgaatgtaacaaagtggttagagtcattgagcgattatgagttgaacacgttgcgtgggcttcacaatgaacttctcggcttagctcacaacgactactgtccactgagtgatgtggaagacaacacagagacgcgtgacactgaaattacgggcatgtcaccaacaccaaatgtgtgcgctcaccactctaccgattgcaatcacaacatgacgggccccaagtgcatctgttgcaacatctacagcaaggacaaatcttcaaattactgcgcgtgctgcggcaaggggaaaaagtgcaagggcgcacacgcatgcaaccacacttgcgagcctatgaacatgcacaactgcagcgaagactgtcagcatctgaagaagccttgtccttgctgtgagatagacacatgcttggacatttgtccagtttgtaatgccagcaacttagcatgggttagtgaccaggaaccccttgtcgaggaagccaaggcgttcaagggcaaaccgcacggagaggcttcacagcacaagtccacagagaagatgaacaaggaaatgagaaacatcgcacgtgaacgacaggtgcgcgagcgtcgcaagactaaactggctgaagaccgtgagagatcgattaagagcaccgatgagcacctacggtcgacgggagagttggagcagggacatgaagagctcgagcgcgctgctgctgacactcatcgcatcgccatcggggataacagaataatgattgatggattggcggtggaatggtacgcaccagacactcccagtgaagtttgggtgcgcgacataatgaagaaactggataacgatgttgaatggttggagtgtgtttctaacaaagacacgaacggcatggctgggatattgatggccgagtttgacgagggggcacccccggtagagcccaaagacgacccgatgcgcattgaaggcatcttgcatccagaggccagtgtttccgacatgcctgcagaagtagaggccatcaaattagacaaagactggtccaacatcaaattgcacgcaggaaatggaattctaagcatggtgatgtacggacaagtcggggcttgggaacgtcatttggtgcaagcaattgacaatggtccgaaccctggaaagatcaacctcagctacatggtagagggggagtggtcagtggacccgaaaaacatacaactcaccagcctgatagataaccctggatggatggacaagtgcggattttacgcaattgaaactagtctgggcgacaatgtagaattagaagaactggagatcctaagtaaaaaggacagctggttcacagcggaagacttgtctttatacatgtgcgacgtaggcgccaaccatgttatactggtggaggacaggtgcactattgtgtgtgtggacgacaccgacgaggagtacaccctactaatccacaattccgcagtatccgaacaacacaaccattggttaactggaacagggaaacaaattgggccatgctgcccttggcctaatatctcagggaccaccacagctgcggagatagaaagctgcctattcaaccaccgcatggactcgaacgccaaacgatttgatgacttaagcatgaatgaccgaaaggtgctggcagcggatttggtggaatttgccagcagaactaaagtacagaacaccgatttcgagcaagtttggcaagtcaagtccagccacacaggaaaagtactcaccaacaatgtgatcggatcccaccgaccccgtgacggactcttctgcctaaagattcctgagaaattcacgcatctggtcacattactaactctgcccagcgatacagctatgttagataatgaaatgcaattagaacacaacatgcctgtggacatccctgctgtgttcgaccaaattcaaacgcaagagactagagaatgcataaagtccctaattcagctggatatttgcggcactagtcgcactgacgattacagcaacagctataccacggtctgggagaccgtgaaggtggtaaacacgaggagcggcacgacaaaactcgtgggtatcaagccaacgtgcaaaacaggcgacatattgaggtgcaacaaactcctcggcggagacaagtgccaattgatcaaacgaggtgggggctacattatatcagggcgcatcaacccgcacgtcatgcatgcaaaaattatgtatgccaaggtaagtgccgccagtatagccatgaaacttgagtccttatggcacacaatgatggacaccgctcacacaaggtacctgttggagcacgcacaggtgctgctggcaccacccggatggggcaagtccacccgtattgtcaacacgagtgacctcgatagcacagtcgtgtgtatgacatcagcgtcacgccacaacctgatcaatcgtggcgtaaaggcaagatacacaatatctgccgagcgggccaaactcgagaaggtgacaacgagaaaactgataattgatgaggccacaatgttacagtggacagacgtgcattgtatgataactgaggacgtggaagaattgtacttgtacggtgacaggcaccaaattggggttgtggacatgtcaagttcttcaggagtgcgaaacgaccgcaacatcacgcagtacaccactaatgtggaaacaccctccggcacttaccgcatcggcaacccactatgcgccgaactacgtaagttgtaccccgagatgattgcccttggcacacatcaaacaacgttcaacgtcacacgtttggacgaccttacgggagacgaagtgcgagagctggtaagcagagtcaaacccggaatcattctcactttttaccaatccacgaaaaaccgagtgaaccgcatgcttcggggctccatccccgtcagcactatccacagttatcagggatgtgagagtagtagggttatggtgttccagcaccaccctcgcggaatccgtgcggggctgcacacttccccggattactgtctctcggcagccacacgaccaatcaatcacttggaatgggtgacggtaggcacatctcatggtggcacatcgctcgtggatttaattagcggaggagactcaactgccggtggtgctgatagaacgggcctacctccagcagtgcagaacctagcatccatgttcaacaattggatcctgactaccaccaatagaccaggagacatagaaaaacccgctcacccttcaacatacattgatgtcgtgagcaacttgctatctggagatgagatgaacagatctacggaagctggaaaattcatagtacttgaatggtaccctccgatgtcagacttcctgaacgacaaccgacccaaacctattggattagggttcgcatcaaatgtactcggacgtcacaagattacggtcacccccaaaaaggtataccacatcgaatacgctcccgcactgggaggagattatgaatcgctggcccaaatgttgcaggagacgcaccacacgatcagaggaacagaagccaacgctgagacgcaaccctccactgaagacagccaccccgctgcggttgtggaaagccccccaactacaaatgtttcggaagtgcagagagagataaacttcgagcaagtcgatcgaaaatctttattaatgcaaagcaacttcataattgatcacaatgcgtggccaaaaatgtttgaggtattcaacgattacaatctacgcacagacatgaccgctcaagagggtggaatcagagcccatgtgcacggaggtggcgccgatgtgttaatcgagcaacgtgacaccacagtgagtgtgacgttgaattgggtcgccagccttggactaatggtaaagacagcccaagagcaggcgctgcaaaccctggccaacaccactcaagcgctggtgacggacgtaaaaactcataagacgtatcagcccaccctagcatctactcaccagcaagagcttgccgatttaacgtattctggcagaactggatcacaacgatccacagtaccaatattggaatctaacgtagaatcaatcccagtcatgtctgtcgcacgtgatgaccacgaaaatgacgaagacgagttttacgatgcattagagtggaaggccgacctggtggaagatgcaactgctattatcacagacagtcagggaaatcagaagagccacttactggtcgacttcccgtcatcccacttgaagctactaaaggtgacagacgacaatatagccgccctaacgaccatggtagtttacgtaccgtggagacagacaattcgcattcacaacctcagccacatcgtgcaattcttccaattcggacgctgcgacttcatcctgaatgtgatgagtgaacctgtatctgtgagtgtccaccatggatgctctatgtgttgcggcatccggttcatgacctgtgacagcgtcatgacaattaacgagaattactacaataagaataatcgtcgtgtgacattccaaggattgtgggagtacagtgcgccgttactgtctattagtgaacacttcctaggacgaaggagcactggtgagatcttccacatggtgaacccttcttacatagatgagttgaccccgttagactgtgtgagtgacctcaacttggacagcatctcaatgtttggcgacattctgaaagacagattgaccactgccgcactcggaaaattacacggcattagcggatacgcctattatgccagggagaacgaggtcaccgtacacaaagcttgtcaacgtatggtaagtaacggcttgctgcctgacaatgtcacatctctctacaagcatattaatactgtcaatgccctgcatccagccacagttagaggggtgcgagtgtggtgtatcccaaccgacactcatactgtgatatacaatcccaatcacgcggatctccaatacctgcaacccggcaccaaggtaatcacgtctgtgagatccatgtgcaagatcattcagaatctggagcatttgcgtatatccaacattgccaagattaaacgcgctctgggtttgcacaactttgatgcgggaggtgagatgtttgggcctgttgtgggtatgatgatggatatggacgagcacattggtaggaagactcctgtgcacaggttcatggcgaggaaggtggggatgctcaagatacaagcactgaagaatgaacaacgcaccttgtacctgcaccacgagctagtgacaaaatggaaaaatcacatggacaacttcgaccgattcttgtctgtccagggcatcaccttgccatcaccctcacctgactactgggacctgttggacaacagttggatgtggttctgtgccaacagaatcgccaatcaaagcgacttgcatttcactgtcaacttggcgttcatcgccaccaacggcgtgtgggaccaaaagtacttagatgcttcaccactagggttgtctagtgtgaaccatgccgaaaggttgcacatgctagcggagatggagcgggcccgcgatggatataagcgcgctgtgagtagtgaacgctcagacaaggattcacaattgtacaagcaccaacacctgacactgactaagatagaagctcaactgaagacaagaaatggacccatcgtgtacactgactgtagcaaatccaaattcaagatgagtcacatgaactttggtttgcatttggtttcaattctagcggagcctgagtccctggcacgagtggggctgtccctaaatggagttaaggtaattgagggactggtgttgcccgattcttttgctcgcagccacgaaccgttccacacagtaaccatggacaacgacaagaccagaattctcttcaatgattctccacgtgtgctagaagaggatacacggactcgtatggtcctgatgaccaaaccgtacattgaattgaatgggtcatattggagaatagaaatcgtcaacgagttttacaacgcttacattgtgaggttgattaacgaaaatgatgtggtcaagagatgtatcatcaaaccgcccacaccaatccagcggcatggagaggtagtgtacaacattcccagcgttgaaactgatccgcttaagatagttgccaatgcatcagttttctctcaccgccaggtgagcttagacgccaacgtgttggacaaattgaccctgcgttgcctgcgcgacaggtgttctttgaacgacctactaaactacgctcgcattatgggcaatgctgtgatgtactctaagcagttcaaggtcaataaacatcagttaaccactactgagttgcatgatcactgcatggtggcgttctacgaggctaaaaccgacttgctgatgtccaaaaccatcatgaagctttacgcagacttacgtgcaatcgatgagttcgatgtgagcaatggtcctgcctccataggaggtatgatgttatctcacgtgggaagacacatcgtagacaaaatttccaagatggccagcctacttcacatagacattgactttgacacagtgttgagtggtattgcaggagtggcgtctaacattgaccgcacaaagttattatccaaggccttgaaggatctgatgaattggcgtgtcaagagagtgtccttggcccctaggttcctggaattcaaccgtagaaccatcgagacacaagggttgcaattgaacactctccccgcggacaacgctgagtggttggggcgcacattcgctaagactgtatccaaagcgacgtctggggtagaactaccaacgtcgacaagtgaacgtagtatcactaagatgaccaaactgccggacaccagcagtggggcaatttcaaaacagctctacataattgtgtgttatggcaccttcggcgatttgtacccgttcatcaagatggcgaacgtgttgggaaaggtaactagcaactctgtgaccatcgtaacacacaacaacctgatagcagctggccaaaagctagtgtcaaacaatgtgagcctacacggtctgcgatctgggaatcaagccatgctcgactttctaactaatgcaaacaacgggtccatgactcccaacgtgttggatagctacatcaccttgaacagagaacttggaactttcttgtacgacgtgacggacactaacgtaaacataattgaaagccacttctctcgtgtgggcaaactcatggcctccatgaagggttggaagcacagtttcgtgagttgttttgacaccgtggcacaaaattctaagttcacgaacaaaccaaagaagacatggaaccaaatgttatccgtaggtatcatgtctgctgctgccatggccttgaactttagcgatagtgactggaatgatgttatgaagaagatgcgcgtcgagcaccaaaacatcgtcttgctgaagtatccaggccacactgatgttgagcccaccacgcacgtcagattgactggacccctagtaaacgtcaagaagaccaccgtagggcacaggaccgcccgtaagttggtgctgattacatttggatcggtcaacaccacggattccaaccgaaaagtcgcaatgtacagccacgctgccatcaagatcaaaccagatgagatcgttgtgcactgtagcaaactcgagaaaaatgtcctagaacgccagttaaattcggaggtcaccaagcatagcccatcaaccgccttgacttttgtggaacgatatgatgccagcctgtacagagattgccatgttttgatgatccatcatggaggcgcggggacgttctacacagcccggattttgggtttcggccaggtaatcgaccccttctatctagaccaattcgattggggcaatgtggcagaaaacgagggggttggaaaattgatgaaaccgcaggacgttttgtgctcttctgaaaaattgttgagtacagacatgtggaacacattggtcgccactgctgaaactaaggccataccggggtacagtgctgatttgcaagccgaaatggccgtgaatgctctacttaacatgttgcgtgttcacggcaaagaagaggaatgtgattgcaaactgtcacccagtgccgaggagcacggacaaattcaagtgggaaatgccattagaacttgtcttaagaattggtggcggactcaggtgttcaccgagaagactgagaaaggtgtggaaatttgttccggagtcataaacaatgtgtggaagactgctctgtcaagtcttgaaaaacactcgctgttggaacaaatttcaaaagaaacaggagaaactgataacaccacacccacaacgtcaatggcaccttcaagggtgaccacacacctgccagaggaagaaagtgatgaggaaactaaagaaaccgaaccccccgagaaccaaaatcaaaacaaggagatcgttggggaggagtgggaggaaatctcacgattggagcaaaaggcggcaccatctgaaacaacacccaaccttactaagaaggcaaagtctgcacagagacccacaaatgtccgtgaggaacccaaagacgcagacaccagcacgagaaccgacatcataagtttggaccacgtggtacgttgcgtcatgaggaccaagatgacacccgtggtgcctgggtggaaattcattgatgctgttggacgttttacgagcgaaaaaccaacaaacataagattcactttgaaggacacacacaatgacggtgcggggtgtggtttgaatgctgtcatggtaaacctatcgcggttcgggcagaaatttgcaaaagataagatgatcaacctgacagggaagattacatcacacaccgtaactgatcttgcgctatgttgtctgctaagcaatgccaacatggttgtggtgtcagagaatcaccccacgcgttggtttgtctacgacatcaactggattaccgtgaagatcatccaaatggaggtgaaaggtgtcggacatgctgaacctgctgaattggacgaacaggaaatggccactctgtggaagaatcgccgggagttccaagacgtcatgaacgtacgcaagctggccactgggcctgtttgtaaacgtctgggtgtgcccattattgccagtaattacggcccaacaaactgcttagaccatgttcatttaaccggaacccaggttgacacggtaaggaacaatgcacccataaaaattaccagcactggtgtgaagttgaaatccaagtgggtctatgacatggaggagctcacaggaaaacctgagtcacactggatatcacgcctgtccctaagtaacgtagggaaaatcatatcgcgccactcaaacccaataagggtgataaagggaagaaaacacaacaatggcattttgttggacggggctacaggatctgtcgttcgtggaggcacactagttctcgtgattggaatgagaggagcggtcgtaaccatggccaatcccattaaagacggagtgtggttacccataacacaaatggatgtgaaccctttgttcttcctgagcctaggcacaggggtgtaccccggcgcaacccaacatatcaagacagtcttgaaagcagacgaggaagtgaagacattcttgaacaatgcgtcgctgaaccgatgtcacgccttcggattgttcaacaatgttttccgagtgcaagcttctgatgctactgatgttatagtatcacagttcgatgacagaaagcaccacaattatgacgacagggaatttctagagaagttttcacgtgaccacatcatatacaccggaacagacgatgccaatttggccttaaactggattctaagcagtggcgtgtgtcacaggagaagcttagtgtcgggacacgtctccatggaggtaaccaccagggatcaggtgttgttacgcttattggctctggcgccgccgaattggaaggtggaggaagtgccatccaacataaatcaggaagggaacctcacgacttaccaagcccattatttcgatgcaaacatgacggaaggtgcttggttcgggttgtcagatttattgggaaagatgttgcaacctgatgggaactccaacgacgccgtgctcaggcgaacagtaccatgtgaaggagggttgacctttaccgcggtgctggatggtctgaaggccatttccgtccatccggcatctgatttgactctgaccatactgcaaagcaaagaggaagacgccaggtacaagttggaagtgatcaaagacgatcaagaggtactggagaaactacatgacttaggcaagttcgccagtgttgggcctctgatggccttgccgaacgggagcgtgctcgtgtatccgtttggttacataatcaatgtgcgcaacgtgtctggaggtaatgccatcgagaatgtattcgatctgagaggcgacgaggatgattcgcatggaacatccggatcgtcaccaccggctgacttttggtccacaaaagatcaactcagtaaaactgcaggtcaaatcatgggagctcacgactggtggcacatgactgataaaaccgtctctcaaacaacagcaactttacgggaagtggcaagtatcatgaatgtagacgcattgcaggatatgacattgttaccccttgcagaggataactttgtacaccgtccagcgagtttctggaacaacagaatttacttccactttaaggacgacggacaaacgttacagagttgcgatttaatgctggacgaagacatcaccagtgaagttcttgacttctggcttgaggacgatcttacggaccacaatgttgtgtatgggccgaagtcagatctaaaggtcacccaccaaaggaactatggtgcagtcaaaaccattgtgaagacaactctgacacgttatcctttgtattctcgcccagtcatgacaaaaatggccaaccaggaagtgaatgcaatcactggtcgcattggctcagtcactgaggtacgcaagtacaatcttgatgcaattaccgagggacgcaaattcgctcaagtgtattttaaagaagattgggcgtcagtagtcacacaatacagacaacagcctctgacgtttgacagtgagaaaacattgacgtggatagcgtctcgctctgatagcagcaaaatagccagggagttgagcactctgcttgatgagggattcattgtgaacgggctggacagggtcaacgtccatcttaagttggaatctttattgaaagatgaacccatcacctcatacaaggaacaacaggctaggactattgtgtggcaatgcaaggctatttgtgctatatacagccccatctttattgaagcgaaaaagcgcctgaaagaactgttcaaagagttcatcacttacacagatggattgacccccgcacagatcaatgacattcttgcaacacaggggacaacaaggtacttcctcgaggatgatttgacgaaacaagacagacaaacagaccaacaattgattgattgtgagtttgagatttacagatacttgggtgtgtctgaacttgttttgtcatcttggagaacggtccataataaatggaggttcaaaggcaagacgactcgtggcacttttgacgctcagcgccttacaggacaagtcaccactgctattggtaacgtaattataaatttgttagtgcacagacggttggttgagattcacagtgcatccatcaagcggatgttagtgttgggagatgacaacttgatgttcactaaccgagaaatcgacgcacgtgcattgcgtagaacggtggctgattactataacatgcaatcgaaagctgtgatgttcaccaagcatgggacgttctgttcacttgtagcttacaggtcggttcatggcatcattcaaatgggccccgactacgtccgactgcgacgacgattcgaagttacgaatggagtgtccgaagttgacgacatcaacattcagatgcgctccatgagttattgcgcgatgctaggtgcgataccggaagtggaaagactagtggcagagaaaggatggcccataacccttgttaattggtacgcacaagactgccttttgcaagctctggaggacaagtatagtatgtcccaggatcaaatcatgtccaatttacaggaattgttgtccatgatccgcactccccgcaaatacgaccacacggtcacagtattagtagaaaatcgttaatctcatagcactcctatgagccttcttatgaagggtttcccccccc

SEQ ID NO: 901 - DNA, 13810 bp, Phytophthora endornavirus 3
  source 1..13810: mol_type = other DNA
actagcaacaaaacaatactacaaagcaaaagaattctcaggggaggccgccggaccggagtggacggcctcccagttgctttaaatcacgagcagattcgcaatctgcaatcaagattgaacttgaaagtaactagacgctttaagagattgaaaaatatcagtaaaacgctcaagttaatgcaaagaaacaataaacactccggcaatcttgtacctatttgtaagtctttaggtgatggggcattaaaacgttacgtaaaatctacgttgattcccgacatgttgaacccgagtaacttacttggtgtcaagtacgcgttaaagactgggcaagcgaagtggttcatcaccagggaacaatttgaggaattgaagttgatctccatgttgtttggtggtagcttacaagatcaaagattgagtaaactccgaagtgttatgtaccaaacaaccagtattggtaaggaggtggtgccgggagaggttaactacttcgaggattggtacagatggttcaccggcaagtacaacaacagtatgtacgccatgtggtgccaataccaaagcagtcccacattgttgtgtgacagaatcattaagattactgccaagacgacaatgtttgttgactgtgaagagtgtgaggcctctgaggtggtggtttgtcccttctgtggtatgttaaatcatatgatggaagaagagaaaacccactgtggtgcttgctttggagacttagagtgggactttgagtgtggtccagagggagagcctatcacaaccaccatcatgaacttacttcagggacattacggtatggccatgttagaacaattatctttgagcaactacctagatttatcagcactatcagagtcaccggtcacaccggctattgttaatcatgacttaatgattatcaaacaattattatcgaggacaaggaatcaaatggttccaataccgtccaacgtgtctaagtcggaattgtcaagtatcaaatttgacctgggcacagatatgtgctgccctagacacccctgcctgaacggggctcgtaggacggttgctgaaatttcctggttggtcaacaacctgcggcaaggattgaagcatgagccacacaaccatgtcgttttagataaaatggatctattgagtagcgtggctctggatgaccagccttacgtgaccgtagatgacctgcattctctaacacgtgaggagtgggtcgaagtgaaacatttggtgctgattttgccgaatggacgagacatgaccgaagcactaaacaacaaatctgcgacctgccaagtgacgtgcatttctctcaacatggacgaggcatattataaagaagaatgggacgtggccaccgtggctcataccaattgggcctccccactatatagtagtgctacggttgagttcggaactgacgtaaaacagctacttagcggggagcggtacaccattcttgccagtgggaagatagtcattaacagtgtattacaacgcactaacatgctcgtcatgagtagcatcaagcaatccatgaaggtccctggtgaagtgcttggcaaaatcaaatcttgtgacctggaaaaggttggagaattcaccattcctattgtagatgtcaatgcattgctggggaaattgggagtccccgtgcttgaagagaagaccgtgtcgttggatagaacattcttgcgatatttaattaacaagaacttgctagggaacatgacctatgctgatctgttggattacgccattagtctgtgccactccagatacgtgttggacggaagggaaagaaacttcagccgcatttctgctgatgactgcagagtgcactgctatgtttgcattatgatttgccgtttaaataagtccgaaattcactcttatgtgagtcaattaggacctgacaatcaatttaagcagatgattagcgtgcttggaatgggtgccatgcaaggcctttggagcatactcatcgatacagctaaacagtacctgagctgcactatggaaactgctttgaccaaaactctcacctggatgaaaactttgagcaccaatgaattctatagcactgacatttgggaaaacattcgtgagtggacgttcaatgatgccaccgtaaagcaacaatacttcgtccgcagtgaatgggattctgtggagattgttgccaactgcgatcaccacaatgtcgagtgccatcacgactataatccgtttgaaatgatcgagcaggacctgtgcacatgttgcaagctcactgcgaggaaggagaattcaacgttgtgcgaatgttgttcaattagcacgaattgtcaccatgattgcgagcacttgtgcacaggtaaatctagccatgtttgtaaacccagctgcagccatgataagaagttgtgccggtgttgcaaggtggctacttgtttagatgtatgccccatatgcaatgaccacattccctgggtcgctcctataattggggtaaagaatgtcttagggaaaaagacgtccacacgatcttacgcacaaccagaaaccagcaagaaacctcacaacaaggtcactgtgccgcctaaggtgcacagggacacattcaagtgtcatggagtgacccttggtgaaaaaggatgcaactctaacgctctgaagactaataaggtgaagatagaggctgcattaagtaagattaccaagtccgagctggagatgtatgacgacgatattttagccaacttgggtttgtatctgttgcttgacgaacaactcattcaggagccggagttacctgacaagccgacactgggtgactacatgccggctaaaaccaccgatgaacatcaagtcaaaccgcatgacgctggagaggaatcactgagtgacgcagagatatcacaaacttctttgtcaactgaccccactattcacaagtggctcatgaatttgtcaccagtgttgagaaggacttgtgtagatggaatgttgaagtgttgggggtctcttgtggaggagtatcaatcaagtgacgaaatcaaaccgggtgcaggtcatgtactattttgtccggagggcactacgtacctagacactgtggactggatttccattgtaaatgaagttgaaattgatggagatgacaatctttgtggttaccacgctttgaaaactagtgttccaacatgtagtttgagagatttgcgtgaaatgtctaacaaagagtgttggttcagctcttctgatttggaacggtatactaaatccatagatgtgaaccttattattttgaaagattctcaagtgactatctttaaccatgatagtttcaatactgaatatgcactattgatccatcacggtgacccgacggctggacactggaactctgcaagtttcatccaaaataagcctttgccgaagttgccagactgggttggatacactgacaatcaatacatggaaatgtggttgagagcgaggggattgccagaaaccacgctctttgacgacttgacgattgatgacagagtgagattcactcatagtcaggtcaatgaggaggagaagttgagtacgaaaacaatcaacgacagcctaattgctgaatgggacggcgtcacctacaagctgactagcaaatcgcaaagcggtaacaacattcgaaaaggcaatgttaacttgagtattcctgaggagttcaaggatagcttgatgctggtcaacatggaagtcaatcagatagagacaagttttgagttcaaccaaccacactcttactcgtctgacattccggatgatgccacccaacgtatcaagcaagaggtgagggaagtcttcaaaaccattgttcaattgggtgtgtgcggaacgaaacatctacctaggaaaccaattggttattatgacaacgtgatcaagtcgaatgtaaaatatttgaaggacaatgtatgcaggtgcagagtcagtaaggacaacattaaaactggtgacactatttgcatccaaaacaaagacaagtctttttcgattaagagaatcgtgcgtacagggaagtggatgctgtttaaccataagatccccagcaagaggtctcctgtgaaataccacgaaccacgcacttctttgaccagtcagttgctaaaattatccaacttagtaaggtgcaagactagcactgcagactttaaatccttgttgaagagtagcaaggccattttggccgtgcctggctgggggaaatctactcgcatagcaagtcaaatggatgatgacaccacagtcgtgtgcgtcaccagtgaggcagtcagaaatttgagagagatgggggtccccacaaaacaagtgacttctgtagagcgagcatgtgacgacttagtgagtacaaagaaattggtcattgatgaatgcacacaagttgattggttgagattgttcatgttgtgcgggccacaagttagtgagatccaaatgtacggagactccttacaaattggtgctgtagacttttccctgtcatcaggagagaggaccatttgttcatgtgagtcgtactgtggtaccgttgagcaacacaatgaaactcataggtttggcagccccttggtggatgagttgaagactctgaaccccaagctcaccagtgtagctgaacacagcaccacggtccgtgtggccaacctccctgacctggacattgaaagactgaccaacctggtgaaagaggaaaaaccgggagtggtactcaccttccaccagctaacaaagacaaatttacaaaaatcgctaggtaggtcttttaaagtggaattagtgcaggatgactttaagacggtacacagtttccaaggtcgtcaaaaagctcgagtgatggtcgtgcaacactttgtcactccgcaaggagttcacacagatagaagatacctcatgtccgcgaccacacgttgcaccaaccacctaacctgggtgacttgcggatctccgattacctcattgaagttagctgaccatttgaggaactctattttagtaggcggtggccatgtttcaattgctgatactgtaattcgcaggatcgaatccatatttgatgtggacaaattgttagttaacgtgagatcggccgtagattacatcattggaacttatgaagagaattctgacaaccagtttgaaattaagggtttgaacaactcaacagggaagtatgaagaagagagtcggtttaaattcactgtatggcctgatgacgacagactgaccaagtacaataagttgatcaaaattacagagtgtaaggaattaaccaatgaggtggagccgacggttgagatcttggatgaagaagatagatccaattattacgaacccctccctgagtgggaaggtggtttatgctacggagaaaagactattttatacgtgggccaaactttgcccaccgtcctgttgcctctcacattcaccacaaagttcggcattctgaagttatatcaggaagatggcgggatatttgcagaccttgtgacgttagggaagacatggaaagcgcaatggctcccagaagtggaaggttttgatttatctggactcaatagaatggctatctggtccctgaaacagatcctgcgattaatttcagtaacacatactctacctggctctattaacttgcaagtcaaacaggtggatttggtaaaccttggagagatctttgatgttgatgaagtcagccgtgccgctaacatgatggatgacactgaacacgaggcaaaatggtcatacaagagaccaagaggactggcccgcatcaacactatcaaaaacggcgaagtggaaaatgatctggggttgtttgccataatggatgtgtcaggagtcagtgacgaagcagtttactctgttaagttgtcgatgactattacgaattacgcgagacttagcttcttggctgacatatcccatcgattctgcggaatggtgaccccggcttgcattgaaacaccttacgggtgggtcgacataataatccagaacggttgcaacccatgcgctggcttaatgatggtcagtgataaggcatggtgggtcatcgataacgactaccagcaccgcggggctcgcagagtccagttcaatgaactggctattaacaactatgcaatcatgtatatggttaaaacactgaagttggaacactgttttgcggatgctgttgaccaggacgttcaccaacaagcatattactctgtgtcagcttttggagatgaattctgggagagcgacacaccgttaattgactttacagaatttgtattggatagaattaaaaatctgaccgtttccactttgagcaatcgttcgtttaagtaccacaactacacagaagaaaacaataagtggttggagaacgaacgtgagtacctggctcaatttggcattgtcatgttctggtgcagttttgacgagttatcccctttgaatggatccattatggttggacagactctcgacggtgaacctgtgtttacgctccgagtagatgaatttttattcgtatgcgactgtgatggaactgctgacaaattggatgattttgttgagattctgaaggtaaatatgaacaccttgttgtttgagagtttcaaattgggtgcaaaactccgaaagaacacgatcacttcactgttgagatcagccaacaacgcaatcttcggtggtggagacttggaacaaggtctaattttagacctggaccaacataaattccataagactgccgtgtacagtcacctgagccagcgacttggagaggtgaagctgagacaaagtgcattggtgagaagacccttttaccatggaaggatagtaagtcaagagtgcaggtcgcaaatcatgaattgtctacgcgctggagtcgttgttgactgtccaaccgtcagagcaacctcaacgggctcagaattggttagcttaattatggctcaccaattgaatgtgccaatcacactagtgctaaagaatccactgttgttgataagcaacagtttgtggcattgccaggctctatccttgctggaggtgatgctgaattgcacagtggcttcggatagacatgagtttatggaagtgtgtggggcaaccagtaagaaattgatgcgatcactagatagttacatggcctcaaacaaaattaaggaggctactcaactgagagctgtcttggctaaattgcaggtaacgcaaagatttggagctacgggtggtaacagtctgttaaaagacattaactcccaatcaaaaatcatgtgcgtctcacacatactactatcagaacccaagagtcttgaggcaacctggaaatgtgacaccaacaagattattgtcatagtacccggtgttcatacaggcggctcgaactggtacagagtgtccgatgcggaaggcgagagtatgatcgtcaccgaagaaggagatgaaaggggcataacggtgtcgcgttcacacatggtcaaccttatgaaccaggacaccataaacttgtacgggcaccctaggtcaataaaggtgattggaagtttgttagactacctaatttatgaatgcatcccaattgaatcatctcgcggtatattacgtaaatactggattagacaccccttgtgtgagatggtgagaatcccccttcttaccacaaacttaaccggagccttacaggacaagcgactaattaaatgggtcaatttaagatgtgaccctagcattatcaggcgactagagattagatgtaacaggccaaacacaacatttaaagacctatgtgaatatggaagaacgcttttacactcgagagactactctaggctcggtagttgggatgccgttaaaatcgatggctacagcatgttacagcattgtcaatatgcttactacacttctaagaacggagacaagtcaattcgcgggatcctgcgtatccttgacgtcgccatgggcggcgagaaagatatgccccttatcaactggctgcggcaactcggattgacgaaggtgttagaccaatcgctatctctatacaacagaattatgcaagaaactggtttaaacattagcttgtcacagaccggggctgaattgtgtggtatcgtagaagcgctgagtcagcgtagtgattgtgaaaccgccatagaagaggtcttaaccgagtacatgcccacgcaccataagagggaggtgacatttatggtgaagtataaggaggctacaaaaacaaagggagccataggtcgactgtgtggccgagtggcgagtgccctcattcaggaattctgggaagggggtgcagctcagcctaagtcacgcgagacgccagagcggtcccttgaatcccaagagaccgaaggaaaaaacaccccaagtgatccggagcccaaggacacaattatcgaacacagcagtcaacctgaaactgaccagcagagtacagatctctctgaaccgagtcagatgaataacctattaatggtaagccaggggacgaggggggacgtcgagcctctggagaatctcgtaaattacttccaaacgaaatttgacaagattttcgtactgattaaccgaggtaatgaagaggcggtaaagtttccggaggaggtacaaatcctgtactttaacatggatggatctgatttagctgcactgacttgtgacgacagtgctggtggtatcaaacagacgttgagtgcattggaaaaaatggtatcaagtattacaactgcttacgaccagggtgcatctttagaaggcatttctctaattgcagggaccagtcacactttcattggtcctttgttaagcaaacactatggggtaccgtttttggagatacaattattcccatggccatacaactctcagagaacgggagagatgttggctaacagaattgtttccagagttctggaagctgtacctgaaggcgtgagccatttatcatcaaggaaagccagaccgagaaacgtattgcttatgtatcctcctgccgcattgtctgagatagaccacaatattggcaacagcgtcagggtattgcgaaaagactacaccagagtatcgggatctcaccgtggaaagagatgcttgatcaccatggggtcgatcaccggtagtgaggcattagcgagatacgaaagcggtgtgttttgggctattgatgcagggttcaaagatattatgttggtagggcaacagttcagagaccttcgtgcccaaaaccagttgctaaaattctcatatctacaacgaactgccgaaagtagaggtgtaagtcacttcacgatgacaacttatgagaactataaggaggtcgtgggacctgaggttgtagtaattcaccacggaggtgctggtaccacaaactacatgtgcagattgaacgccaagcaaataataatgccaatttttaatgaccaatggtattgggcatccttactgtcaagtcacaagatggctgtgttttgcatcccagcttccttacctagtgtcaggatgtcaacggtcgatggtttgcgtccctgtgcgatttggtggcaaaatctgaaccacaaatacatgtcgcagacaagcattgctatgaatgaactgctttcatgggttagtaatcaaggaccgtccgcagatcacctcacattttacccatatttcaaggaagccgcattgtctatgctgtctcggggcagcacagctttgacagcaattggacctgtgaacttagcgtgccaagtaattaattatttatgcaaacatgtaagcatgcagttggataccgatgatgtccctccgcctttaattgaagatgatgtggaggaacaaactgactcagggaagagcggagacaatacctcaactgagcacaaagacctcacccctgtggctgacgcagtggacttgacagaaccggaggaaagtgggagtcggcacggtccgggaaagcctgaccctgagaaagttgaagaatccaaggagagtggagagactatagaggtggaacattttgacgagtcggagaaattagaaagtgttgaggaaacttttaagagtcatctgagctctaagcggtcgggagtggtcctcacttcactaagcaaaccccccctatatattggagaggtcctggattggaacacgttaattgagttacacgaacagaaccttccgaatagctatgacacccaacacttgaagacggtcgggccgtatactcacagcagattacttggaaagaagcttgagaatgtaaccacactatatgaccccaaaactagtgaggaaggtacttgtgtgtacgactgtttgaagtattatctgaggaacgataaaggtggggtgctgaaaacgtggtccgttttgatgcgctcccggacttgggccactttaccggatctgatcgccttctctctgctagctagggtaaagctcatcttggtcagggatgaagacactcttatagtgaacaacaagtgtgccatgtacatgtcaatgaggttgacgcaaattagcgggcttggacattgttcttgcgtttcaatcgattggtcagaggttgaggcacaatcctggattggccaggaaaagttcatcaatgctgcactagtgacgaaaatgcagagatgtcccaagaacaacatgattgttttgggtggccataactgctcaaaccacagccacatctcgaagaagacattgcaggtcttatccaacgccgtagatgtgcacacggaaaatgatcaagtcaatgattggattaaaacgtgcagtatggtctcgggtaagacggtcaaagacttaggtgcgcgtttgagtggtagcaattggagacacttaatttttagaaggaaagtacagatagcgacaaaatgggaccacaattacacgaatgccatttcttgggaccccaataactgtggatttagacctggagatctcctatgtgcggctagtgggaatggctgttcggttggagtcctgttaaataggtcgcacgattacttgttgccagtaagtgatacggttggcccagttgagtttgtgttatccctgagcatggacctgaacagtgtcaagaatgtggttagcaaagtgacaaagactgttggagttgacaaagccgtataccttaatcacgcctctatgaaatattgtcagtccattggtctctttcatggagacggactagtggtgagcagtgacgcgacttttgataaattagtcattagttcctttgacaatagaccgcaccacttatccaacgaaagagaagtagtcaaaaattgtccggaggaaaagattgtggtcgttagtgaattctccagggctgtaaccattaactgggtgaagagtgcaacacatcttcgctgttcaatttggcatggtaacttattcatagaggttgaatccgaggacagtgtactactgagtttgctagattacatcagtcagagaatcgaggtgggtcacaactcatatagatggcccgtgacagggtctgaagaattggttttgagaattgtggacactgtaagattgattgatacagaacttgttgttggagaaaataaccttgtatctttgaagagactgcaatttaggaaaggtgctaaccctgttaaagagttgaaaaagtacttgattgggcagaatttgtccgcggagggggaaattgacattcaagaactagacaccttcctttgcaccccgcccgaccaattgaccacaagtaactcaacccaggacctcgcagaatggctgaatagtgatcgacgtctgacaaaatttcgtttcgattctttgtcaattgttaagaacacagaaatcatgtatatggtggggcctttacttatcaagcgaaagaaattaattgaaaaattggagttggtaggtggacacttgaagaaaaccgtaccgtctctgaattggcgaaaaatgcaggaccacgtcaatgctatgaatatggcagccggagtgaagcatggatttaagatttcccaaatccagccggatgttacagaaagtaggatggtcactttggagaagatgggaatcactgatacacttaacaacctgtctcacatgatccgggcacctgacatggacaacgttgagagtcatatgttagtggacaactggctggacaatgtgtgtgcagaattcaacgacctgatcgtccctgagcaacttgtttcttcataccttgatagagaaccaagtcgtggagcgattcaagaaatacccattcacgtcagagatatgtgggatgatacttccatgttggactggaacactagctatgcaccaagtaatgatttacgtctcaaagcaagcatgcccactggaaagcgcagaaccgagaggaaagctatcatgacaaaataccccattgagtcgagggtcgtgctcactaaagccgctaaccaggaattcaacgcattgacaggccgtgtgggtaacgctcaggtgattagaaaatacaacttaaacgtggagtacgaggtgaagtcaatctgtcagacttactttaaaccagggtggatggtgaaagcgagggagtacagaggcaacccagctagccctgaaccacaagccatcttgtcgtggttggctgagaagccagactgtatcaaaatcggtgaagagttgaagatgtacatggaagacgggtttttgactcaccccatctctgatatcaacgttcacatcaaactcgagagtttattgaaagacgacccagtgactgtcaatgaagccttaaaagcgcgagtaatcctatggcaagccaagggaatctgcgcaatgttcagtagcaccttcctggagatcaaaaagaggctcaagtcactcttgcgagacgaagtggtgtatacagatggaatgcagccctctgagattagtgcatgcctggcaagcgttgacacattcacgagtctggttgaagacgacctgactagacaggacagtcagactgacaagcaaacaattgacgttgaatttggtatttatgacgtgtgcggattggatcgcaatataagtgcggtgtggaggagagtgcacaaaatgtggagattcaaaggtaaggacacccgtggagtatggaaagaaatgagactgaccggtcaagccacgaccgccctgggcaatgcagtggtcaacttggccgtgcactggagactagtcgccagattgggttcttctttgaagaaatttctgcttctgggagatgacagcctcttcattaacaccacaaatattgacgccacttctttacgaagaaacatagctgactattacaacatgaaatctaaggctatggaattcaagaatcacggcactttctgtagtatggtggcttacaagaccgagagtgggtctgtcgggatgggtccggatttcgtacgactaaaacggcgtttcgaggtaccaaatggagtcagtcacgccagtcctgaaaacatattagccagaaaactgagctactgtatgatgctcggggctatctccccggttgtaaaattggtgaaggagatggagtggccaataacaccgacaatttggtacgactacggactgttggtgaattccctagtggaaaaatatgatatctccagtacagaagttgagtcatacttgagtagcctagtagattacctacgtagtgacacatactatgaggtggattttgaagtgattagccaaaggtaaatagttatagtaccgatggaaacaagcaacccccccc

SEQ ID NO: 902 - DNA, 18636 bp, Rhizoctonia solani endornavirus
  source 1..18636: mol_type = other DNA
gactaaaaatgactatttagtcgcaaacactcaccacatccctaacccctctcaacacaatatgcaacttcaagacacatatggacgggaaatactccgtcctttaacgcaatcagactcataccctgctgaatctgatggcgtatatcataaacgaaagcagggtaatcatgaatcaagtgaaattgagatacatgatgaaaaacaaaactacaaaacaacgctacatacaagcgaaaaccataacagaacagggaaatacataacacgtgttacaacaaaattctcaaaaatgaaaaacacagagaggaaaatcatacttgccacaatacatgacgaactcaccaatactaacaaagtaagaggacaattcaaactacagccaacaattaaactcgagcctgcaaatgagaaagaaaacacacaagaagattctaccacagaaatagcggagccagaaccacttaggtcaggcattttactagggggcagcaatgattgctggcttaagctaggcaccttcataccacacaagacgcttttctctatcttagatttggatgattcagacagtgaggatgacagtagagagcaataccccagcaaaaacaatggtgagattgaagctagagatttcaaacaaactataatagacgtgtacaatgaagggaaaatttacgtcccaaagaagaaaaaatatttaccactgaaaacttacgcacctgtgttcaacttggagatcacattcgtaggtcatgagaacttacatctagaaagctgtggaatgggaaccaaagaatatgaagtaacagagaacacgtacaacttacaagaactatacgatgtgttgacaaagtctgaagctgattacgatgaaatggatagaagattcttgtccagttccattgagagaacagcaccaattgcagacttagagaggcagatctacctaaggcactttaaccatcgcaagatgggcacaaaagccatcagagcgtttttggatgatcaaggcatgacaggtaaatccagcctgagagtggggacagccgagtgggaagaggccatgttacacgacatgcaattagtcagaagttcactcagcagattaagaacagaaatacatagaggggatgcaggattgacagatgatgaaatcagactactagaaagagacaccctcaatttaacaattgtgccgaagaaaactttgcccaacactcacgctttagcagccactagcagaaaaatcacagccatgatgatgagaaaactggtggtgagaagcaaattggtggacgtaggaggtgacccaactcaatacagattttacaatgaaccacatcacgtcatgcgtcccgtactaaaccatgcagacgtacaaagagcactaaccaaaccaatgaggtttaacgaacatggtagtgggtgcacacacaccctagccacttgcgactgcgttgcaggagaacaattcccgatattcgtggactcaatttacgacatagacatggaccaggttacgaattacatggcgaccaacaaaattgacaccttcatctacagccacagcttcaggggagtagacttgagcaagagacatggacaactgtatgataacaagagtgtgtacaaagtgttcaacaacggtgatttagtcacatcactcagtggagaaaccgtgagttacgtgaacaactacgagagcacagaaatgtgggtgtcagctaacgtgctagtttcaaacgggatatggagaatatacgatgtggctgctgttggcacacacgtgattaggatggcggttaggatggagaatgccgtgcagttctattccaacatggaattagccaccaaagatcaaccaataacaattaaaataccactatttgatatacatgcagcaacgcttttaaaatgggtggaccacacttttgaagaagcgagatttttgaattctttattagaccgaggtatgagcggggacataagcttagacaccatgttagaatttgcccacgcaattgctttaactaaaatttcgtcgcatgacaggacgttctctttgatgagattgacagccaaagattgtcggtatggtgcttgggtggcattcttgtacagcaggcgcagaacacatgatataaacgatctggtaatgaatttaacagataggttgtccacgaagtatttgacaaggaccatgctggacatagggctgcccctgatgcaagagctgggtagcaagtggttggctgacaagctaccatcattgttcaaaaacactgtcaaaaacataacaaataaatcacaattgatggcaggtggcaaagagtttgagcagttgtgggataatctagacacagtaacacaaaccaagcacagcacaaaaatggatatcaggtacaaaccaggggaatttttatcattctgccagcattcccacgaaagttgccaacatgacgggcccatgacatgctcgtgttgcaagaagccagcaagcaaagacttgtgtgattgttgtgacaatgcatgcaagcataaatgccaccacgagcaccaatacgggcacggaactagcaccgttgaatgcgaatgttgtggagtgttgagttctgaattggtttgtgcaaattgcgactcaacagagctagacatggtagaaatggtagaagcagttaaatttgcttatcaacaatacatatccgtagaagatctcattgtccacgtgagggaagatgcacattacggaccaagaagtaacaagtattacgacaatgagcacactgaattgagaccccccagggaccaaaccaggaaaagtaagactctgcatgcaatcgagcctgctttaaaccctaaggaaataagagaagagctagagaggttgacacacggcaccaccgccgcacaaacagtggccagggtcaaaccgcaaaagaaagaacacatggtcacgatgatggctgacggtactcatatacataaatgttccgaatgtggcacccattatattgaaaaaccagccacgtgtgatgtaaattacaagccgttagccacgtcatgcccgaggtgtaacccaatgagtcgttatgagatgacagaccaagacacttatgacaacccaccaattagcaaaaaagagtcagtaatcataccggccccatcatccatgtctgatgaagagagtgtaatatactctacagtgacaggcgtagagtacttcagttacgtcacaaaaggccatttggactatctggccagtttagatgacattaacatcggcttaacaccgaacactaccagagtgttcttccccccagcaggttttacgagaacggatgtcaaaaactttagggtgaagactgtggaaaaaatcaccaacgaggacgcaagatgtggatattacgcattgaacaagctgttcccaactaacttaagcacactgtgcatgattacgaagaaagatgagtggtggacagcaattgatttgtgtctgtacgccagcagggaggacaaaaacctgttagtaattacagacaacgaagtgtacatacaaactgccaatgacacactcttccactacaccgtcatatgggaaaacacagaagagggtggtcactggaacgtgggtgaagcactgcaagtcaactcacttgacacactacccgtcttcaaatccgtagccaccatggaggagttgttaccatattcacagaactggagctgggagttgcctacagataagaggctggagatcgccacaaaattcgcagctatttacgcgcaagatgctgttaaagttggtatcataaataatcgcttacgtaccgttctaaacaaaggaaaaatgtacatgacaaacaacactagggagaaacatgatgtttcacaaggatttgtgcactttgaggtgccgaagaatctggaattgtacgcagacaaagtgaatgagctgagccaagccttgttgcattcggaattgttccgagtgatagatttcacgaaccaagacccgttttccgtggacgaagccagagacgcgaaatttaaattagagttaagggactacatacatgccatggtggacgtgaagaaaggctgggtggatggcaaaaccacacagtcaataaacatgaccagagtgttcttgccaacgcataaattaaaaacctgtgacataataatgattaagacgccgcaaggcacatttgaacgcagtgtgtacagagccacaggccagtacgtagtggtggccaacctatcacacgtgggtagagtcaaagtgatgatacctgatgcaagcatcggatcattaattagaaatctgtacagtctcgctaccctgagagtgatggatcttagaccattgatgagcgcgagcatcgctaattacggcgtgcacggcagtggaaaatccacggaaatggcacagttctctcagacgaacaaagtcgatacagcagcttacaccacaggagcactattatctctcaaagaaaaacacatagttggtaggtgtgaatctatagaaaggtacaaacagcaaccatcaacagcagccatactccaaatagacgaagcaactggcttaacgatgttggatatagctcaaatggtcacggccagtgttaagcaacttatattgtacggagatcacaggcagattggtttagtggacatgcactacgggggtggcgtgaataccatgatagaagccatgtcagtttgcggaaccataaataaaaattacaaaacttacagaaccggcggagaattaggtgaaatactcaaaattatagagccaaagttagagttacccgagcacaacacgaaagtgaccgtcaagtatgccacagacttagacgttaacatgatagacgacatggttgaagaatttaaggtcacaaaagttttcttcttttactcgaaagacgtctccatgtacaacaagtattccagattagattcaaaaactagaatgttatgcaaagtgcatgcaaatcaaggtttggacgcaccgaacgttctagtggttcacacagcttctaacggtatcaaaccaattcatttagataggagatacttgtacagtgcagccaccagagctagtgaacatttgatatggttggcagtcaacacttgtgtggacaagaccccattgataagaatactgcaatcggatccaagacatgaaattagagaaggagggtttttgccagagccgaccgacgacgatgaaatgaacgaggcattgaaattcgcagggatggaagtgtacgaagaaaaatttaacacactgatagaaaaattctgcttgaaactagcatcaggactgtaccaagatctgtcaaacagtctgagattaattgacactagcgcgtggatagatgatgacatgctaggcatccagttggaaactaaaacggcccattatctcatcttggccaccattgaagaagtaatgaaagatcaacccactatcaagtacctggagaagaatggtagtttaccagtcaacccaatagacgaggaaattgtacttattcgacagagcatcaaacataacttgaaagacttcggagatgcttggttaacattaggagaggtctcacaaatgagcggaaacttttcagagaaaatgttgcgctatctaggttacgttgagcaagaagagttagtgaacacaccgaaaggcatgtgcgctacttataagttaataggttctgacgtgcgactgatcataagtgtagaagatatctactcactcgacgacgtgatagaaatcaaagggtttggggatcagtctctgctgtcaagcactgaggttgataagttgaccatatctaaacctgaaaagctgctagcgacacaagacattcacaggacttgggtaaaaatattgagtaccgtgtcaagcatggacgcaaatttggtgcacgagaaagacgtagatttctctaagcccataagtttacgacaatgctatgtgactaacaggacaccaggcgtgagaatgagtagagtattagccacgagaatacacttcaattgcacgatcacattaaccaaaatgactgagaggattagccagctcgccgtgcgaaaatataggaaacagatggaagaattgatttcagtgttgcttaatgacacagaaaagttccaaaccgaatccactccaacgtcaaacatagaagaacaattcaacgtggaacgctacttgagtggtttgtgtaaaaagtactcactaaggctgattagaacagtgagcgacaatcaagagacctggacagtcaacaccatcggcggatggtttggactacacgtgatcactttaaccacatcattgttgagtgagccagacttcaaggtaattagctacgagctaggtcgctattacccaatattgggtcgcatcattcacgtgccagtggagatggtagaacaaagtatcaatgatttgaacgggtttttgaacaggttcaaatttagccacacaaatatgatggttaaaaatcaaaaacctgtgaccacaatggtgcaagcagaggaaggagagacgtactcgcaagcctatatactattgcaaggcagtgtacgagaactggagaggaagttagatgtgagaaaagacgtagctttatttgacaaagtggaaggtgacacaatagtgatgaaaatggccatgcccatggccacaccagaggaaactctcgtaggtctgtcagacttcaggaggcctacatcatattggaacgacgaggctagaaaacttctagatgatctacctcagcagcaagccaagttaagaaaaactgagctgcctaaacaaaccatccagcgaggagacatcacgactcaaactgagagtgtttaccactcaatggtggagatgaacccgggggaaacatatgacacagtggcatataccttgccaaaattcaacgctcaacaacaagagaatgatagcaccccagaaaaaactcaaaccccagaaacatttacttacacacaacctacaatacagccgctaccacacataccattgtctgatttacatgcgataaccccacccgagccagtggatcaaactgagcatgagatactgagggagatctacggatcccgagtcatagagtcaatagaaaacaccgtcgtatttgaaatgtcattcccaaccaccaaccaagagctactagcagagcgaacagcacaaccaagtgcagaggagcaacgcacggagggaccacatggtttccagttaccaacctatgtggaagaagaacgcaccagtgaaaccccgcaaaaagaatttgaacctgcaccaactgagggtaaaactactaaagatttgtggactgaagtagaactcaaatttaagagcgtgctaaacaaattgttgtgcctagaaagatgcaagcggaaaaacgagtttgctgaatcctttgacgaggtaacgcagagcatagccgactataaaaaccattgttgttgttatgcccacaccaaatctatgatgcagaagtatgtctcagcagcaaagagcagagacatagaagacaattatgtcattgtggacggcacagtcgaattcctattacaagtggaaagagttttgtttgaacctaaacaatacaaagcaaccctgcgagaggactacagccagcactcatacatattaaacttgcttaacgacgatgaaatcttgtttaataattggggaagagagatgttccatactatagatgaaagcttcgccccggatgatcacagtggattcacacaaaatcaagaggcaagtgagaacgcacaggacttaactgaaaaggacgcatcgaggaaagtaccttacactttaatatcgttcgaacatgtcgctgaaggcataattcaggagacatactacacaaaaccagagttgaatccagtcgtaagtttagagaatatgaacttaccaaaaatcgaagacgcattcgaggaactggtagatgcctttatcgccatagatgcagccacaaataggaaaaatttgctagaaacacagatgaaggctaggagagcttatgacatgttatcacaacacaccgactatgagacctacagcgagcgtttgagcagagaatattatgaaaaagaaccaactcaggcgaaagaaacattacaacccaaagaaggaggggaagaagatcagcaactacaagaggcacacgaacagcacattgcaaatcgtggagctggcaacaaagagaaattgatcagcgtacaagcactgatagctaaacacgatgccacgctgttgaacgtcagaagctcaagtgtgcgagagctaggtgaagcacaaacagcaggaggcagaaaaagcttcttgaccgagtgggcgaacaacctgttccaaagccttgatgggaatttgcaaaaagaggaaccagaatcaaacgtgcgcgatggcttgagtcagactatggggaagttcgagttaatgccattcatagttaacccaaaatctgcgcaacaaccaacgaattatgaagaattaaacaacgactttgaacaaaccattaagaaaatggcaatgatactaccagagttagacaaaaaattcgaacgatttgtcggacttcgcagtttagaagaaagccaaatctctgtaagtgaacttgaacgttgggaaatagatgccgctgaaatgctagatgaatatatggcgccaagccaacagaatggtttcaacgaacgacttgacttggaatttgaagcaagagcaaatagaccacgaatcatggagtggatgcttgaggtgatcgacgctagcacagagacaagcagaatgagagagcaagaagctaccaaccaagaggaaattaggcaaatagtgactacgtggttggaaagaacttcgcttaatcagagctacttggctttgaacagggcagctttcgatgcaccagtcgcgccatctaactacctaagcgacacacaagaccaggccccagggcccatcgtcaaataccagtgggaaaaacatccctggcttttagcttatgcgagttggttgtcaaaccaaatttttgagtctattagtccaaccaaggcggagctaaaaagactttgggaggacaagcaagcaaggttgagaagacacagagagaatcaaatggagctgctattcaacacaccactaatgtggtggatgattaaagaacaagacagactgcgagacagggatccgacgaaaaccaatccgacagcaaccatgccacaaccagacaatgattgggccaaatatagctgggttttcttcgcaacagtcaaattcgttgcagaacatgtgatcaactacgtggaagatggacgcagactcgaatacgaaaaatacgggtacgattataagaaagataaatacagactaatcagcggtctgaccactgggactgaaaacgagcgaaagtacagaaagttaaaggaaacttacactatgcgcaaattaacttacaacatgacagagaacaatttgctagaccacataattaagaattccggaaaagaacacgtgactgaatactgtaattaccccatgtttgggacgtgggcagggcatggaattaaacagctcagaatcgaagacgggatgttacactgcttgtacgaagtggatcggaagacggtgagaatgatgcgcaacgtggcactcatgactatgccgtttgtgcaaggtgagttgcacttgataccttccgtcacattcgaggggaggaagttatacatgtccagatcaactggttgtaacttgtgtacagatttagtggtgattaacgatgatggagaatttgttttgagagtgggtacccagtaccacatgttcgcttatagaacattgcgcattaacttagaagcagaaggggtgtatgaagctctggcactgcttaacatcaaattgagtttaccacacatattgaacactaacccactagcagatgtcgatagacgaccaaacttactgtacaacagcgcaggttacgacatcttcagcgtgtcaggagaagtgatagtttggttggataggctaaacacagtcaaagacacaaaaggagctctgttattaaaaatgttcgggttcaagcaaactacaggagcgacattcgatttttccactagaaagttccaaaacgacaacgaactaacaaagaagaagatacttacgaaattgaaccaaactaaccacacagtgtcagctaaagacctgatgagtctaaacttccaaaacctgacacattacgtgtttacattcaccagcaacagaacagggaaaacttacttcgcatacttcgatgcagatgacgttttcaacatgacacctgccagagaggatggcattatcatgacacatgatgagatgtatttagatgtacaaggaataagctcagatgcgcagagatttatgggtgcctcagagtggactagaaatctagtgcatacgaacatagtcgctctacgagacgtcaactggtgggtagtgaaaaaattgattagcgttattagcacaggttacggcccattcgacaatttaagtataccctttgaacaacatagacaattgggtacatcggtattcaaactaattgacgcttacgcatcaaaattaaacgtgacagcagaacgaggcagagcccggagactttacgtgggtgacggccaattagcattgatcaaagaagtctcaccagacatcctgaagaacatggaaatagaagaacacgccgaaccagcgttcacatcagacaacctagaaaccttggacactttaggcctagagatggttaaaagaatagcaggcgaagagaacttctcgtacgtcggatcctctctggtgtcacaaacattgaacaaccacttaaaatgtagcaaacacgtattaactggaccctataacatagacacacacgcacaccaactgagacttgtcagaccgtacttaaatggcttaagcagcatgtttttaaatcacgaggacgagaaagtgaagactatgggcgagtgggtgtcagcagagctcgacagtaaacatccatactggtccgtaaatcacactaacctcaggcccatctcttttgtgtctagctcatcattggaaaaagatttgtcagacatcatagagatggccccaccaaatgccgtgttgtacgtgatgatgccacaagaaggcaagtttaaaacgcactcaatgatccaacagaaaaacacgttcaagctaaactacagcaacaacaaaccagtaatcacaatcaatgaagcaaacaaatcaaaattagagcaaaatctaataccgcactgccaatccagaatagtgtatggagccatgaatcatgtagtgtttgaagtggtgaaaacggatttgaaaatagaaaaaatcttttacaatgcaaacgttcaacacacagctagtaaaaccgtcacatactcacttccaattattgacgtgtcaatgagaaatgtgcacgaactgaaaatcatcaagtacgtcgaaatttcagtgccagaaaatgtggacagattactgtgcattagggcccaacgcccaggcacagaatggaacgaccaaaaacaatatgctagaacactaaggcagacaaccacttataacactaagtctacgcgcgatttgtacaagagcacctctgatgaaatgctactgtgggcggcagccacatacgtgtacacattgggagaaatggatcaagtcaagagggctaaagatttttggacgttgcgagatgaccattctccgggtttagcaactggtttgttgtctaaactcaaagatatgctagggggaatagcttacgaactgagcgagagactaactggaggtaaatcactgctgaaattatgcacagagatgatagagaagttggagggaggcgatgagagtgtgattggtaacgtgttgagaatcattgacgcttaccaagtgaagaggatcaccaaattgcgagacatttatgagaactatgcaagcagggaagaagacaaaccgtactcgaaaccacacgcttcagaacctaagccaaaaccagtcagcaaacctttagggcctgaaatttcgatagacgttaaacacctcacagttttgtctggaaccgacggagatcatgatgggctgaagcagagtgtggcgcatctcaaaccattgacaatataccacgacaaaaccgaaagcgccatctgggtgcaaatgatgaataacttgcacaacaacgacatactgtcaaacgtaccattactgtcgcgtcaatgcgcaaaagtagatttggacaaaaagaaagcaatagccaacgccacggtcatacactgcacaatatttgacttgaacacagcttggatggcctacaacatgggcaaagatgtcaaattgtataatgggttccccactagtgtagtgagcctagaaaatctgttcaaaactctaaacaacgaatggatagacagcattgcagggttcgtagaccgacaagcaaacttaggggcagagtacataagcctagcgtccatcagcgtacacaaatcggtgaacttcctgatgtggcacagagctgcggtgttggatgcgcaaatatgggtacaagaaccactaaggagcctatacatcatgcaaaacaagatgaaagcccacaaatacacagatttttacaataagcggctaccaggaccgacaattaaaacagttggagtatttgttagggtagggccaggccactgggccctgtctatcgaacaagagctgtatctcaagactcttagcgggtcagtagtcatgtccacgaaaaataacgacgtaaggatagatttggaaaacagccactatcagttgtgggtacatcatggggggcccatgagcataacagactgcttcatttacaagcaaccattcctttgcctgccacacgcagtagatcagctgactaacactaacttgttgccaaaaatttttgacttcagatggtgcatgctaaacaagaagagcctccgagaaataattgaggaacaaatggtggaaatcaataatttccacaaatatagaccagctccaaaggtaatttcagtgagtgaaaacgaccaagacaaactgcgtaggacagcaaacaagataatagctaacttgcctcacaatacaagtagtgtgggtttcctcaccacatatagctgttgtgaattggcaaaagataagaaagtggattgcttaataaccctcacagatgtcgattaccccggggccattaggctaccagaagaagacttcatccccctgttcctcgcattcctgttagagatgcaaaccaaacctagcgtgttagatcacatacacacaatttatttgggagtgggagccggagcgatggaaaaattgacgcaagtcaaaacacacgtggatgagttagcagccatttacttgttatcagatgagaaaacattcacaggcttagttatcaccacttggacaaagatgacttacgacgatgtgttcgatcagggagacccatttgattggctatcacggcaacatgtactaaaaatagagactgagggttcaattgagattgctgtacccactaagagcataaaaacgaaaaaatacactgaggttgtgaacaaagtgaagcagcttgcagaagtagagttctttaccaccttgacagacaaatggcgacctgttggttggaagaaaaactacaaatacgcattcagcacagagacaggttggcgcatagaaatgaaggaaaacgccatgactcgggaaggagagaacgtgaaatacacgtgcccagagtgtgagagtctcgtgactctgcacaacagccaagtacaaaataacactgtgcaagcagggcattgcaaaacgtgctacccaactggcttaacagaagagcaattgaaagataaaaagaaccagcccaagagttcaaaccaaaccactgggaaaaccaaagaaaacaaaaaattggagaatgaaaaagaaactgaaattcaagacgagggcaaaccaagtggtgaaaaacacacaagaccgcgcgcaaccaagacgaccaaaaataaggaagacaccgaaatttcaacgaaacagagcaacgacaagattccatcaactgctgacataccaggagcttggcccagagaggaacctgacctaaccacaaccccacgagagaaagtagacatggaagatagcgactcaagtcaaacagatagtcaagccacaatcaagttcgctgggcacgagaattcctcaaagagtgaagagtcccaaaccgacccacgagagtacgagttgggacacgttcgtcaccaagaacggcagggagcatctagtcaaaaactctctccacaggacatcgagggttgcgtgaatcccttcaaagagttgaggtttgagaggttagaagagtggacagtgcggcagtacaggtacaaattagtgagggaagtctacagcccacagtccgtggtaggctgcggctctgactgtcttttacaattaggaataactaccgaaaccacaataggcaccacgttagaacaagttgtagggatttgccttgacgatcgacgaggatatgcagtgctagatgagaacctggaggtatttgctgactgcgatctgaatgaaggagatatgctagtcgtgatgcaactcaaaactacatcctggcaagctcactgggtgattagcatcgtttcagttggggtggaagaaaaaccagaactcagcatgcaggcacgcagccaagcaatcataccagctcacatggtatgtgcggaaaagaaaacaatatgttatgaagtgaagggttacactaaaaacggctgcgtcgaccacacgcatgatgatctcacgaaagagtacaattactacttagacttaagcgaacatcaaccaagaacacttaagaggtcgaaaggagaagctcaaagtctagtaaggaaaaaagaaactttgaaacataggtttgaaaccatgttctcaccagtgagaagggtgatagcactgaaagtcaattcaggattcgtggttagaggatcttttggatcacacaggttggtgatctggcactgtcaaggagaaaaaggtctagccgtgacttgtgcaagcgcgggtcaagaaagtggtttgtatagcccactcgctcctgtagtgagcggcccaatggtagtcgtagacgtgagatgtgatttgctgatgttgaaagttggtagaccgaagagggaagtaataaccctagattttacaagcaaaaacatggtcacggctctaaacaaacaaacgatcaaagccgccaaactgcccacggacacaaaaatttacaacggtgttggaaaacaactgtacgtttaccactacgacaattacaaacatcatgaaaaagaaggacgacgtgatgaaactaacgttttaactcaagcattagatcttgacctggaaatcatcatgcccaacagcttcgacatgttgactttagagttaataatgttctcagcagagaaggatttttatgtcaaattagagcacgggagatacatgctagtgcatgacgtgccaaaaatgttgaaacactacctccccttaactaacacaaactcaccgatggaaataaacacaaaagaagaattccagttagtaagagatctattgctccacatttcagatttcagcggtgtttataaagacttcacaattaaatctggctctacactgtcaccgagtgaagtacatgaacactttgatgtggacgaagatttcagtagggacgtagtgtgccagtatgaagacatagaattgattcattacgggatggacacaccaaccggtgccagacacgagttgaacccttattgtgtaaaattcgaacctgtgccgcacaaaatacatgacaattacatacatctcagtcaatctaacgctctagaaatcacgaacgatgccataatagcgagtgccataacggctccgatagtcaatttggttaaccaaattgaaaacatcactggcgccgacaccgatgaagccgagtcattcatcaggtggaagttcgggccactagcaagcacgcttttagaggatctgaatgagtatttcaaagaatacgagatcaacatcgccagcagctttgattatgcctcgacgataggcaacatgaaaacgactttagattgggaagttttctttgaagagcaagggctagcattcaaaaacaatgcatatgggacagtcagtgatgaactaacgtacgtgggaagctacgccacaccagagaatttttcagactaccaagaggtagggaacctttggataccgagactgttgataatgttaaagcctcttaaagttggtggttacaaaccagaagaagatcgcaacctctggttcgtggagaacgggcagaccgataattccatgcaaatgaggccctcaaaaaggcctaaacctttggctataggcatcatctcctctggaggtggcaagtcaacactcgcgagattggatactagaatagccgacggcgaccaacatgtattgttaccagctataccagaccctgctgcattgagtcaagaggattggtacttacgaaacgaagacataaaaaaacaattgtactctcaaggtacgaacttagaagggaaaatgttgctaatatggcaccctgacaacatccctgaactctggaggaaaactgttccgttatacatctacatcattgatgatatatcaggggaaagactcttcagtttgaataaccaagccatcaaagactgggtgtctaacaaccgtgactatacgcccaaaccaacgattaaaacggtgacgagaccacagctctaccctcacatactgaaggaagtattccgggctgaaaagtataacaaaaaagaaataatagccattgatgcgttgaacgcgctgcagctggtggacaatcccaccgtcaagctaacgttaacagaaagaccattagtgaaatggatgttaccgtacgtggctgcacaaggcactaacgcgaacatgttagacggtttcacgccgaccccagagaatgttaacattcagacaattgatttcttttcaacaaaagatcatagagactggatgcagatcaatttgccaaaaagtgaaatgttaattaaatcaaaagaagtatacggcgggttagacgtggaaaggaaaacaactctgaccaagtaccctgtagcttccagaccggtttttactaagacaatatttagcactttaaattccgtgacttctcgatatggacaagtgaccacgtataggaaacaggacctaaacatcagccacgaagtgaaccaaataatcaaagcgtacttcgtggagaacgcggaagagaccatcaactcttttaagtccagaccaatagggataaatcacaagaaaacattggaatggttggacgctcggccagatagaaacaaagtcgtggatgatttgagagaaatattacaacaaggagtggaagtaaacccagtgacagctatcaagatacatgcaaagatggagtctctattgaaggaggaagttatagatgctccagaagatcagaaagttcgactaatagcctggcagaggtacggtttagccgccatatacagccccgtcttcaaagaggctaagaacaggttgaaagccttgctacgaaaagacgtgatttacgcagatggttacacagctaatgaactgtcagccagggcaaggacggtagtcggcacaacgcgtttctttgaatctgacttagctaaacaagatagacaaacagaccaccaagacttgaacgtggaattcggagtgtatgaaattttgggagtgtccaaagatgttctctcatcatggagagctgtacataacaattggagatggaaatctaacctgcactctggatacggtgacgctatgcgcttaacaggtcaagccaccacagcgttaggaaatgtgatcgttaacatggcggtgcacagtgacttagtgctgaagaacagaaaagagatacagttggtgctcatgctaggtgatgacaacatgttcatgtgctccacatggttggacctggaagggttcaagagagacacggctgaaaaatggaatatggaagtcgtgccagcctcaaacgaaactcacgggacatttattcaattagtagcttacaaaacagctgaaggaactgtagagctcggacctgactggatcagactagctagaagatttgaggtgaccaacggtgtgtcagaagggagcgaggaaaatttactcgctagatcgatgagttatgccatgatgctgggagatttacctgaggtgcgaaaattgtgcacggaacagaactggcccattgaaccgttctcatggtatgatcccatgcggctgatgcatgcactgtgcgcaaaacattctatgaacgaagctgcagtgttatccaggttgagtcacttgatagacatgatgacgcgccgagaagccactacgcacgagtgggaagtcccagtggcaatcactggaagaaaacaaaagtttatgatataaaggacgagggagggttccccccccccccccggatcccgggaattcgg

SEQ ID NO: 903 - DNA, 14694 bp, Rhizoctonia solani endornavirus - RS002
  source 1..14694: mol_type = other DNA
caacccaaactctatgaatgacctgcacttagggggcaaaaataactgctggcaccaagcattttcagtcataccaatgtggaggatggtaatcaatgaactctggctcaaccaaccagcgcatatgggagacttattcgacatgatgcaaacactagggaaaatcactctcaatggaacaactttgcccctgtcaagagaagatgtgcgagaattcttgtggtttaagctgtcccattacaaagggaaagtcatgcatttagagcacatgatacctgcgattgaaagaccagacgaatcttacaagtcgatgcaagagttaatgaacgcagcctcctggtgcacacaaaaagctgcagaagatgatgaatttgaccccgagctggatgagcatgtcatggaattattccaggatgacgtgttgtacaacaccaggcctaatgtccggctcacgaaaaggattgttgaaagagaattcatcaccatggactacagcaccggacagtacggaaaatgcgtaaaggcgtgtgtcgacatgtacccggggtacgtaccaaaacctatacatagagccctcgattggatgaaaccagagtcaatctgctactgtccagtcggacacaagatgggaggtcagtgcttaggattgtgcaaatcagatgacaccaggatgggagcaaaagaaatcctagagtttgtcagacgagagggactgtcggggggcagtgggctgatggttggtagtgaacagtggaatgaactcgtggcacaagatttgaggaagatcaaaaccattctgggtagaactgactcgagaattatttcggcaaatgccggactgacggtgccgcaaaaactcgcaatcgaggaagggtttccggacgtgcatttagttgtcaggagacaattcccaaacccgcatgccttccttgccacatgtcgcaaagtggcaagggacttcatactgagactgcacaaaaatcggcctatggtggacattggcggctcacccgacaagtaccgaccacaggacttcaccgtcaggcctctcttggatgtgtctgacaaagtaagacaactggtcaagccaacaataaacggatgcgcacacagagtcggcggatgcacatgcatgtggccagaaaaccatggtacaatgttaatagattccatatatgacataacagcagacgaattgcttaacactttggccacacggaaggtggaaacgttttactacacgtccagtttatacggagtgaatttcgataaggcgaccattcaagagttagacctagaccagggttacgtgcaaatccttggggatataactaccacggtattaactggggaatcagtcagttacgagaatcacactccaactgccagaatgtggacagaggatgacatagtcagttcgagttcaggagtctcatacaggatacacacattaataactgttgggaacttttgtctacgtggagcacaaagattgaggaggagaactgacatatactcgcaattggtggttagttccccctcagtagagaagcagatcataagactgccaataataaagcaaaacatgatcgtgcccggaatcgaattgtactaccaattcgacgtggactcaaaccctgtgctgaattggtcattcatagagtttgggttggaccagaatttgttcaatcaaatgtgtgatcggaacttcctcggaaacacggggtttaatacactcgttgaatatggactagcgatcgcggcatcaaaatatcaaatgcatgaccgtacaattggaaatgagcacattacggcaaaatctatattgtgtcatgcagttctggcctcggcgttcatgagaaggaaaaatgcaagaacatctgaaatggcagaagggttggcgaataacggatctttccagcaggttgtaatgtcgatgctcatgtttgcgacgcatgcagcgcaagacatattcaccacactcatagaccaacattctattgccagagagtacctaaataaattggaccgactcatgagcaacactgcaatccagcagcaagtggacaacaagtggctaccagtatgggaccaactggagtctaaatttggaaccaaagtagttaacatcaaaatggcggggaccaacaaatcatttaaatcgtgccaacaccattatccaggatgcactcacattggtggagagacatgtgaacattgcggtgagccgtcagttggtaacctttgcacatgttgttcaattggagaacatattcacacgtgtcaccatccatgcacatttggacaccctgaggacggcaccgcgatctgcacatgctgttcattcttgatggatgagaagtgccataactgtcaacccacggacatatcatacactacatacaatgaagttatagaaatagtaactgaaaaagcccaactaaagaccaaaggccaagtgatcaaagaaggggaacacacacacacatgttggtgtggtaaaatcattcaacacgacaagcaatgtaacggaatggaacactacgaacataacgagcacaatgatgggcacatgttttccttgggaccacaagtgaaccgaaaacaccagcacgtatgcgcgcgagggcacatatacactcacgagcattataatgaccagcccgatcacgaccacattctcgaaaacgacccagattgtaagatatgcaatgccggaataaagcagaaagaaccaaaacaaagtaaggactcggtcggcaacgaggaaaagcccgggacaaaagagccagaaacccaaggatcaaaaagtgaaaacaagacgaacgatcaaacacctaatggacaaaacgacgaacctcaaagcagtgagactcaagagcaagagtcagacatgtcaattaaaatgaccgcggaactgctcgctggaacttctgtggaatacatggaattgatggaaaaaggatggtcttttttcaatttcaacacctctgaaccaaataacatgaaggggagagtggcttttatgccagccggagtccatgtgatggactcagacaatgtggccataagaagaagggtgcacatagaaaacgatgatttgcaatgctgcagactggcttttaacatggtaaccggactcaaaactacaccccaagattggaacagagtcacaaataaattggaattatggaatgccatagacataatagagatggcaaaactgcacgacatatccatgatggtggcagcgaaggacaacgtggtcatatacaaagtcaaacacgatgatggagaaccctgctccatactcataaccgaaaatgaggatggtatgttacacgcagaaccctgtagtttaatgcaattaggaccacatgatgcatggccatggatgaactccgagttcgatgaaaaggaaatgtcaaaaatatgcggtgtagaaaatatgcccctattttctgaaaccaacaccctcaagagaatagaattgtcttggaaattgttacaagaaagactcaaaatgcaaagcatggttcgggacatcaaagaagacctcgttatggtcaagggacaactcactaataaccaaggcgcagtacacaaaccagatgacggattgttcgcaaccaaactcaagtctgaagacgagtggatcataccgttcatgacgaaccccacccaaggagatttgtacaaagaagagattgcacgtgtggattcactggataccgacgcgcttgacgttccctcacaaagaaccgttaacattaagctgcttgtcagggattacgtgaacgaatcatccacgcccggacacgggaagtgggtaaacctcaagataatgatgaaagatggattctgcatattaccgaacatccaaaccaaggcgatcaagactggtgatagaatttatctaaaattcgggtcttactcagtgacaagattcgtgatcaaagtgacgcaaaaatctctatacttgagggggatacctacgagaaacaattccacagtcaaggtatactacccagacgtgagcgttggaagcctactcaggaaattgtttagaattttgcaacacagttacagttccatggctttacatgatttgttacaaaatagcgagacacacgacggagtagcagggtgcggaaaaagcaccaaaataaaacaaatgatcaaagaaggcgaaatagccactgcaatgaccagcggcgcgctggatagtttgtccatcaaattggggaagagcaaggtaataagcgtagagaaattactatcaattcaacacaactacgatgtgatatacattgatgaagcaacttccatgacgccattcgatgttaccctgattgctcagaaagcaaagaaaatacacatgtttggagacacggatcaaataggtctgtcagacatgcattcagcacctggagatcgatccaaagtcatggcgatggcatatgcaggtagaaaggacgtaaacccatattcactgagagtcgggaaccctctagccgcagaaattggaaaggtcattgagagattcaagaccaaagcagaccacgaaacaaatttcaacacactatgggaagagtcattcatagcaagcaaagttgttgatctagctaaagaaaattccatcgacgtgattttcgttttttacaaaaaacactacgaggacataaccaatcaacttaatttgagatcaagaactgagcgaactaagatcaaagtctacaaagtgcatgccaaccaaggaagagaaggagacaacgtgatggtggttcagggtggtgtcagtgacgatttcagaggaatacatctcgacaaacattacacctactcggcagccacgagagcgaaaaagaacttactgtggttatcaattggatgttatgaacaatccactccactcaacatcagaatatcaggcgtgaactcagcgctcaggggtgccggcggaggaggtgcatcctggttcaagttggtggaagataaaatggcccatgaattgaccgcggacatcgtctcagatgacgaggtacctttgattatactcaccaccatcaagatcctggtacaaaacttagaacattcgatcccgaggcatctaacctacaacctcagaactgtagacacaggccactggtcatgtaaaataacagacaacttgttagaggaaacagcgactttgacgttcaacccaacaggcatggtcaagtacgaaggagaacaatcaatcatagacgaagcaaaagaatgtcttacttttatggcagataacactggattcggtggtgcatgggtggaatactggtccaaatttggatgcgtttatgatgccggactactgaatcacaccatcatggccacggcggcctgggagagactacaagagctagacgtagaatgtaatgtcatcagtgatgaacacgagtcacgactgatcgtgatggcagacaaccctatcatggttaaatataatgatcggggaataaacagtattgttgctgaagacccagaactgccggcctacatgcacttgatcaaagatgcaacccaactggcagtagatttggctgcaaggcataaatcagagtgggtgagcagttacaaacgtgccattaaacaaaaagaaacagagacactgaaagtctacaaacatgaggtgacgcctaacaccgaaacagcgagtcagaacacaatagattatgataacctgacgaagaaggccatattcgaagtgtcagaaatcatgctgagcaacacacctgcaatgatgcgaggcaacatcaaaatagaagaacaaatcgaggaactcaaatcagatggtgcgacaaacccaccgcacatcgatggatacatggtcaaagtcaaggtgctcagcaacatgtttatgatgtcgggattactattctacgtggcggtaaaaatgatcaaagtggaaaggttcggactaccagcaatagacgtgaatgtagtgaaatactcaacaacaagcttagtggagaagttccttccaaaaggagccacacgagataattttaacgctaaagtacaaggaattgttgacaacttaatgaaggaggcaaacagacacacaaacccactcattgatgaaatgacagaacctggattgaacccagaagatcttgaacagcaagtagatgtgttatttgatgaccaaggagactatcacgtgccagggtcttggaaccaagacgatgttgtagagcccatatttgcaaccggatggaaaatgccaaccactgacgagccgaaagaaatggagtatgaacctgaaccgttggactatgagtctataaacaggaagattgcaaatggggaaaatatcatgacattgatatccaataccacgaaatcgatcgttgaaaacaccaagaaaattatagatatgccaaacgtcggaattagaaacaaagtgggagcgatattatccttgtctctaacagaaaacattctcacatccaccaaaaatgcggacgttaagtttaaatccccgttcttcaaaggtttgtggcaaattgcaaactgggtggaccccgaattaacagtagagagcatggaaaaagaagcgaagaagaacgaatatgtctggacaccggagttcagtgttgaagcactcgacagcctcaggaaatcggagctcttaaaggagcagatcaatgcgcaacccaagattagaggggacttagcagaatttgggtgttgtgatggctgcacgcacgaaattgacgaatggaacgcaaaatacggaattcatcctgtcaccgggaacgaaactctgattgttaaggacgtgtggatacccaggaaaaccgtgaccatcatgagatgcctcaatgtgctaaatcaagtgagattagacagctcagacatcattgtggatggagtagaattcacattgatgggtgaaaaaggttgctctgcgtgcggagggatggtggtgtattacaaaaaccaagtctttttgaacatacaaagacaatacactaacttagtacgcaggaagatatacttttcgccgaacgctatcaagcatcaacgcgaattgcaactgttactcatgtatttaggatttggagttagaaacaaacatatcactagtggcatcccaggatatctgccattggaattcaaaaatctagacatggaattcaactacgtgaaccagtatggagtcgatttgaacgacagggaactagaaactgtgctactgaccgagagagtaattgctttctttaagggatgcatgggcaagtaccaaacaggggagaaactaccgaatataatgcacacttggcgcgacaacaatgcagagagaatactcgatatcaatgaatcactacaactccacaatttagaaggtaacgtattatcaagcccgttcacatcacaggaattttacatacatcacatcgatggacactcatttgtaatactaaaaccgggagccaaagacgagtgttacatgttctcagagaggatacccgaatggattggaaacactgcacattttgtgctaccatatcattctttccaaagagtcatagctacttgcgaaatcgacagattaagagaaagcacaccaacaatggcaaagaaaatcgttagtctgtgggcaaagagacgtgggaaaacaattctcgataacctcgccatacctttccagcaacataaagaacacaacaccatcgtttatgcgcatttccgacgcaaagcagaaaaaatctcggtgatggaagcgaagggcaaggcgcaggagatgtttgtaccagtaggtggtgtgaagtttttagaaatggcagacccagggttagtggacgacatcgtggtgatcgaaggtggagccttagcaaccgatcgaggtggagacgttataataactagtttagggttgaaatggactgctcaaaattatggtaaatcagtacacatcgtcacagcccacccgaccattttgacgatgaatagcatgtggcaaagcgtaaccagcccaccatttgatattataaggaatgaccattatatgatgcaagtagaatttgcaaaggccatgcacatggagatagtcggtggaattcagaacgaaaccgaaaaatctcaacttgaaacactaatcaacaacgacggtatgtacctcaaaacaccaagtccaatcgttgacaaacccgttttgtacgtcggattggaactctgtgccatgtcattagacaaaatcatcagtttatcccacgctgggggaaaagtgatcgttggtttggtaccagacctggatataaacccagatgtagcaaagtggatcataaccgacaacatatggatggtgacgtacaggcactcaaatttgacatacactttaaatccacaatccgtacaccgtttcatcaacttaccatcatccagacatggggagtacaacttatattccaaaatcaaatacagtttgtgcggacactggattgtggagctgaccgtcagcaaagaccatatcccctttggggagcactacatggcagtgcactcgggaatgaattcgtcatacatcgagtatgaaatcccaaaaatcaacgcgtctttgttagacattgccaacgacaaacttttggacactgagaaggtgagaattcctacaaaaatagccaacaggttggcgagaagatgtctgagagaaggaacgacatatgaggacctcctgaactattgcaggacgattagacacaagatgatgtactcggcattcgggttttggagcaacaatcaacaaaccagcacacaagcaaacggttggtgtgcagccatatatatagaaacattaagtctcaaaaattcaatgtcgtcaaccagggacactttcttctcaaccggaacgggcgggaatagcattataaacaacatatcagacaggttaaatgatttcttgaaagggggactagccgtgatgttgcactctaccggcttggatcgaaacttcacggaattcatagaagaggccgcatctcatctcaaattattgtttaaagacgaaaacaagatcgaatggttaagaagaaccattgagaaaacgcattcacacaaactgcaatcacaacccagaatgctgccagtcaatgaccacaatttagcgacaattaaaatgaatttaacacttgccagaattgggaaagtcagcacttggggcaaactaatcaaatcagtagtgaaacacaaagacgaagttggtgctgaggatcgagccacatacttaaggaatctattcgtacataacctgcgatccgtcagacccattgaattcgctcagacacacgccaaaaccatccattacccaagcatgaacccaagaatattgatacttaaatcaggaacttacggagaccgaacattaatagacaaaatgacgaaaaaattgaggacaatgcccggcgtctcctacttgagcggttggaagtccgagcaagtagacttcggtgcattgggaaaacacatctactctggcaacttcaaaaacattattgaagaagtcaaagcatggcgggacaccccgacaggagagacggctaggcctaacctagtgatcagtgggatctgggacgtggcagcatttgaattcgctaaatatcattcagcaacgtggctgcctatatgtggattcccaatcgaatcacgccacttcccgatgttgggggtcaacgtgaacccaaaagccgcactaaccggattgtttgcattatactctggattagagataacctcaaaattgtccgtactccaagagttccaagcgtgcatagataatgcaattgtctgtgcaccgcaaaccctatacccccacgtgcccaagaagtggtggcacgaagattattccgctggggaagtaatcactgaagattgcattctgtgccatgtccctctaacggaccaagaaaaggaacgattacacgcatacaacctacccataataactaccaggccagtggatgtcaaagccagcaaacaacatatcaaaatatgggtgcttgctgcaggttacaacagcatggcgatggcaggaaaagaatccataacaatgctgttaaaaccattgtatgctgaccaattccatgtggcagaaatgtttaaggagatcaaactggatgagaacgagggcatagacattgaagaaatcaaacagaaaaaccgtgcattaaacgatcgctacaaactctgggaagaaagcgaggaaaccgatggcatcttcgatgaagttatcaagttagtggcatctgatggcatggtcaggttcgcagaccaattactaccgtgggaagaaacgcaaacaaatgacatcttcaataagttcagggtacagggtccaatagaaagtatttgtaggcgtttaaaacaatacttgatgaccagatcactgatcagcaagctacatctagggcccctaaaaactccaagacccgactgcctagaaatactattcaataatgaggtgggtgcaaacaggacgactgaacagttgaggatacaggacgtaccaaacaacaagttggcaatccttaaattagccatcgctttacaacccaccggactgacacattatttgggcagagacgtagacaatgtggcatcccaatcaacaaagatatggttgcagggagctagcatactcgaatcacaagtgcgatctaggcaaggtggactaacgacaacttatgtcgcaaaatctaaagcccactattctctgaccaaggaactagacaattatgacaagccggaatattccatttgcaagtacatcacaaacaagggacacaaatgcttcgaactagatcttttgaactggatgaacaaaaagcacccacacatgtcggtcaaaataccagtgtcagaacacataacagtcgccctgggtgaaatgcctaagtattgggatgaactaaacacacaaccgttcacaactggagcagatgcgccaaatgacgaagatgatggcggaccacaaggtcccgacgaaggttggggtggtgagaaacctaaatggggaggctacgaacccccaggcgacagtggtggaaagaacgatggaagcgaagaaagcgaatcacaccacgacgaagacgacgatgatgatgatggcggctggcacgtcgaaccagaggaccatggtgaaggtctaacaagaagacaagaattggactatcaagaacacctggcacagacggcaaatgagccagaacacgtggacgatccaaactcttctgatgaggatgagctagaaccacagcatatgctagacctgaccggagagggaccggggcacacgagaaccgtcacagaaatgaaccacaacacacgtaggtctgttttagcacttggaaatttacccatgttggctgggccgtttgaaggtcacaaaatagcaaatgacgtcgaaactgaagtggagtacgatccggagacagagacaggatgtgtccgacaatgcctagaaaaagggactggaaaaacactcactcagttaccaggcagcatggatgcggcccagatcatagaggcgtgttacgtgctcaagttgaacgtaaatttggtcaccaaaggaaaaggaatgttatacaagttttactctgaaccaagatgggtcaccctggacgtatcaacaaatcactgcaaacttctgaacgaaataaacataatcatgcgcaaacaaatcgtatactctgttagcaacatatcgccatatgaaaccgtgactatcaacaacaggaagacttacagatgggcaccatggcacttcgaagaggtcataggcacaccaggctggacggagcaacgaccggacatagaaatagaaagaatgattttgaacgtggatgacgatgtcgaggactgtccggaaagccaattattcaacaatggatattcagtcttcaagaacagctttcgtgtcagaaatttggacttgatccaaacacgcattaccaaaccagtgagaaagaccaccatcacagcaacggagtggggagcatggtcacctgacacgtgcaaatctgtgagattagtgggtctgctgtccacggatggagaatggaaactctgcgtcgaatacccatgtgggggaaccggctactattatggaaaaccagtcaactgtccgactggaatcataatggatttgggaaccaatttgcattcagatcctttgtctcgcaccaacatcagtttgggaccaaaatactacaacgctgaaaccaaaagagttatggccaatgtgataccaggcaacgctacagttggagtgagtacaaatgatgtgacatacattagcagcaattcatttagaaaacatcacaggtacgatcacactaagctgatcgaagcagactacaagagattgatatttaagggtgctaacatgacagaacgcgcatggaaatggatgatagaaccaaaattcggttggtcagagttcgatgaagctaggttcttctacaaaatcgaaatctcaaatagagacccgcaaaaaatcaaagaatacatggagcacatgggatgggtagagagcagaagaaatggagacaccagagtgcacacagtgtacatcaccgtatttaggagggaattgcacatttcatcagaatctcatgacgaagtggaagaactctcagattggatgcaagaacaaatctcacactgcgacgtagacgtgtcagaccatgtgaggatgccaaagagaaaagcaatcgcagacgaatctgaactgctggaatttgggtttcacagaccaaaagggatgtacttcatgagtgacatcaacggctacactgacaaaaatgcagaagttaaaggcctgctgacctgtgaagacagtatagacgtagagaaacctgcgggcagaggtaaaacaagcctgcaaacggaaaaactgattcaaccagatacgccgaccaaccacacgattaagccaagtgacaataaatccagcaacaacacagggaccgggacgatcaagggaaaggaaaacgcagccacgatcgagaaactcaactggttcaatgaacacgagctgggtgtgagagcagcgtactcgttgaacgtcaaatctagcccgatggggatagtttgcatcagttcgggaggcgggaaaacatggttgtacttcaactattcaaaattgatagccgatgctgataaatatgtccgactgccagtaataccagacgcaaacaatgtgccaatagggttctggacagagcgcaatcagttagttagagagcaaatatacagagcaggaactgaaatgaccaggaaaattttggtgatatggcacccagataatgttcccaggcaatgggccaacgtaccgctgctggtaataacatgtaccgacagcaaaggggaaaggttgtacgaaatgggacaagaatcattgagacaatacattaaatcacaccccaaggtggcccacaaacacataccgcgagaacaaaacattgttgccatcagagaacactttaagataccactgccagattggaggggagacataatgtcggaactccaattcaaggacatagatatccttgactatcagacatccaacattgggcccaccaacaaaacatacatgccgtaccttgaacctagcacatcaaaaagccacttggtagaagacatggttggtgaaccggaccagtatgatgtcaacacaataaacctattcgaactgtccgacaacactgactggatacagcgaattgcaccaacaagcagtatgataatcggtgacaaagctacattcacacacgtcaaggaatccgaaaaatctacactgacacaatatccagtatggagcagacctgtgctgacgaaaattgccaatgccgaattcaacgcagtcactagcaggttaggtgcggtggagataagaagaaaggaagggttggacgccaaaacggaggtgaagtctattgcatctgcttttttcaaacaagattgggtcgatcagtctgaaaaatacaaatcaaagctgataaacatagacatggaagccaccaacgaatggctcatgggtaggccgggtgaactgggagtaaggaacgacctaaatgacatgttcgaagaaggattccatgtacactctttaagaagtgttaatgtgcatgccaaattagagtcactgatgaaagaagacacaagaataaacctattagaagaacaaaaagccagaatcatagtctggcaagaaaaagcgatagcagcaatattttcaccagtgtttttggaggcaaaacgcagattgaaagagatattaaataacaaaacgatttacgctgacggtctgacaccgcatgaaataagtgctagaataagattagccaagggtgcaaacaggattttcgagtctgatctttcaaaacaagatcgccaaacagatgggcctatactcgatgtggaattcgcaatctatgagctgcttggcgtgcatcccgatgtactaaggacatggagaactgtacacgaccactggcgatttaaaggtcggaaattctcagggtttggacacgaaatgagactcacaggccaggcaactacggcacttggaaacgtaatcgtgaatttgatggtgcatgccaacattgttaacaaacagaaagagcacattaaattagttatggtgttggagga

SEQ ID NO: 904 - DNA, 19936 bp, Rhizoctonia solani endornavirus 1
  source 1..19936: mol_type = other DNA
cactgatcaatgaatcaggaaatatcaccaattcattcaacatctcatccgttgaatacacacacacacacacacaaaacaccctttacactagattacaaagaatctagtgtaaagggtgttaaaatggacatcgattacttaatcaaaaggcaagaatacttatggagtaagtataacgccaacgtaatattagataagatgtccaacttgaagctaaaacacaagtacaacaaaactaaggggttaccaaggtgtgtgtataaagctaacataaataagggcaggaggctgttgagaagcacgttgaagaagctgcctaaaaatcagagaaaacaacttaacaagcgcggacaaattaaacaaggttctgcgacccccgcacaggtaacattgccgagatctcgaaagaatgctttctgccttaataaactaactggtgttagaacccgttcaccatactcatccggtttgcaatcaggttattaccatgtgagaattggaagtcgaaggaatgatccaatcaaccatgttgacactgaaccattcacaggttccatccttgcaaactacgacaggacaacaaactcatggatggttgacggggtggatgacatcttctacagatataaattctactcaggacgtgtggacatgaacacaggaatccataaaatgcataaatacgtggacgagaacggaatagaatacgaggagagtgaacaatatactgagaaactcatcaaagacaacctcaaaacttcctatacagatgacgcaccattcacccaaggtgaattgtctgagttctctcacataaatgaaaatcaggtgtataacacgtccattccaggactagttatgttcacacataggaaaatagtgagattagaaacaaccatgcaattcaagaggccagtagaggaccctttaacattcttggatgaaaacggaacttacaccatccctatggcttacatggtaccttcagtacatcaagagaacgatgtgacaggatatgatgatataacgcatgatttcggctggatgtaccaaggggtcttcgactacgacaagcaagatgtcaactcacctatggcttatgcttcagttttggctagcttcaagcatgcatcattcaatttagaatattcagaaaacaagctcaaactggtagaagaacgaacgcccaaaactttgcaatccttgttgatgtatctgaaagaaaggggtaacaaaacttttatggaatatgtttccgatagcaagagatggttacacttggttttggctgaagatgcacatggcaatccttgcacaaacacgaaatttaaagattataaaaagatagaagatgattttgctttgggatatgacatgcttgctcacccttactacaggaacgctcaaggaccaaccaaacaatttattccaagcttcttgactacagctacattgtttgaaatgatatacgatgaagattattggtactcttgctgtaattgtaacgaaaatgtctttgttccacaaatggtatcaaaaatgaggggcatgtttaaaggcagctctttgttcataacaatgcatgattactttaattcgctaacatgcccttgctgcaacaacagaatttttactactatgccagattctagtgcgcttgtcacaaacactggcctcccactcaaaggtttaactgacccattacactggatggacgagatgtatcctggttatgtattcggtcagtccggaaatgcttcagcaattgtggatgagcacgacttacgtttattgagaagggtgctcagtatgggtaaacctatgatgatacacttaccatgtgaggctacaaacatacaagaaatacagtcaagatacaagagtgtcagcatcattccacgaccgggacttcttcacaatcatggaggcaacgccacggctgagttatatgccctggtcggcacggcggcacaaaacttagcaagtgaggaattctgcacagtctctgtaccaccaatgactactgtaccgcagaacaacaacttggagagcagaactgcaatcactgtatttgattcagttaaagctaaaagtggaatattggcactgatggacaatggatgctcagtaatctattgtgttacacccagcatgactggaacacttgctagaaggcagataggagcttatgttgcatttacatgcaatgctactgacgcgccatgggtcttgccagttggggattgcaatgcctttgactctactgcgatcattagcacagcaaaatacacgtacattaacaccatggtaaggcaaggtatatattacaatctagtttgcctgattaaatatgcaggtgatatgggcccaatagaagtacagagcttacgaacaaatgagataaaagaattcagcataccattccttaacccacatggaacaggcaatatgttaggatacggatggattaggaaaaacgtcctggtgcataaaaggttactttcagtactggtgaggaggaatttgagggatggtgatctttcttttgactcaatgatggaagctgccattggattagcgatgaacagatataacttggctgatagaacagttaagctaattaatattgacgccgagactctaagtgaccacgttgtgattgcctgcctgatggttagaaggatgatcatgaagcaagacaaaatcttaacactgatgagagccgatgcatcgtggagcaacgtgggtgaacaaatgctcaactcagtcgcagccataactgttgggactatgttgcaaaagttcaatgcattgagaaaatacgcaaacaagctcatgcagttccatgaaagtgccatgttatccgatctggatgcagttataacggacatgaagaactgggtcaaggatgccgccatggatgagataggtaagcacacttttgacttcacgccggaacttaaaataccaacttgctcacacgccctgggaccagagccagagaatggtgcattcatgtgcacctgctgccaaaggaaaagccatactctcacttgctcatactgcactgttatgccaaccagcacaacaataccatggaacgacgacatggttgaagaaaaagccaaatcaataggtccgaattggagggagttcgtgtcatccttacacgacccgaaagacaaaatgtctcatccaagcaagccaaagcagcctgggccatttactaaaccaaaagaaaacactggtgacaaaacattacaaatacctaacaccgacaacgagcacaccttcggagcaaagaatttggcgccaacttatcatgtgcacaaatgttcaagttgctcagctttatacgcacacaggttgcgcaaacccgattcacctgagtactacaaaataggagagaaacaccatcaatacctcggcgattgtccttggcatgagggctgcactacaagcattaaaattctggaaaccacacccggtacgtttgaagctgtgccagaaatgacgaacacaggcacatcagcagatgaccaaatggagttggccaaactcacaagtgtggagtgggccagaacgctagctgaaggggcaggcactttgtggccaggaactctgggcttgagaccaatacttaaaggagaacatgacatacgcaaccattacaaactttctgatgcaattaattatccattcaacgacgcaacgtgtggtcgagatgccctaaaccatctgtatccgcacatcagcaaagatcaaatagcaatagtggttggacgacacgaccgttatacacagagcaacatcatggaagtggctaaagcctgttctttagacatattagtaataagtgatgaagcgagcgtgctggcgagatatggtaatggagcacaaatgaaagcaatgcgtataactagagttggtggtacaacaccgcattgggaagcatacaacttcgagttggttactactccgaatgtaccttgctcttatttggaggatataacagaaaatgtgctacaagtagcacatgcaacattattcaagaagaaatggaccatggctgaacactcagacgagagaatagttactgaattgcgtttactcaagagtagtttgggtggcaaagccattgttccaagacccatatataaagaggggccaactggagggttcttgaccaataacacttcatccctgcatgacctaaccaagggtttagttcatgtacagataccaaatgatgttagccatttactcccatacgtcaactcaactagtagagttgacttggttagtgtgaatctaggagggagtgtcgacattagtgatcagatagagggaatacatgaggagaggttatccagaataaaagatgctattagaagcatagtagatggatttacaacaactcaagccgaggttgagcctaatgatctattgactgtaacaacacccttcaccgtattgagcaaagaaaagatcaggttggagctgccacaaaaacacgtgttcaaagcattggatttaatatatttaagatctgcggggggtttcagtcctatgataattaatcccatttcagctggtggtaggcaatatacagatattgctgcaagtatgccagttagttcagtcatgacgataaaatacaggaaagcgctgagtgttgcatctgcttatagagcactaactgggttgataaaacctccgcctccagtggaaatcatcaagaatgtattggtaagaagcaacggaatactagcccccggtggctatgggaaaactacagaaatcgtacagcgcatgaatgctgacaccttggtagtatgttccactacaatggctcaagatgtaattaaagaaggactaagaaaagccctggtgattaacaatcaagttgtttcagaacctagaccggaattagtcgaaaacgtgatatccttggaaagagcaacatatcaagacataccacacaagagacacataattgttgatgaggcaggaatgatcagaccataccagttgctcacacttatcaatcctgagtcagattataccttttacggcgatgacactcaagttggatacattgatttttccacactgggggggttaaaagcatccaaatccatctttgattatttgccacaagacaatatatcagtaaagaacacacaatacagagtcgcagaacccctgtgtttagagatagataaagtaagaccagcagggtataaatatgctggagaaatggtggagacaactgatgtggatggttcaagcagaatggaaagtaaacggaaaaccaacttcgatttgggctatatgcacgattggtcagatatggcgataggttcaatgatttcctcaggtaggtatgatattgtactggtattccacaacgatgatgtaagagctgttgagcaggcagcgaataaagccagcaccaaagtagcagtaaccactgtgcatcgcagtcaaggtggttcctggagacgtgggctggttatacaacacagatactcaagtaaatctggggtggaagtatcaccaagacattgtatgacagctgcaaccaggttcacagatcatctatcatgggtttctataaattgttatgagaatgcagatttacccactagaatgggcaaattaggcgtagcgtcaatcggtttcggcatgatggacaaaatgaagagttggtggtcaaatattaaggactcagattacatcgctgactgcgctgacgaactacatgcagcagcaatgaaactggacaattggaagccgaaagtggttgctcaggaaaccgggttcagacaatgggcaaaatatgctgccatgaaaagcaaatatgaaagcaagtacccggtatctgtaacggtctccaaagggatagattatgacatagttaccatcaaagcattaggtctaacaggagagatacacatttaccaagataaagtgcaattaattagagacatgatgggcatgattaaacaagctgatatagacaacgagatgagagcagacccagagctatcccaacacaaggatccatactcagaactaaccggcttaacaccgcaagactgccacatcaaacatttgatccatccaaacgcaaaatgtgaactcagaataatccatcaagcaacagttgccatacaactagcaggaggcacacccagaataaagttgggcaatatagaatacatggcagccaccacagcccatacatcaccattgaatttgtgtttcataagcactgctggtgcaacatactggatcagtgatatcaatgaacatcatgttgtgagaattaaccaaagttggcgagaagatgactcaatgttagactggttggcaggtaaacaactcgtcttaaacattgatcatgacgaaatgacactgctgatgtggttcaagcaatggtgggcacacatgtacttagatgctaaaaagattgtaaacacaataaaacccatatttgacacagatgggccattctcagcatccaacaatgtgtacatacacgatgtggaaaatgctttgactaatgatatcacaacagactactctttatcagtgactccctcaatgtgtgcaagttttgacatgttagggatgcctttatcagtttatgacgtcaaaaccaactcacacaaattggctacattaacgaaagaaggcggcttgctagtaataaacaaagctagcaccagcaccatgtatatgatggctataattaactcagccattagacatatgaatatggggtggataaggaaaacgatgagacatttgctgtgggggggcgcaagacctttacaaggaaaattcatgatggatttagccaagcacgtgagtgccggggacagaacaggaactgcgctgctgaatgcttttggtagagaattggtggccagtgttaaatacgaacccaaaaccctggtgctgcacagggcggaagatgatgacaccaacaaatttttccgtaaggaacacaataaagaacaagtgatatacacaaccttcactatacccaaagaagcccggttcataatgataacaagggccgtactgcattccttacaaacaactgaaatgaatttgaatgtagtggatgttgacagcacacactgtgtagacatgtcaatatggcactggaccggcgtgtcacaagaaacgatgaacggtaatgtcaaactcctaagcatgttggaacctcacaagaataacagcctctcaaacgcagcaaacatgcaattcaccagtggaccgaagaaccccaaagaacaagaattatctgaacagatggaactaactagaaagaaggcgctaatttcaataaacgatattaataatgagagagggttaattaccaacaaaccaaatagggactgtcctgtgtttattagtcctcaatgcttacaccacgatatcgaagttatagctgagctggtgcattaccacgggtacctgttaacatacctaccaatcaaaagtgcacgcgtggttaaacaaggttcactaagtaacacagctgtagcggacttgcaacacggcgtaacttacaacgtaccgaaatggctaatcgacttggatcacacaaaattggcggtaacttccatgttcgaattaacagttaccgttataggatgcgccaacgggcaaattataatgaggatcaccaggcgccagtttgctgatgaatttaggttgcaaattgatgatggtttggcagacaacatagtcatagtggaagtacctagtgtaagtgacaacatgctggacgatctattgaaaggccacgtcaacataattaaattgaaaatcagggaaggactttggcggcgaatacaaatgcgcatgttaagacctgataccaaactcaatgacttgagagtagctataaggcatttactaaacaacgttgagtacatgataacccatcagagagctgttgaatctggcatagacgcagatgatggcgccagtttagcattggcgtgttatatgatataccatcacaaactgaggagtcatagagaatacgtgatgggtcttgaacaagaatcagaatattacctgcaaagaagcttggatcatgcaaagaaattaggtttaggagttctaggtacaatacttaaagtgctaggggcagacaaagagccgtccgttgttgtaaaggggctgttagaaggcagcggaataagcaacagcttggaaattttgggaaaattagcggattcttgggattcactgttagcaaaggattacagccaaccactaccaatattgctcttaggaggaaaaacaatagccacaatgcaaatgaacaaagtaggttacccaacagaaggcctatcaagcttcgttttcagatacatacatttgggcccaacgttggcaagaagagcaagaggccagtatgatctatacaaggcaccgagcacttcaataccaagagtgacgaatgaacaatacctggctttagagatgggggcatcattagtaccatcaaactctattatcgaaaaactggaagatatgggttggcacaagatgaaagaatatgttaaacaagctaatctgcccttagcggcaaaaacctatttaagctggataatggaacaacaaacattatcagagaaagacgcaatagagctaatgcataagtatacgacttcaagtgaaacagacaaggtactggcaactatatcgaaattacaggatattgtgagattggccttggcttcaaacgtcggaactggatcgacttggttgccggagtgtcaatggctgtgcaaggacttcagacccgcggcagcagggtctgaagctgcatacaaaatgaacgaagccctaattaacaaattcaatagagtagtggaacagtgcactctaatggaccctagctcgatgttactagtggcaacagtgggtttacaagtgtcagcactcttaaaacaacaacccgaacaaaagagaatttggacagacgtgcaaggcatgagagtaggtatagtaactataggttcaacaggagaccatctacccaccttgtcattgtgcagggcattgttagcacatggagccctaccaaccgtttattgtccccgagagagtgctgagatattcacaaatcaaggaatactgactattcaaggggactggagtttagagagcaatctaaaactgtggaacaatttaacgcagaatttgaacgtggaactagagaaaataccaatgactcttgggacaaactggctgcaaggcactgtattcgaagacacccaagacttgtggataagcacaccaattgcaccacaagggttaatggttgccaagcatttcggtagacctcacatctatttttcacccttgccatgggccttggacgtcaccgaaaaagaaaacaaatatttggcagtgttaaaggagacagccatattgatgatgcatggggaattgattagtcattggctagtgacgcacaatagtaaaataaatttctccgatctgctcaaggacacacatcccataatgtattgttttgacaagagaataatatcggggacaacaaggaactataaacctacattctgtgggtacttagggtggaacaacccatggaaaaaggagccacatcataaaggtatagtggtgacttttgggtcaatgataatggatcatgctattgatttagcacagacggcaatgatggcagctgttagtgcaggacaaaggagggtgttttatctcaagaacgaatacttgaacaaagaaatcgaagcaaaagccaaaaagaacggtgtaacactagagcaatggcgaggcgattattatgagaggctaaccagtgaacacgttgtaatacatcatggtggtgcaggcacaacacatgcgataacatacacaggtgcaaaacaattaatagttccggtagcttttgatcaatctttgtgggcacacctgttatccaccacaggaagggccagggcagcattcaggaaacaggacatagaatcggaattggcgctattgatatcaggaccaagaccagcccctctaaacatcgatgtagaaactgtaaacacgtggttgaatgaatcacttcagtcaagcttagagcaccacttcccccatgtgacgattgatgcgtctgtacgcactttcaccctagcgcaggaacggaaaacgccgctcataaaatcaataaataacagaataaacataccaatgggtacaactgataatactattaaactacctggctattactttgggagactgaatgttgaaacaagtgtaatatttgacccgtactcagtttccagaccggataaatgtggctacgattgcattagcttcataacaggatcggatcaaaatgatgtagtaaacatcttgaaggaagcaggtataaaagacgatgtgtacacctcggattatgtggcaataggacacatgttccaactaaatctagtcatcatacatgagggggcagtacacgctcatgtgcactgcccaagttggaaatacgggtacattaaagcggagcgaggccacgcaaccgtaataagcccggtgccattaaccaatctgcgattaatagaccccaacccagtgcagataggtgaagttggctttgcaaacacagcgcaacattgcaacttggggcccacattgcaaataaatgctggccatgaacatggacacatgcacagcacaaacaaaggtttcgtcacgactgtacaagccctattgactagtggaaggtctgctaaagacaagtctttagtatcgcatagcattgttgaagttcatgcagctgtgtcggtgcaatctgctctaaaaaggataagatccaccaatctaaattggcccgcattggccagaggaaatggggaaacccctgcatacttattgccagaaacgaccatgacggacaaagtaggggttttcacggtcaccaatagaaaattgccgctaggtaaggtgctgatacatgagcgggataatgaactgcacgcctcagtagcatggttagctgacggtgcacttggaaagatgacagtgctgataagcaccgacaagttaccaccatactgtgtgtacaatgtgcgggctgtgatgatgaccaattcaactgattataggtggacggaaatggacacggcggtgtacagtttgaggcatgacataaaattagtcaaccaagttttaaaagctgaggtcgcggtttctatccctaaacaagccacggtgggtaccttgtatttgatgaacttcaataaccgtgatcatcacaaagagggcggcttcaggcatgaacttggggacttggctatagcagataataacgtggtaatactaccagacaacaaatctgatgtctactacgtccaacagatgaggtctaaagccaaagtaagtcccagcttgtacatgggcaagcgggtgtactccttaccttggttctacactagtacgttcaaggctcaatcggtcggaattgaccctagcaagtatcacatgctcagtataccctaccatgacacccattatcagtctgtgttcctcaacaccccatgcttgccacatgaattcaaagggaaaagaactcttacagaatgggcggacatgtacgtcacagatgtagtaggtgaaggatacactatagaggagcaagcgataggtttacttagcttggtgaatggtaaatcaatagaggagatatttgacaccatcaacgaaaaacttccacacgcaggtcaaatcacctgggcaaatcaaaaagaaacgttaaggcctttgagtgacgatgaaataattgatattatggtaaagtgcaaaggacgactaattgacaatacaaacatagtactcaggcaaggggaagaaccttatcttgcatgggaacggtctataattttggaggtaatagaggaagcgctagaggaagcagtaagagaaaacgattatgacaaactaagctgggaatggtcagggtttgatagggttggggcaacactgactgcgatgaggcaaggggtccacataacaggcaaacatggcctaaggcaaataacactgggagtaggtttgccagtgtacacgaccactatgtccaagagagacgtaatcatggcaatatacaggaggtaccgtgaactagcaacgagccccttgtatgatattgataaaggcccagacgacttgctggaccaactaagccaacttatgttgagtacatcagagtttgaagtaacggacaagaatctgccaatcgtctggatggaaggagaatacattaaccagagacaaataattgaaaatataaccgagaagggagagcacgctaatttgataatgtcaaggtatttgacatttggaactagtgtaaacgatgatgtcttcttcagcatagatgcaaccttggggaaaaacatgactgtttacctggacacttccaacctggacgaagatgacatcgaaaacataatgcaagctagagaaagaatgatggattatgttaggcatttgatcgtaagttacatggataacaaaacactggaggctgtattcatgttcaacgctgatgatagtttcatgatagaacaccatggtaagttcaggggtggctgttcaccaaatgtttgcaggttaatagctgagcacatggccacagccactgactttactgaaacatcaaagaattactattggttcaaatcacctgcaacaaatgaagagaaaatttatgaaatgccgttaacactagtaacaaaagacgttttgaatagatcaatttatctggagatagaaccgaggctgcgtgacccagaagacttcgactatgaacttgcggtaaagatttactccatggaagacgacactcaaactgatgagtattatttggaatatgaagacatacacgatttgctgaaggatgaggtaaccaacttaaggcccataccaggcacacttgttaaaatgaaagtggactcaactgagttcatcgtgggcaccttgatagagaaattgatagaaggtgactataagcaagctgctggtttgttgatagcacaccatatcgcacaaccaggtcacactcctttcgagtataaattagatctgaaagggatagaactgtttgatggagacctaacccacgctggcacatttggcagcaatgaatgggaaggttggcagtcgatgacaaataagtgtggttacaggccagaagagtcaaatgagtggagaaacagtgatgtatcagacatgcacaatttggattacgaaagggcaatgcttagggtgccacgaaaacctttaagtttgctacacattaaagctatgcaattagggaccttaatactctcagaagaattaggggttatagaagacacgttaataaacgacaagcctttgttgataactgcaggtgtggctgggaaacacaccctcgagttggaaaaccaacaattcataaatctggtgccaagcctaccagaagcaaacgatgagcacaacggtttgtggttcaagcctccaactgtatggggtcgcagaagggaattggcgctttggagattaattgccttaacaaccgacatccaaaaagtgagagtgaccaatggtagggacttcggcaatctacccgaaccatcaccattcatgaagtacggggtgatagcgactataccacagggagttgctccagtctacttaggggatgcaagctttgagagcttcgaactatccgctgacttcttgttgaaacacatcaacgctgcaggagatttgtatggaacagatgaattaatgctaatgaaggtattaatggaaaacagacgaatgtcatctatggtgataactcctgataagccaacgtatagcttgaaagcatcgtggttcaccagaccagtatattgcatgaaggaacacggggaggattcgacgccattaaccaggggctactcctcagtgcggccaggtgacatagcacaactacatttaccttggcctggtagcaatagtccttcggtggaagatcatataaacatttgttactggagaaaactagtgcagcacacacccacaattgtgctgtctgacacactgcctcctgtaatggacgcacctctttggttcaagaaggaatcatttttgggagtgaggagattcatagtgtcaggaagagaggatgtgacccaggattattggcgacaaaacacaaaaagtggcgcaaaattagcatgcattgacaccaaccaagtgttgagttgcttagattacgtgttcacgagtaatttggactttatatatcaccaacaaggaaccacattgttaccctacctatacgcacaacagttaactggtttaaagggtatattagaggagaaagttgggctgatggggcaatcaatagcagatgacggtgagcctgctgacgcattaccggaagcaaaagatgttagacgcatgaacagggataggatgttaacttttgaaaatgagtctatcaagaaaatgttatcaattggggtgccagtaggaggttggaaaacaacgctcgcaagagagcaccctgaaattttcgctgatcacgacgattacctagatcaagagaagcatgccgctttacataaagcaggagaatgggataagttatctattttccagaagaatgctgttataccaaaggacagagttttattgacatggggttccacgacatcaccagacaacaggacttacctgggttcagtaataaacaggagatctgcaagagaaatgggtttgccaattgaggagtacaggctcaatttaaacgaagtaaataggatcgggctgatagcagagggtaactacaacatgataagcacatatgacgagtttaaaagaaaatgcttaggattggtggaggatgccctcatgggggatataccggcactcagggccaacatggaattagcagatcttgcgatgatgactttcagggacatagagtatgatggcagttttggagaattcgacagtagggacttgtacataccatacataccaccaataattgatgaaactcatgacgagggaattaaaccagaactggaagataccccactagacgtgatcaacttgtatgaagacaacgatttaacagaactagtaagggtgatggcacctggttctgaaccattcaggaagccagtgagatcaactgaacaggctttacgaatagttcaaactatgaaacatacattaaagaaatatccaatacgatctagggctgtattgacaaaaatggtgtatggtgaattaaacgccacaatactccgcatggaaaacaaggaggtaataaagaagatagattgcaatccagagtatgaagccgacctaatggcggaaaccttctttaatttgaatgaaatcaaatatggaaccataaactacaacacagcggccacactggaatggattagagagcatgatggttcagcagagttagagaaggaattgcgagagattctggatgaaggattcttggaagtaccattgaatagggtgaatgtgcaccagaaattggaggcactgctaaaggggttcccaactaaggcaataggacagatgcgagaacagcaagttaggattattgtatggcaatccaaagccatggccgctatattcagccctgttttcatagaagccaagaaaagattaaagaaaatattgaaacaacaagtattgtacgctgatggacttagaccagatgagctgaataattacctgagaaacatagaggatgataacttattctatgtagaggatgatggtaacaaacaagataaaagaaccgaacaccaaatgttattaactgagatgatagtgtataagaaatacttgaaagttgctgaccatatagtggacttatggtatcaagcacacaacgcatggagttacaagggctcatgggtaagaggtattagtgacgctatgcgacaaaccggtcaagctactactgccataggaaatgtcatagttaacttgatagtgcacacaagactcgtgagaagcttaggcaatgattttatatgcatgctagtacttggagatgacaacttaataataaacagatcatgggtcaatgcaaaagaacacgaaaaagactccgccttgcggtggaacatggtgcaagaatgcgagacattgccatcacacggaacttttctgcagatgatagtggggccagatggcaacggacgactgcaggcatcgcctgattttataagattgcgaaacaggtttgaggtaactaatggagtgtctagtaatccggaaaacacattggaagcaagaatactgagttacgcattgatgatggggaaaactgcaagaggtgaaaagataataagaaacctaggttatgaaactcccttaggcaattacttcaaccatgttgcagcaattaacaattgtgcagcgaggcacggtgtgaacgccgacctagtcagaaatgaaattaatgacctatatacgatgatggaaaacaaacaactgatgacccagacatggacacactttacaggtgtgagcagattttaaccaattgctcagacatcacggtttcaaaaatttcgatttggtgttggagtctaatgactccatcaccataacggaaattaataataagtatgaaaaccagaagttactgggacccttgaggcgttacaagttatgcactagaggagagttattgaaaggtgagataaggttgtttgacagcattgagggcattggagctgctaacagcgacaatagaaagcaacgccagagttcaaaaagaaaacaaacgaaggaaaacaaaaacatcatatcgatgaatcacagcgatataataataaacgtcgaccagtgcaatgatgcgatagatgatgttataactcattcgcgaaggtatggaaacacagttgttgtaagcactgagaataacttatcccagaggagtttggaatgtctattcaacagcaaggtaccagtagtggtattgcacacaaccaaggtggataatagactaaacgtctgtggggaaaacacaatccatacagcgatgtacaacttcatactaggggctcacggatacgaagcaatggacgtagacacctgcaattggacagctgagattgaggaaatgcacggggtaaaaatgaacagaattgagaatcaactcgacagtgaaacgagcatcatacaagatctcactaatctgtgggccagtggtaagattctaacaggaatagaagaagctccagggtacttacaaaccattgctaagtcattaacgcacacagatttaaactacctgcacgacaaggtaatggagcacaatttgagcgaacatcaactcatagccttaatagcatcgcgcaacaagaaccaaatcatcattgactgggacgttgagtttattgaggaaattgtacaagggtcaattgatgaggtggccctcaatgacatatgcaaaatgttgcacgacaagaagcaaacaaatgttaccagcctaccggggattaggttgaattttatgaaaaatcgcacagacaacagtctactgaatagagattttgttgacatcaatgcattaactagcacaaaatggttcgagtgcttgaaactcagaaatcaacacataattaaaattgagctacaagatattagaaataggtatcatagtataggattagaactccatgaattaaaacctgtggaagccacaaaaccaaaacatttagtatgggtgccaaagaacgagaacaggggcgcctacaaaggagaacacccaaaagaaaagaaccccgtaatggagggtaaggtaataatagggtcgggcagaggttttggtaaatgtagcacaatcataggagtagcagacgtggggtatgatggattgcatggggtaaacaccgaattaatcacgaccaaagagtcacaaacaactgatgagtggaaaagggtttgcgatgagattgagaaattgatgatcaaattcaataaggccaaaagaaaccggctgatctctgtaactgcaaatgcagtatgttatgcaacagagtgttacacaatcaacatatgcaacagaggcaatgaaattagaaactcagatgaagttttcaacatcccatgtgatttaacaggttatgagctagccaatgtcagggtgtacgccttaaccggcttgattaagggtgcagctgtacaaataagaaacggtaatatgtcaccaggaacaactagtaataccacttggaatgggttaatggcctcccacagtaaatacggtgcagaagtgagctgctacacaggccacagtgaggacatgggtggtctaaagaatttctttagaaactattccccattagctgatttgagaggttatgaagaatgtattctaaaccaatgtttgcttgcaagaggaattaaagtaacagtaaaagaagtttatggcaagctcagatacgaggacaatgagatatatatcaatggatggggcttgagacctgctcttaaaatacttactttgaacaatacggtggaagagtacggggttgggtatgaagcatcgagatgggacttcacacatctaaggcacaacgcatccaacgtcacaattgactacttgtttggaaacaacagctcagctattatgacttggagacccgagaagttcaacgaaacaataatactaaacagagatgaaacaatgtctatgatgtacaattgggagcaaacattgaggtcaggcttaatgccggggtacaaccaagctgtaggattatacaaacaggcatacacgccaataaactgtagacacgggcaacagccctacgttaggacaccagaagggagtattatgataacgcacacaactggacacatgcacagatgctgggagcgatcatgcaggagcacacaaaataaggggatacatggtttatcctataaagaagtgctacagtgccctcgaatgaacactaaccttaacgctgctgaattcctgattaaaactcttaataacttgttcttgaaagcagataactcaatcaaattcatgataacagccaaccacacatatacatcacctgggtaccatctaataaatttgaccacggccgcaagcaaatttgaggtggtgcagctccccggtatgactgagattaggttaccaggagtaacagggagagcactagctcatctgaggttatgtgtattattcaccaaggcaagaaggagaatatttatgatgaacgggacaacaatagctcaatgggaaaaagacgtgtacgagctggagcataacagctaccttaagcgtcacgagtggtgcagcatcaaccaggtggtgccttcacatttctgtgcagggggctttggctacagcgggatactacgaggaaaattagatcaattcttaacaataacatcattgggtgctcatatctatggtgttgaagaagccatgatagctaaacaattggcaagtttggacaatacatgctttgtggcaacaaggcagcaattggtgatggaatggcacaaagatacccaactggaggccatgaccatctactaccgcatgcataatggtgagttaagggggccatacaaccgaccaagagagacatacggtgaaagatgcgtatggtatgcaaaagagttaggcataaaattaacgatcagagacagagaagtgataatggaaacatcaaaagaaacaattagagttgatagggttttccggccatcatacgacagaaagtcagaggaaatgtggttaaaagcttgcataggaagtgctgaggatttctaaaggaaaattaaaggaaaaaccatagggagtctagaagagtgtgtgtgt

SEQ ID NO: 905 - DNA, 1011 bp, Rhizoctonia solani endornavirus 3
  source 1..1011: mol_type = other DNA
gcggatttattcggcaagaaactgaaactgagagacgtggaacacgaccccgtagaagacgctaagttgttcgctgcaacatacttcaaggaaggatccttagctgcgttaccaaatgtgtcgatagaccctatcgaagtacaaaaatggatttccgaaaggccggattacatgaaaattagtgccgacgtactggatttgttgagctcgggattggacgtcctgggcatagacaaagttaacgtacacatgaaactagagtccagaatgaaagatgcgacgataggagccctacacgaattgatgactttcaatgccgataataaaatgcccgagacaaccgaagaacagaggatcagactaatagtgtggcagaggaaagggattgcagccatcttttctccttttttcaaacagatcaaagaacatttgaaacggtgtttaatagataaaataatgtatgtggatggcatgaccccacaacaaataagcgcaagattgaacgctgtgagtggcgacgtcatgttcgcagaggatgatctagccaaacaagatcgacagactgatcacactttgttggacacggaaatgcacgtgtacaaaatgctcggcggaaatagttcagtggttgacctgtggagaaacgttcacaacaattggagggctaaaggaatagggttgaaattcactggagatgcttctaggcacactggacaagccacaactgctttaggcaatgccatagtcaacttgatggtgaaaagaaggatagtagagaagcaaggacccgcactcaaattgatgatggtgctaggcgatgacaacataatattaaccgaggggccaataactgccgaagacataacgatgcaaagcgcaagacactttaacatgagaagcgaggcttctgtcaacatgcacaacggcgggttcttaaggatgttgatatacaagaccaatcacggaaacttggaatgcggaccggacatagtcagattgagacgacggttc

SEQ ID NO: 906 - DNA, 20215 bp, Rhizoctonia solani endornavirus 4
  source 1..20215: mol_type = other DNA
caacgaaatacttgaaaaatggaccaatcaaaccaagaacaatacacacacacacacaatcgcctgtccactcctctccccccggtggccggcgattttaataggggggaaaagcgcgacgccgctcttccagtcgcgcatacacaaataaacttaatggaagagcacgacagcaccgaggcaacaatcgtgcctcgagtggaaaggatcaaaattagatccaacaaggcacaaccaataatgatcaacaggaccgttgaaagggggtctttctgtctgcaacctactagagccgttgaaataccgaagaaaccggcgagtgtacgcactaggatagtggacgcccgagagaccttgctcgtcggtggcgatggagactgctggtataagctgtggcagccattgaagcgagctggcgcagtgaaattgttccaacgtgctgcaaaggcattcgttggtgcaaacccggaaaagtacccgtctatagtgtcacaaaacgcggaagcgaaccaaccgattgacctcgagttcatcatcagatttgtctataaaaattcgtacatggtaatgaatcatagccggttggtgcgctggtaccaagagttcagtagagccaaacaagccggggaccaagttaagatggacaaattgaagaaagttaagcctgaggaggacgccgtggagtacaatgagtacgtccaaaccaaggatggaccagactgcaagatggcggacctagtactcgttgcattaacggagacagctgaaggattgctacatatagaatccgtcgacgtttgcggtgaccgagagacggcttacagcagacttgacgaagatatttacccgttagaatatttgatgcaaatgttcatcaagaaacgcaaggaacgacaactacccaatgacatccgagacgaagtggccaatgaagccatcaaatggcattccagtgggaatgccctacaattagcgcacaatcaagccacccagcttcaaaaattgaacattcgaagttccatggaacgcggtttcaagaccgttttgttgcaaaagatcatgcgcgataaagttaaagtcggcgtgtctgcttcgtacctaatgagaagtaaattcatagaaaaccttgaattcgcactcgatgacactggcgtgcgggagtaccttgaggccgttacagaccatgatatgagagttgtgaataacactttcgcgagagtgaccttcaaccacctccgaaccacgcagcctgacaaacgttgtgacatctccagcgtaaaggaactcgactccttgtttattatgcaagatgagataactcacgaggaacccaccgagcggttcctgactgacatttgcacggccttcacattcgtcaacactgaccccgaagttacaaactatgatgaagagctacttgcaggcttgcactcacaaccgtattacgccaaatacctcgaaaaactggacgaagtcaagaacgagcatgaacgacagagaaagccactcgtacttgtatccaagcagcccactcgagaggatttgctgtcttacgacctcgtgtttttgatcggaccggttattggtcatgatagtgagggcagcttgcccaacgaattaggttattacaaatggatgaacagcgaagagtgccattattcatttgccgacacaacaaagtccaagtcttgtggcttcttgtcgggtgtgctctgcgggtcaaacaacgtgtctgtaaataacagaagtgtcactgtcgttgctcgcaggacatttgacgccatgcaggtggttatactcaccagtttggcttatcagggtgtccaagtggctgagtctactgtgcgggaatttgaaatcccggtaatagcaccaacctctctctgggccaccggaatacctattttgaaaaccatgaaatgcaaactcaacaacgtccttctgaagaggctagtcaataaaaacctgacgggtaaagtttctaaagaactattgttagaatatggaatggcgttgagttggtattcatacaacaaacggggtgttgagatctctgaccacaagctcgacccttgggatgtaaaggtgcatgtgtacgtagccatggtgctcacccgcagggaagctctcgcaacggaattgcagcaccaaataaccaaaccagggttgaacgctgtcttggcgtctttcttagccacgatggtcgaggctactatgtcaaacgttgatactaaagaggaacgattccaaacgatgatcagcagtataatggacaagttaaagactccgaatatcaagagtaacaccggtgtaattcttaaaaattggatgtccattgacttttggacgttgagagatgaatttgaagtgaacaaagccagcgccattgtggcgtgctcacatcacgcgaaatgcccattggaagtgactggcaacatgtgcattgactgcggttatttaaccgcagcagagggtgaagagtggtgcgtgtgctgcgacattcttgtatgtcaacacgaccggccggctgaccaattcggagacaaagtttgtgactgttgtggtgacccaacaaatggaactacttgtgggtcgtgcgcagccatcaaaggagaggactccatcaccaccatgcacaataacactgcatgctacaacttcagacctaccaccaccaaagccggcgatggcactggacacactcatacttgtgttaaatgtggtaaccgttactctcacagtcacccttactctaacttacaacatttgcaaacattagaagaatgtgactggtgccacgggaggaagaccaccaaggaaaaagggaagccaggcaaggcagaagacaagccgatagtgaaattcatcaacgcccagggtgaggtcgtggaatcaacacccgcccagcccacaaaacaaacattcgccgaagctgcgaacagcgagttgcctgtgcgagcaccgatagaacttatgaatctcagcgaatatgccgtttatctgccgcaaaacgccgcagccatattaatgggtgagatcgctgataccgagttgtgctggttctccgaaaccgaaactagtacaatcccatttgtctgcatggaccatcccattgaaccagtgtccaacttcgaagtgatcgttgagtctgaggagtccacagatgaggattgcggagtagcttgcatcaaggcctacgttggagcggaatacacacaaaccgctggcaagttagtcacggggaagactaagctattcagtgggttggatctcgccaaagttctgaatcaatacggcattaacgcttgcatcatagaaccgttgggcgtggttttcagtagggctaacgacagcgaagaattcgcatgcatcatgcacaaagatttgagccagacacaaaacgtcgaccactgggtcacgtgtaagattaaaagaattgcatacgttaataatgacaagtgggcaatgccgttattctcgcctcggcaacacaacatgcactctactaatctcaagaagaagaaatatgaacttctcgatgatcacgacaaattagatctagcattccgagttgtttcatcgatgaccatcactggatcggacagtgaattcgtacttgattacgatcgaggcaatttgacgaacaacaaagagaagaaacacgatcctcaacggggaaaaatctctttccaagtcccagagaaattccaagaggatgtgcaattactagtcaactgtctcaagaatggagctgttgacgataaattcaatgcggtttgggacaaaatcggggaattgaccctagaatttgattacaacgtaagacactccttcctgagtacgtgtctacaactgacactcaccttctcagatcctgaaagtcactgcaggtctggtgacgccaaagtcattcagtataaaggtcaccacgtgatcgatttgtccaatcgcgaccccaaaccaggagatgttgtgttcgtcagctccaaaggcaaacaactggcatgtacagttgatgcaaaccagcaaatcaaagtaaagttgtccggcacagccgtgagggtgaaaatgttgatacccaaagcttcggttttatctgcactaattcacattttcaccaccacaacagcctcatttgatggagccaagctcaaatcgctcatagaacgcagttcgggtgctatgggtgttggaggagccggaaagagcacacacatagccgagttagctagaaagttgaaaaacgaaaagaggaaaacactaatctgcaccaacaccaataaaggaatgcgatccttgaacgagaaactggacaaagacttgcttgcctacactttcgaacgagccagttaccttaaaatcaaagcaaatgtggtaataatcgacgaagcaacattaatgtctccatggcaattggctctaattgccaacggaaatgaggacgatttgtacgtctttggtgatccggcccaaattgaatttatcgacttcagcaaatccggcggacacagatccgagtcaactctgatggactattgtcaaaagtatggcaacattgagcaatggtggacatcccatcgatacggcagagatttagtgaaggctttaaagttacatccgaaactggacaaacttgaaacggacgctgagcataataccgtggtagaactgtattaccatcataaattcgacctagacatgatccgaccgctaatcaccggtatgaacttggttctagtgcattatagagatcaaatcaaacgcgtccggaacttgaccagcaacgcttccattatagaagtgacaacaccgcatgggtatcagggaggtgaagttgataacgttttagtcattcaatgcccggagggatctgccactacacatttgcaacctggccacaatattagtgcagcaaccagagccaggaaaaagctgagatggttgtccataaactgcttcgacgcccaaaccccattgcacgagaggttgggcggcctcataggcaggaactttaaacttgattttggaaccgtcaaacaagtaaaggtcaccacggacaaaggtgaagatttggagtacaaccttgaattcgagaaggtacaagagcgtatcggtcaagcggaaatgcctgagaagtactcggccgaaaacttcgactttccactcttccaagacctcctgggttcgttcacaaatatggcaagggcaaccgattttgaagtgaccggaaataaggttacgttgaaagcaacttcgatcggaatggaagccacactgacggtggatctcgatgaactcacagtggatggtcccgtcccgcacagccggaaaaagaatttgttaagcctggtggcttggtgttgtaccggtggaagtcatccaaggataaccagaaagttggaccacagaggatggtacaggtgcagaatcatagcattcgtccataaactgtatgacacacacaacaagaaactgaatttgaagggcaaattgaacggttacaccgtgaccactaaagccaccagctgtgcggcttgcacagatatttacttcgaaaaagatggacgcgtcactcacgtcgaggaagattacatgcgcagtgactctaggcacgttgtgggtcacgaagtggaaaaaatctgcgaagtgttagagagcccagaaacgtgggacattttgagacccgaacttgatgatgagaacctatctcaagtgatagtcactgagcgattcaatactgctttcactgaagtgttcgcaagcggtaaacccactggaaacgtaatgtggtataacaggtacgaaaatgatagtattaggaacaatctactccgaagattcaatgttgaaattaagactagtaagcatgacaacatgttctggtaccacatcagaatccgcaaaggcatatcatggcatgtggaaagaccagttgacaacaagacgagagaggttatcaaaaccgcgcgcaaacccagtgtgcagactttggcacacgataccctcctgtccatgcttggacattacagcaaaaagagagtcgtgggcctagtgtcgaagatgtacactaagttcgtgggagcagcagatgacaggttgcctggaatggttgaaagcattgagtatcataagcaaaagaaaacaaaagtcttcacagctatttctggccgagtaggcaagctaatggtgacatcactcaagaataaaaagcccatggtattagtgtgcagctcggaatacaaggccatcaagaagtggggcgtaaaccacagattcggatccgtcaatagcgatcatgccctttccagcccagacaccgcatctgagttgttggccttagtcgctgtgagtacagggctaaatgacgcacaaattgacacgtgcttcacgaattgctacgcccaatacatctgcggaaccactggcaacaacatacttactaagcaggatctcaacaacactctgacgtcgtcacgtgttctgaaaggattcttcgataaggctttgaaaaaccacctcagcagagttccagcgaacactgaaatatatcaatcgctgatgcaaaccttagccgaccccgttggagccaaaacgcaaagcagcaatgtactagtgaccaccatgtctttattcggagaagattcaacatggtatggggccttgattaacaaatacgagaaggtgttcatcatcctgcccatgagattcaggatgattgaaggaaaacaatacactggatttgaagggtctagtagggtatacgaagtacccgaattcattcgcaagggtttgaggtcaaccccagtcaatttaggaaacaaaaggtatttcgtgcacatctgccgcgtaattgacgaagtatgcattctcgaactggacgagaacaataaccactgggcatcccactggagtaccaattccagatacatatggttggatgtaccttcaatagtattggacccggaagaggtgttgaacaataagaagctgataacttctgtcaaaaagagatacgacgttagcatagtagccaatttacgcaggcgtgccctaagatcaggtacgacggaaaatgacctgatcgtacaagcccgcacattggtcaacacagcacagttctcaataacgaacgtcttcgataaatacgacgtccccgtccacgccgcaaaagatgcggtgaaattagccctgcacgtacacgaaaccgaaaatcgaatgctcagtctcgtatcgggtgacggttgggctgacgatctcaagactgtggggtggaaagtcatttccgacatgttaagtaaattcgtgccaaaccacaatgttgacacactactagacaaactgtcaccgacacgaaaacaagccatcattgagaacataaagcccttcttcgaaaagttagctatgttgggacccgtcctgatgcgggataggaagatcttttcaaccaaatcgtctgacccgtggttcaacactcagttaaaatattggaaggccaatagaacggcgtacaactttgagccaagataccaaatcacgagcctgacatattgcaattgtgacagctgctcgacagacgataacatgctagaggccatccacttatacgagttggaaggaaagggttgcaaccccaccgtcaatccatcaccacaatacactctggtaagtaccaactgccccaacaggatatacggcaccttagtcagcaccgctttcgacgcacaaccattaaacccggccaactccggaggcgcttgctgcccagtaaaacgagccagaaaaaccgtgcacccagacccagaacaacctggaaacacgatcgaacatcccactggggaggtcgtctgttacgttgattgcacggttgaactcggggccatgcattggagcacctacgcgacaattgctttgtcaatcaattgcaccttcaagctaacagagggtgaaacattgagattcgccagtgaagagaacgaattcgttgaagatgggggacgtgtggttggaactttgttggctaaaaacttaaaggagtacgaacaactcaacgacgcaactttaaaaacaacggagatcgggaaaaaatacccagacgtcgtggctgttaacaccgagacgttaactccaattgtcaacaggaaattctccagagggaagctgaacgtcatcattccttgcaatcatggtaaaggattgatcaaatacctgctgaataagtgggccagcgatgtgtccgtgaagatccatgacgaatcaatgatatacactagaacccatccatttgacatcgcggctttcgcaagcagacatgacatagtattagcttcagacatgccaaagggtgacgtgagtatcagcgtgatctatgctggtactaaccaatcgctaggtgatcctggcgacacaagatacagatatcacaaaaacactgaccgagagtacttggaaagtttcaaacgcgaggactgcggagtgctccactaccagtggagcgacttgttgcaactatccaagatcgttgaagaattgttcggagtcagattgcccatgcaaaagggtatagcggcctgtggccatgttgtatataaagtgaaagatgtcgatgctgcactgggtggtatagcttgctccacttgcggtttcgaataccaaaaatatgaatttgtttatacatatggtttaatcgatgaaatccgcggttctggtcaatacgaggtcagtgaatggaaagacatgaaccagaagtcgacttaccgagccgaagggtccgtcttaatcaatgctaacaagttcgactccgacgtgattcccaacattgagggcatggagtatacatttgtgagaaccaaggacggaccagtactactcacaaagcaggttatcgacacctgggacccggtgaacagcatcaaaatcttgtccacttcgcacaacagaataatagtggaggaaacctgtgataacaacagccggtggtacgaagagggggaagaaatacaatggtccacgttcggcgacgaatttgaggaacttgagtacgagattgttgatgccactatcactaaattgaaggatttagaaacagtcaaagccgagtattacttgtactattgctccaattgtagagccgggtatctgtgtggaaacaataaaaaggccgggttgtgcccgctaatgcacagcctcatccttttgtgtggacccaccggtaagtccagaaccggaagcgtaccgtatgtgaaactattcgaggagcccagcgaattgacagagcaagggcaagtgtacttcgacaaccttcgctcaacaatgaccaattacttgcaagatgacaacaccactacgtccaaggtgggtgctgtaatcacggaagttaatggcgtcgacgaagaagttccgcaaagctctacaagaccaaatagtcaaccccaagacatcacgaacttcggagcaatgataacaagtttcacgaaagacgtatacacagcccagacgagggccaatttcgaggaagacggaactgtgcacgtcttagaacccctgaatttatcgattcaagacgaagaaaacaaatcaaggttgccagtcccggttaatatgtctgctgtcgacgaaataagcatgcttatgaacttgttagagatttcgttcaacgagaagctgaccgcagaaaaattagaattgcacatgatgacggtgagctgtttggctatgagaattttggccaagtccgcgaaggtgagactggctaggcaagttgacattaacagagccagcgactctctaagacaacaaatgctaagggaaagaacaggcatgctgaaagacacgatagagcgcctacgtgatgaagacaatgcttcggtcgtaactttctgggttaatctaatcaagcaaaccttgcaacaatcctggtcggcgagaaaaatgacaattgattcattatactccaaaatctccaacggaaatttactgcccagagacttagtggaaatggaattaactaaattgtaccacagcgactacacagttaccaaatcgtacctgtgccaagccggggacgatgaagaggtgaacaaacaagaggttgcaaaagttggcggaaacaagacattcgccaaatatgcaaaaatgcagaaacgcgcggacaaaatattcgcaatccaaatgctgcgatcattcactcgtagcgaggtgttgcgagaaatggcgaagagtgaagagcatgaacacgatccggtcaaccaatggcaaccctcgttaatgacaatccaagaagacgacgatgatgattacaactcgtttgagtactcgatgacccaaaaacagttacttgactccacttatacatcagtgatggttcatttccgtcagtcagaaatgcccaaattaaataactggattaagaaaatgttgttgctgttaactgggagaaaagttgtcataacatatttggacaacgaacgtaagttgcaaatcaatagttggagaactgaggaggaataccgtgacaacaagagtttcttgagcaatgttaggagccgcggcatttacaccatcgtggaatccaatggctcactgctgcccgacgagccaaactcaccaatggctttggagtttgtgaccaccccagaagtggctgaaaccttgtgtgcaaagacagcggaaatggccgaggaagaaaaattgaaattagacgtgaacgtcgaagacgttcaaatccagtacaaaccgctgccggagaattctgttatggccacagatgtttacagaagccatcttatgcattcgacccccatcgaggcgattgaagataacacagataacacttacaaggacaaagcagtcgtcgaaccaacggaagaaccagccggccttcaacctgaacagaccattggatcgaagatgtcagatgccgagaacgagaagataaggaaaatcttcgaggaacacagggctttgaggggcaacaacgtgcagatgatgagcttggaagcccaatcaaacaaggaaagattgaacaaacacaagcgtctcataatccaagctatggaggaaaatgggttcaacttaagtcatgtgaacaagctgagccgatgcgatccacagaccgtcattcaggcaatcaattggctgactggggaggtacaactcggacgcatcagcaccgaagaagccgaaggacaactcagatcagctatccgaactgacggtagcttcaaatttgtcgtgaggcaattccagcaattgaacgaagtagcggaaatcgaccaattatttaaggatttgaaccagttattcaatctggaatcgttggaaatcgtcaaatcacacgaccaacctggagcgatgatggatcatgacgttgaaaactggataattagaaaacacaacaggattttggccgaagctttcttcaaaaatcgtagggagtggcctcacttgggacctgacccaagcgtgagaaactggatcgacttggtcgacatagacagtgacactagtagattcccaagacatcctactatcaacaaaaataggcagatggtagaatacaaattcattgatgaggattcagaattgtcccccatagaggcagttacggcgaaacttttccaattggaagttggttccggtatcagagccaacgtcagatggaacgatgaggctgccattttgcaatgggaggtagggagcggggtgtggtcaccatcgaaatctgaaatccaagaagtagttaattgcgggccagtcggaggcagtgttgtcaacagctggatgaaggatccaaaaggcaaagggagatacaagcaaattgaatcaatcaaagaagaatcttatgaccgcacggccaggtgcaatgaatacgacttgctcattcacagcggagtatgcaaactacgcggttcgatgcttaagtatttatccgacaagggaaaaatgaaggttgacaatcgcggaggcaaagtggccaccagcagcgtagttactacgaatgcgatgcgagcggcagaggcggcagagaatgaccgttttagcactttgatggaaaaacttgatgactattgccaaccattcgaggaggcatgggcatcacacattgagccggagagagtaactgcaaccgctgtccccacgataatctgtttctgccagatctgttgcagaggcaatctgaaaaagagtgaccacggcgctgtgccgaaagagtgggagtggcaccaccaaccggcacgatctgaagaggatagcaatccagcacgaattcgcgcagatgaagatcaagcatcccacccatcctcccagcaagagggtaacacgccttcggccagtggagagagaggcagtgaaagatctgataactcgttcatcaaggcttggcgaatgggaccaaacccgaggtcgaaaacaccatcgtcaagttcgaacgacggggaatccgaattcgaagatgcaatcagcgaattcacagaggaatctgattacacggtcaggcaacaggaatggaaatcgttacgaccggcagtggagccccaggaagtaggggtgaccggagagagcactgacgattcagaccaaggcccactcgagcctaccgaggaaactgtcggaagtgttgacatggacacgactgtagccaagaaaccccgaccaaccactggggtcacggagccggtggagggggatcagtcagtcattgaacccaccgagacgaaggcgagaccatacaaagatgtagttgaagagcaactgaacaaacagttcccaaataaggagaaaccgacgccgaagactgaagtccacgttccagatgggcaaccgctagccgacctcattaccaacagtctgaacaatgtgcaagccgagagagctgcgtacgaacacagacccggagcaaaattcatcactaacttagatcaaatcctcggatacaagagaattccggaagcggagcaagaaattgcgattcgtcacagtgacattgacgtatggtacaccaaaggactaaccgccaatgccgcttacggaatgcgattcagatggatgcgattccatgggtgtcacacgtatggggacctgttggattggttcgttaataggccatacaaacaatggatcaatgccgcaaacgctaaatggtattcattcatagcagagtccacggaaaaattcctcacacgaaatggtgtaacgtacgctaaattgtgcaagaggaagatcctaccagtgaccatgcctggataccatcttaacgggaccacgatttacttagactgcctgtcatccgaatggggcatttgtctactagccatgtcggtggtactagaaacgatgcaaccttgggtatttaaaagaagtcccgacggatttgaaaccataaacccgacgatatatgacttcagctgctgcaccaacgccactctgtatagggggcaaccggacagattggcagcactcgaacggagggagagattgatggccacggtggtcgacgaagtcggcattgacgtacagagtcctaattccactgacactaacagctttgcgctggggttggccatgtcgtcagacggcagatttatctacggattggccaaaaactgctggaacccattgagaccagccatatgggcggctcaacacggagtacaagaattgaaatgggtgagcgatctgagagtggaagtgcacgtagctccggtgggaacgaagaggtatcactcgcatttcaccagttggttagggttacaggactcattgttaaacggaaagatcagcccaaaatggtattctacggttaacgccgtggcaatacgcaggtacccacaggaggtcattgcaaagtattacaacgagaccaatttacagctgatcgccaccaggcctaccataaactgggggcatttcaatccatgcttcagacatcagaggaccgtgggagagcaatgtgaattatgcgacctagaaaaggcgaacaaaactgaaccaattggggtgcctaacactctgaacacggttaatcgtctgtggaacccaatcgatccgtgtgattcaggagaggaagcctggtacactaggtacatgggttacgaaaagaaggacaaaaaggaaggtgaatccaaacgtgctactgctgaaacagtggatgtaaatgaaattagtgacccggaaatggccaccatcggattcgcaaaaatcaaggagcaggtgatgacggatttgacagccattgtcactggagaatccggcttacctgaatttgttcattcagagaggccgatgttccgaccagctctaagaagaatccaacgctgggagaccatgcccagggccgtggaacctcatccggcactttcaatcgtggagtggttggatataagccaagcacaattagaagccgaggaaacaacgtcgtccctcaaattcgaccccaacggaggtgctggcatgatcattccagaggacttggacgtgtctgctagtcatgccggtggcatacaaatgtgcaacactcctaatgatagcgaaattttcgacaatcgacacaatgcagctctcataattagtcacgaatccattgtaaaggcatccaacccaagtgtttacaaaaacagggaattgccggtatgggcggagattgacgatcccatgttgccgactgaccatgacgtcgcaaatagtatcaaggtaaaactagcgactgaattaatcgcccacgtgcaagaagtggcccccccaatgatcgagggtgccggaagtgggcaagatgttgtggacctagttaaacgccgaccaaaccaaccaatcgcggggtggcaggttgtgaaattggcttccactggaactgtgaatccaagtgacaggggagtgcaagaacttggggatggtgaaaaattgttttgccagttattcccagaagtgcacgggaccacaatcaaacatccaatcatggatttagcagacgaaccattggttagaaggccgctattccataacccgttggtgcctaagaggttcgcatatggtagagacattctttgtaaatcattgttgcactgggtggacacagcggctctcgaagccagagggttgaatgaacgaaccaagaagtgtttgatcggcatgttgctgagaatcaacaaattgcaaatcaaggaaggcgaaattttgcattggtacggtttgcacgaaggcgtagcaaccagaaagcctggtgtaggcaaaggcaggcacatatgtttcactactcaacctgaaaagtatcagcaattgggattcgagacggtattgatcgatgccgaaccatacaggttgggagcttcgttgagattaatagcgatcgccctcatgcataactttaacgttatacacgtacccaaaggcggcagggtaactctacacagtttagcagtggaacatgcggttgcgaagtacctcgaaccagtggaatgggacgcggaaaaacgacgtttcaacaacttgagattctacagggcaggattcaccatgttctcgtcctacagcccgaacatggacggaatggtgttgctcaaaccgccatcaacaatactccaaagtgtcattcccaatatagtgaaccacaaagtttatggaatagatgaatgcaacccaggctggttcgatctacaagcttgttacgtggctgaaggcacacggaacacatattctaacaccagcaccctatatgattatttaatccagggtgtaatgtacttggaaatacgaaaactcctggaagatctgtcattcccggtcactttcgctatttcgagtacaaatgacataaacaagtacgtcaaattggcgtgggcgttagatcaacattccgttgaagttgacactaggaccagtgacgacgttgctccagccccagaagttgtagcatggatggcgaaacacgtcagcatcggcaacaaaactgcaaccgtagacagtctgagcttgcttcgtgacattgaacaagtgaaccctgagcaattcaccgtgatgagcgtgacaaaagaaggcgacaccgtcaaaatcacgaacggagacgcaaggtggagaaccgcggcaaactcggctgccgtggtcatgcttgcaaagaaacttggattgactggaattctgagatctaactgtggaggtttaacttggagaatctacgtattagtggctgacgatttgttattgaacgttggggacgtcaaggaggcgagtgatctggatgcgctcatggacttgtcgcgaactcaagtcaaagacccagccaatcgatctattctgatcaacgctatgagacaagccggaaaccggaaggtcaaagccgcgtcaaaagaccccactcgtagccatgaacgagaccaaaggaacatggaagacttcgacccagtgcaaccatcccttggacaatccccaatctcgggaggtttaacgcacaacgggacgaaaattctgtattacccggactcatcagtattcacacttagtctcggaacggaaaaaatccacgtatctatgagactttgcaaccgattgattaatgaaattaatgatcaattgttgtacgaaaaattggattctgtgtggctcccgaaagcagacttcacagccgaccagtgtccaattcctgttaacattcaatggtatgctgactcgtacaagaacaaaatgattccaatgggtgacataatggcaactatcacgcaaaatcatcaggccagcctcctagacaagtcaggggagcgaaagtacaacagttatttgacgaaagtgccaattccaacgaagaacttatctgagagtgacgttacaagccgatctgggggattcgtgcgcaaggtcaaaggtgacaatgcgtaccaagtcaagacttttgatttgggatacaccaaaggttatccaatcagggaaaaatttaacgtcaacgttttaagagtcatttacagcccacgcggcgcagacgggtgtgcacctgccgtcattaggatgttctgtttgcaagtggatcgcaatgccaatgtagatgaattgatgcaattcttacccgtggacgcttggagttccgcagagaacattgtggcatcactcaacctgctaaatatcaaccacaccattgtccgaaacaacgtagcttacagcacaattaacaacaataccaaccaattcttgaacttagaaataattaaaaatagtgacgggagtgaccacatacagatggtcgaatttattgcgaagggcgcgagacaaccgatagacttccaaagggctgccatgactagtgaattcaaaacagcgtttaaagccttgtcagacgagctgaatagcaaagaagcgtacattaatgattccaatgtgaaggtagacgacccatcaccatctttaatgaacgctgccattcgtgccaaaggaaatccacaccattacttcgtaactaacagcgagtttgcggaagtgacatcaaggctgggtgaagatctgtgggtactcagcggttccacgcctggcagcatgtacagactattgacaccagacggaccaaggttcgcactcagtttcaagataggaaaaatggtgatgttgagatcaggcactccaccagcccagcacttgaaaccctggtgcaaagttgttatggctggcaagcaacctggaccacacagggtcatagtcccaaaacaagacgcaggtttcctgagcaagaaagacaagacttatgccgtgcacatgcatccgtccatcggcaatttacctgtgaaacccgaagcagccgtgatttatgtcagtaattggagcaacagaaaccatcacatgttgcgtgaacgagacatcatgatgagcaagacaaaggagcaaatattcataatgcatgaattaaaaatagaaccgatctccaacgaatgggatcaagtgatcagaattgggggtccgttaagagccgaaatcatagatggcaaaattaacgccatgtggtgttgttggtacgggaacgcaaagaaggccatcaggttgttaaatgaaggtccgcttgacgatatttatgagattgcttgcttgtgggacaacaacaatttcgtcactatagggaacgacatcatccccaaaggcagcgagtggaggtcgatgttcgagaaaaagacagaaattgaaacgacaggccaggaaataaaacaactattggaacagatgggtgttgaaggagcggataaagttaagatagaaggtaaatacaagctaaaactccaggaactcgagttggtggagtattggttgaaccccaactatgaaatgctaacccccggaaagttaatcagttgcaaacatctctgtaaactcgaatggtcatctttcggtgcaggatacatgagttacatccagaaagaaaccgaacaataccaaatcgatgaacatgcggccgatcgattcgtgaattatgacgacatagcccagccgaaaaagcaggggcaaggcgacttagacgacaaaatgcaacaagccaatttggatcaagttactgccgcaattgacagtttgtcaacattgaacaatttgagttttaacgacgaatctgacgtgtttaccattgtcagtggagacgcagagcagaacgcattaatatacggatgctccacaacaactgaccctatcaacggggagattacaaggaccagcgtagacccaagaaccatgaactattgggacgacgagacagctatggttgacggaacaatcgagctgccatacaaaaatatcaaactacaagtatttgaagactttaaaggagtgacccaggaaaagaaatccaagctggcggactatccgagtcacagccagcctgcatacaccaaaagatacatggcagggacacaggcggtatcagacttatttgggaaaactctggagttgagacaagtggctcacgatccggtggcagacgccaagttgtttgcacaaacttatttcaaagctggatcattgaatgccttgcaagaagttggcctggatccatcagctatcaaagagtggttgcttgagcgaccggacagcgtgaagatagctgctgatgtgctggatctgctaagtggtggtttggacgtgttaggacttgacaaagtaaacgtccacatgaaattggaatcgagaatgaaggatcaggtgattcatttgaatgacttgctgaccatggcaggtgacaaccgcatgccggagactatcgaagagcaaagagtaagattgattgtttggcagaggaaggggatcgcagccatattctcaccgttcttcaagaagttgaaagacaacctcaaaaggtgcttgatcgacaaggtagtgtatgtggacggaatgactccacaacaaatcagttatttgttgaataaagttagcggggacgtgatgtttgcggaagatgatctggccaaacaagacaggcaaactgaccacactctactcgacaccgagatggaagtgtacaaactgctaggaggaaacacatcaatcatcaagttgtggaggaacgtgcataaccattggagagctaagggcgtgggagtgaaattcacaggagacgcaagtcgtcacaccgggcaagccacgacagctcttggcaatgccatagtgaacttgatggtcaaaaggagggtcgttgcggaacaagggaaccgattgaagttgatgatggtgctgggtgatgacaatataatactaacggaagggcccatcacggccagcgaaataacattaaacagtgccaggcatttcaacatgaagtcggaagccagtgttaacaatcacaacgggggattcttgcgaatgttaatttataaaaataatgtcaactccttggaatgcggtccagacatcattaggttacgcagacgctttgaagtgctgaacggcgtgcacgagagcaccgacgagaacgtgacaatgcgtgcgatgagctactgcatgatgctggggaacctcaaaccagtgcaagaattgatccggaaacataactggccaatcaaaccaagtaggtggtacgattaccaagccctgagcaatgggttggccatgaagtacaattgcaccagcgaagaagttgacgtggagttatccagattaatcgacatgatggatcgtagggaggtcaccgaggtttctaaactgatgttcacggggaaatcattctagaaaccccggagcaataaaacgtgtgtgtgtgtgtggg

SEQ ID NO: 907 - DNA, 16227 bp, Rhizoctonia solani endornavirus 5
  source 1..16227: mol_type = other DNA
ctttccctacacgagtttagtcgcttactctaccaatccttattccacaacctacacaactgataattcgcaaaacacaaacaatgacgggttacaaaacccgttacacaaatgtctggattcgcccgttgccaacatttgtttagttaatcacgggcagtgtagaatatttgattctacacaaacaaagaggattcacaaaattaaatgtgaagactcacaaaaacggttgtcattaacgcgacagcccatgaaaactgagcgacgagtacaacaactaaatagttatttgaacatcgatcaaacccgatcggcgcgtggccaattgtccctttgcggcaccgttagtcgacaaattgaacataggaagactcaagatgaccttatattggaagaactgcagttattcttccatgacgaagtagactacgaagaagtagtttatgaaccgctcgaacgcagagtgccgatcactctaggtgcccatgaccattgttggcaaagcgttcctttgacttggaggaagagcgccaaaagcccactcgactacacaaaggaatccatcgaagccgacagggcatcagcaattaaatggcaaaagaggcgcgaagaacaagctcgactgaaaccaggttatgtggatcctgtgggagatatgtcagacattgaagtaaaaggaatgttgaaagccatggcaaagatgatcagggtagatttcgtccgttcagagtccactttcgagtggaaggacgagccactgtggaatttgcaggtcgacagacgaccattacatatagtgcatgagtgtgaatctgactttgaccccgacgaagcattgacctatcaagagctgcacgatgcgttggaagcagagctgctggctgatgaagaagaattcgagatagaagaagaagagatcgctgcaaacgacgagatgttgacacagcttagagaggaacgcttatcagagctgcgtgttggcacgaaagaaatcaacagctttttggaagacaatggtatgtctggtagtgctgctttgcaagcaggaacagatgagtggaagacggcaatggaccatgacatgcttgccgtcagaggaatcttgtcccgtatgcgaacgaagattcataaggggtcggctggtctgactgattctgagataaagttgcttgagagagatcagtcacagtatgacatagtagccaagaaaggtttacccaatgagcatgctctattcgccacaagtaggaaactagcaatggaactgatgatcaagctagctggaaaaagacccgtcctcgatatcggaggtgatcctactatgcataagtatgcgaaagagagaactcacatcatgaggccaatattagatgcacaagatgtggccaggcaactcaccaaaccaaatttcgaaaatgagttggtaactatttgcaatcacagtgtgggtgcatgcacttgtgacattaaaggacacttcccagtgttggtcgactcgatatatgacatagagcccaccgcactattcagcttcatgcatcataacgacattgattctttcgcttactgtcatagtttcagacaggtggacttttctaaagcgcatggaagtctggcagatggtaaagcagtcttcaaaaagttcggaaatgagttggtcacggctttgccaggggaatcagtctcttacgtcaacaatttccagctgactgaggcatgggtcaattgcgatgtgtttttagcgcacaacacatggcgggtgtacaatgtcatgaattgtggcactcatgtcatccggctagcggtccgaacaccatacgacattaagttctattctaatgcattggtgacgaaacgatcagagaccataaaaatcaaagtgccggtcctcgacaatcacgtcgtgagcaaacttaagtgggttgaaaaagagttggacagtcaattgctaagaacattgctggatcgaaacatgaatgcaagcctcactttgaacactttgttagaatttagccactccgtagctttaaccaaagtcagtctacacgatcggtcttatagcctactacgcttggaccatgaacagtgtctatacagttcatgggtcgtatatttgtatgcaaagcgccgcattggatggttgaacgaaatcgttcatggccaagaagacaaagattcaatgaatttcctactcagcagtctgatcaacgtgggcttaccagccttacaagacttgttgatcccacaattgccagacttgggagtgggtgatatattgaaaactttaaagcaactcattgacagatcaattttgtccacagacaatcctgaatttaaagttttgtgggacaacctagatgatctgcgaggttccaccactgtaaaaccattagacataaggttaacacaaacaagtgcgtccgtgaaatgttcttgtgacttgcggactgaaacggatggtgattatatctgcagttgctgttctcgcaacaccaatgattataagtgtgaagactgcaaagatgctcccagaccattagaagaaggcgaagtggatgtcgtgaagatggaggttttggaagcaatcaagttatccatattggcagagcttaaatccacagattacactggaccggagaaaaccgacacagagagggtgccaaagaaacaaatcatcaaaactagagaaaccaaaggccctaccgatgtgcagccggagcaaattgaagttgagaaacgtggtgtggacaagatgctcagggattatttacgagaaaagaaaacttacagttcggccctgacacatcatacccccgcaccaaagaaacatgacacgagccgcaccaaagtgttgtcagacaactcccattatcaccaatgcccaaattgtggttcctactatcatgaagagatgaaggcctgcgacagtatgttgcgaccatcagtggcagcttgtcccaagtgcaattcactgagcaccaacggattactgacagaggaggaattcgaaaatcctcccttagtaggttccactctacaggctcaagaaatcaagctcagtcacaacgaagaattacccgaagatttgatgaactacgctgaactgataggacatgattatttacaagcagtggtgcaaggtgacaaattctttgagagattattagaaattgagaccagaccaaacaataccaaagtgtggttcgcaccctcaggtgtttggaggttccaaaacaacaagcagttcaaggtgagaaaggtcaacaaagtggtcaactcagatcagttatgtggttattacgctctgagaaccgtatatgaaaagaccagcctgtcagctctgacagccacttctaggaaggatgggaattggtcatcattagacttgataacttatgcagccaaagagggcttcaatttgatcgtacacactgacaaagaagtatacgtccataccgtagattctggaacgcatggcaccatactacatagtgaaactggggaaggccactggaacaatggtgagttgattcaactggaacatttgccttgcgtgccagtgttcagccagtccgcaactctagcagaagcatcctcaatgtgccctgattttgattggggcttaaacccagcagacagattgaaagctttgactcccatgattgtgaccctttgtggagacgctttgtcagctcgagacatgacagacagactgaagttggagaacattggtggccaatggtggctgtccaataaccgacggcaaaaacatgatttgcgcaagggattcttccatctagaggtttcagaagagaggcatgagatctattccctattgaatgaagtcaccaaggcacaactcaaacaaccattgttggagactatagatattgcacatgacgattactttaacaagagcaaaattttgagcatagcagctagactgggtgtgtggcgttatattagcagtttggcaaacgcagacaaaggttgggtgaatggaaaggcagaatctagccttagtgcaaccaggatacacataaaatcccacaaacttaaaactttggacgtcatcttagtgcgcaccaaatctggcaccgttgagagggttatcttgagggcaaccagggaatacgtagttgtgaggccactccccaccgtgggacaggtaagcttgtacatacccaaatcatccattgggtccgtattgagaaggtttgttgcaattgagcaatgcaaattcagtggagacatgcgcagtttcttggaaaataattgtacggcttattacggagtatttggttgtggaaagagcacggagatggcagaggcaagcaccaaggaagatgtcagttcgcttgcgttcaccactggtgccctgaacagcttgcgaaacaaaaacacaaaagggcagatcttgagtgttgaagcggcgatgtctgcatcattgcggccagtcatccaaatagatgaagccacgggaatgactccactagacatttggttgcttgtgagcgatgacacaaaggctgtacatttttatggggacgtgggacagataggcctgcgtgacttagactggaaactgcaaggaaataggactctattacaggctatggcattgtgcaaacaacggactaccaattacaagactaaacgagtcggtggaaaactaggtaagttgttgcaaaacatcaatccaaagctagaattggcggaacacgaaacagactacaaagcgtacagcatgtctgagatggatgtcgaacaaattgacagaataattgaagaggaaaatatcacgacgctattcttcttctatgaagctgccaaaaatcattggctgaaatatacacagttgaacatcaacagcatcaccgtgtacaaagtgcatgcggaccaaggagcggaaggaaagaacgtaatggtcatccaaaaccccggaagctactccgatggtgctattcacttggacccgcaatttttgtggaccgcatccactagggcaagagagaaattagtgtgggtctctgttgctctgtacactaaggataccagtttgctgtctatactgaggtctgacgcgaatttcaacatcccgacaggcggcgcttaccaagaattcgctattattgatgagataacagagaaagtagaaaagcatagcacattgaatgatggaccagaggaaatagtagacgtgctaatgaaattgctcagtcatgctattagtacgagcttctatcaggaagcaggatgcagttacacgtacacaaaccacgtgctgagcgtaattgtgaccttcgaagatgagccagcctacttagtgaagttgaagccattagaatggttggacatgggcaagagagtggaagggctagaaatcatgaaattcaacaaaccagtcatggacatactaaatataggaaaggtgagcaaagaagactatcacgcagtctgtgcttcgatcgaaccaattttgtccggtacccagaaactcttaaaagagttggatgaactaactaacctagcaatgccacttaccgaattcttggacacaatcgggtacgtttcagaagaaacgaagcacctcaaaacgaagatgcacgaagctctggatgacttaggttacacgaagttgttcgtcaattacgatttgggcacaatttgtggtttagacaaggaaagagacttgcaccacatcaagtgggaaccaacagaattatcaataaatgatgttacggcaacgttcactagaaaatacggatcactagatcaattccaaactaattacctgacgaagggcttcgaagtgtacggagatgcagacgttgacgatcttcagcttctcagttggggcaagtgcgagatcactctccctggcatcacttattacaacctactaaccccacccgaaaagagtctccaaccaactttgtatcacatgtgcaggagtgaaactaccacagagtgggtgatgttgaggttgacaccagctaagttcgattttgaaaccattaacatcaattctgtcataatgaacaggcacaggcagatgttcaacttacggcagagtgaattgttgaccaaactggcatttgctctgcaagatttcacaggcaatcagatacccacgtcgattgtggatggtgactgtctctgggacggcttgcccagtgaccctgctagaatcattaaaaacacattgagatccaagggactcaagtttaacatgatacacgaaaaagagactagattggaagcctacttcggtgtgggtttcatgtcaatgaaagcgctgaccgtgtggtttgatgaggacaatatgcctgtcaatttcgaattgcatgcaggagccaaagctttgagtggcgcatttaacatcaacggcacagagtggctctccgacctactacagcaattcaaagttgattcagtgctaagaactatcactgaacactccactgtcattgtagacagatcggtagaagtgagggaaccaataccagttccagacctgatcataactgacgcggccaataatatgatcggcaggttgggtccatcatctggaaacatcccagcagtgttaggggataaacacgggtggttcacaccagtggagagtttggatgaactagaggccctggacacaaacgaccacaacgagccggccaaaccagtgttgccccaacgaactagccgattcgtttggccaccacctcccacgaccccaagtaaagcttctgtaaattatcagacggcaaggccccttgaagattacgacacaagtttgcaggacgtggtcatgggtgaagcgctcacacaacctaaagtagttctgtaccctgtcgaactggaagaatctatggacgagcagtcaagactagaaacacaagaagggaggttgcaaaagagggcacaggctttaattgaagccctagaagaagtagtgactggtcaagtgccaactgaacctagagtgatactcaatcctgtggatacggaaggaccaacactcgtgcctgaacatgaccaaacagtgtattcacatcgagcatttattgaacaagtgttagaattcatcaaatggttacgtgacacggggttgtacacagaagaaacacagacgacagaggcagcacaacaacaacaacggactgcgcgtccagcaccaactgcacgagagtatctcgatgctcacagcaggacagtgacactgttgagccaaactcctattctcaatgccactttcaggatagtggtgagacgtctaaggcagctaggtcgtagtgttgctgaaatggtcaacgtagggattactcacacccaaactcaaggagcgtcagaatctttcttggcatcagctagctttgtcatgataacggaattgataactaatcacattttgactagctggcaagaggcagcgacgaatgctccgactgtatactacttcgacgctaagggcaaagtcaagcgcactacgggcagagctgatcctgaaccagcgcccgatcacatcgagctgctgcaacaaatgcatgaacgacaactagtcttggtacacccacaaatgttctttgtcctagaatctaaggggaagaataattggatcagtaaactcctgaaaaccaacccatgggtcgggaaaaactacaagattgagaaagtggaaggagatcgtacgatcatacaatttgcacctgactggaagacaaaaactttgattagatccgtagctatgatggcacaaatgacacaagtgtgtggaattctgggcttaaccgtcaaatacaaagacagcacattccatctgacgaccaaccaaggatgcaacatgttcgctaacctagaggttgaaacagactcaggtccagtggtgacattgagtagcatgtacggaaaaattatatgtcgtaaggccacgatctatcatgaacatgaagatctagtgaatgcatgtgagatgttgggcatacagatacccttcaagcacatacacactcacaacccaatgactgggcagtggtatgacaaccgcccatcacacctgatggtgcatggcattgatttgtacaatggcctgaacaattgggccgttctgtccgacagactgaacgctttgtatacttcgtggggactgattttatatgccgctatggtacgtgataatcgtttggccaccatgttggccgagcgcaacgatagatttactacgatgacctttgccagggaaagaaatcgtgaaagattcaggaaaatagaggatttcgctactgtatacaatttggcagtttctgctggtgacaagtatgcattcgggttccaagacctcagcaattcatggttcttttacagatcactcgacgaagccactaaccacagggacgtgaacacgaagctcggcacagcattgatccatgatcacatcgtctacatcttggatggtagttacattccggtggcgccatacagtgattggcatctagtcgttttggacttggacgcgtttgtcaagaagacatacgaccttgaaatagaacggattggagccctaactcctaaaatagttacagatttgttcaaatgggcgtactctggtcgaggaaacccgtttgacaatttgatcattccgttcgacaaacacaggaccaaccaaactacagtattcaaacacatacaaaagtacgcaaacaaactgaacattgctacggtgaaagctagatcgaaagtgctctacgtgacccagaacacaaccaagtatttgatgagagacaagtacattctggaagcagcaaacctgcaggaacaagtggacagtactatgggaggcgatgcgctggacgcaatcgacagcatgctattccatctagcagatacagtgttccgttctcaatacaccatcgtgtcttcaagcatgggcgctatagcagttacatcaaaattgaactacccaataatccacggcctcagcaaccactccattgaccgttggggcaaaacatctagagttgccatcccgtacctaacctccttgtgtgtgacgttgtcggagagttctaatgaaaacgcaaggatcgttggccagtggttagacactgagttgaaaaagtcgtatccagcttggcagatgaacaccaatgtaatgtcaactttcaatgtgatatccgccagccaatgcggagtgtctattcccaccctcattgacagaatgcccaacaacagcatgtgcataatcgcattcccgaagttaggcgatcacctcacacattccaccatgagacaaggtagcgaagtggttgtaaattacaatgatgttgacttgcaaatctctgttcatcccgataacataaagatgatgaacgaattgcaattagaaggcactcaactaaagatcgtgtcagacatgatggggcactatttcatagaggtggtgaagacggacaagccgacacggctcaacaaatacttgagcgatccagaagtccattctgctaggcttgtgcactatacgttaccaaaattagacacgaccatggtcaagtggctagagggtaagccaatgagtctttgtgacgtttatgtccccgagaacgtcgacaatttgttatgtttgagagctcaaagaccagggtgcacttgggaagatcaaaaacaatacgccagaaccctaaggcaaacgaccatatacaatacaagaagaacagcgaacctgtacaaatccacttcggatgaaatgttaatctgggcggctgttacatacttgcatgtacaacacaccgtaaacccaatatacaacattagccaaacgaagttcgctgatgaacacagaaaaatgggcctatcaagtatcctgtatcacaggttaaaagacataatgggtgctgtgactatggaagtgacctcaagactaggactaaacaagagttggttagacttggccatgcaactaaacgacctaatcgaagacgtctccggcaataacaaaataggtgatatactactattggccaagaagtatcaagtgagaagagtagtgcatttgagggatataactaggtcagaagatcaaacctcttggtacaccaacggattcaaagggcagttaagagcccccaaaaccaatcgcccaagtaaattgcctgaagaaaccaatcaaacactgctaccaaatgtcgccatcaaacagacggtgtttagtgaagtagtggtcatttcaggttcaggagtgttcaaacagaccctagtggacatagccaactctttggagttaccaactgtggaatgtgactctcacttcagttctagtaggcggatcagagctcaagacgtggcggttctactcaaaaacatatcggacaggaaaaggacgctagcagcatatgacgtgatatgctgcgctgactcagattgggcaacaatagcagcagcaattcttaccaaaaagaaattgcacgtgctgtatactatggaaccatccttgattgctaagaggatgcttgatgatatcacatattacactagtccattcgaagatgaacacataaacggcaacacagagcgaattttgaacagcttgcgcaactggatacctagcctcgattttgaaacctggccgataaagaagaccatgttcatagaaagctccttggcacatctgattaacgatgaaactgtgacagaaaacatgaggacatatgagtccagcataaccaccggggctggacacggatctactctcactcatgacaacgccatgacctactccgaatcaatcaaattggacttgtgggacctggaaagttggattagtgggttagagaattccagctgtcatattacttctaacctgatcagtctagggatttgtttgaaaaatggtataccttgttatgtcagtggaccaatacatcaattgccctcatgtttcacactgccagacactgactctaagcgttatgagcagcgtcatttgagttcaatgcggcaattaaatgacagaccgagtaaaacgcatattgagactgtaatagaagctacgttgagtagagtggaccggctgcacagtggggtccagattagttcagcaaccatgcccaatttaatgccaattagaatgagcattccagaacgtgaggatgacacacactcattgggttacgataagactgcagggcgtctcatgtctgtgaccgcagccatagtttgtttgacagaaggaccagtattgttcaacaacagttggctagacgtagatgaaatcataagtttagtcgaagctcaacgcttcaacgcacttgtaactttagtggtgaacgaaagcggacatgtgttggtaatgtacaaaaggcaagggtctatgagttggacaatcaaagaagtggtagagcaattgaactctagtgccgaagcggatgaattctcatggttaaccaagtttaagccaggcatgtacacaaccacgcacctgccagttttagatttacgttactctggagaagttaggttcaaagacccacttgaacacttgtattctaacaacaatcaggaaggacaaacacctcagagagtgagaaccatcacaaacgtcatgtccacggcgaacattttgggatcagtgggtggtccaggaagtgcagtcacaaaggagacgacggcactaacaacagcactagagtcgccagaagtactgtttaatacaaaagcacacgacggttctgaatccgaggaaactgttgaatcagagaggactgcccatgataccacagagccaccggagagtgcccctgtcgcgcaagagcagccacctgtagtgagtcagcaggtcccattgactgaacaaaccactgatgaggcagaaaacctcttgcttgaacaattgtttgacaatttagaaaacgaagtcggtgcattagtcgcaactttttcgagcttcgacctggctgacatggaatcaatgaaattcgacaatggagagataattaagcatactaaccactattcacccagtgatggcatgtgttggaagaaagctgtgtcatttttgggtattgaattgccaggcaatgaagatggaatgagcccagaaaacttgatgagtttactgacacgtgcggagaagacctttgcagttaaagaaggcaatgtgttgcacattttccacgatagtacaatcccactaacaagccaagaatacaagtgcataagtctggaattagccgacgtggctggactgcactggcaggtcggagtctcagtgttcagggtggtagatgctgaccaacggataggaagtgggaaagtcatcatagacgtgaactgctccaaagctggaaaagggtatgaattgaaaggtcgaacagaaggaccatgtgttgaccacacgcatgcaccattattggacaatttaacctccttactaaataatcagtttgtgaaaaccagtctattctcaaaatcacacatggagttcaatagcctaatgaccaagcacagcaccctcaaattcagattcgagacacaaaccaacccagtgatgttcatgaacatggaagctaggtacgatgggttggtctccaacacaacagggttcaagaacctgcgaggtgtattagtagtaactcacaatggagtgttcaaaggtgtcgcattaaaccaagattcaaaacaagtcattttcattgctcatgatgttaaaagtggagcacaaatggggatcaacaacagtagccggagcaacacccggatgataatagatgtgagggcaccgattggcacgtacgccaaaagaagcaaaattaacatcacagcagaggtgatgggagttgccgacttgactttacctctgaacaaacaaacggcaatatttttgaaaatgccagctgggagtcgtattaagcagatcggggacaaagcaaatctgattgtggcgcattatgacaactaccaacatcacaagttagaggggcgtagagacgagagggaaatcattgaagacacactcgagagaggctattcagttgaatgccagcccgcatggatgtggccgttgatagtgaagcaggccacagaatacgtgaggccccaaatcaagtcaggcagaccgataataacatttagctgtaaacatattctggccaacacatacgccagggctagaaaccttgactgggatgaaagtgatagtttaattaattcggtgagcatcagccgagagatcgtggaagacagcgttgaacagatctcgcatcaagttgacgtttcaagactgttgatgcacttatcagatggagccgaagtgctgccggtcacaaaccattattatggtgaagaagttgttggtcacccagaacgaccatatcgtggcacatacacgataagcgaaccaacagaattcaccaaccctgcagacgtaatcaatggggatcatgttttgatgtccgatttggaaccctatttggaggtcctcaacgtcaaatattcaaccgaattcgaactgacgaaattaggtctatacgccaattgttcagaatccaccatggagtacattctaagcagctctataggatatcaaaccgatgagtccagtgagtatgacattttcataccaatctttgatgagtacgatgacaagggtgtctacagtttcttattgcaggtctcggcctcttggttcttctcaacacacaaatatggagaggtcatgacaggaagggatttggaaatgtatttgtgccatcatgactcttacttcaaccggaggacgaggtatggtcaagacaaaattttacgtcaagcagaattgtacagcattcacagcaccctaaacatccgagttcctgatgcgttagagttctatcaacctggagaggactttgaattttcaaacggatccatgggttactatgtcaaaagatatggtgaacaaggaggcagagcagaaggggaaaatgttgtagagttacaagaggaagaccgggacatgtggtttttggatcgcgggaacgctgacttgagtattagacaggttgggcacctggcgcccagagctatcgtagctttagccagcggaggcgggaagaccacgctggtgaagttgtttcctcttttattccatgatcctgatgcatcagtgatcttacaactcattgctgagccggaagaaatgactatggacgattggcgattacgaaacgaacaagtcaggagacaactgtatgcggatcgagcaaacatagctggaaaagtattgatggtgtggcacccagaaaacgttccggaaatgtggtcgcatgtgaaaatggtcattataacgattgatgacaagagtgggctacgcatgtttgacttgaataaccaatcgttgttagattactgtaaacaatatccacgcacggaacactggcacatccaacgctctgaagtgccagataaattaatcgacaggttttacccagaatacaagtccagggacgcttccatccaggcgattaatgttttcaacgctctatgtttggaagacgtgacctatcagagcaacgtcatttcagacaaaccgcttactaaactgttcctaccatacgtagcagccactgctacgagcgtggaggttgcagaaggagttctgggggaaccagaacaagcaaacattcaatcaatggatttcttcaccacgacagacaagacagactggctggaggtaagattgccacaaacagacatgaggataaaatccaaagaagtttttggttcatatggcgtcgaaaagaaaacaatattgaccaaatacccagtgtggagtagacctgtgttcaccaaagtgcaatttgccgtcttgaattccatcacgaccagatttggacaagtgcaggtactacgaaaaagacagatagattgtctgcaccacatagaaaaaatgaagagagcttattttgtgccaacatgtgagcaattgatttctaagttcaagaagcggccattaaaaattgacgccaaggagacacaaaaatggcttgcaaaacgacctgacaggaacaaggtgactaacgaccttttggaaattttagaagaaggagttggtgttcacagagtcaatgcgattaagattcatgcaaaactagagtccttgttgaaagaagaccctataactatgccagaagagcaaaaagtgaggttgatagcatggcaaaggtatggtctggcggctatttacagcccagtgttcttggaagctaaaaagagattaaaacagttgctgaaagatacagtcatttacgcagatggctacaccgcaaatgaattgtcagccaggttgcgccaggtgtcaggcaccactcgattctttgaatcagatttagccaagcaagacaggcaaaccgacaatgaaatgttggatctagagttccatgtttatgacatgttaggtgtttcaaatgaagtactaagctcctggagggcggtgcacaggaactggcgctggaagtcagatttacacagtggttatagagatgcgatgcgcctgactggtcaggccaccacggccctaggcaatctaatagtcaatatggccgttcacactgacattgtgctagaaaacatgtcaaaaatattcctgattttgatgttgggagatgacaatatgtttttgacgtcagctttcttagatttgattgggtttaaaagggacacagaagagctgtttaacatggaagtcacaccagacagccacacgacacacggcacttttattcaactcattgcatacaaaactcctgagggaacttgtgagatggcaccagactgggtcaggttggccagacggtacgaggtcactaatggagcatcggaatcgacgccggataatttgcacgcaagagcgatgtcatactgcatgatgttaggagctattccagaggtcaacgctttagtggcgaggaaaaactggccaataaaaccatttcaatggtacgagccaggccaagcgaaaatagccatggctgcaaaacacaacacaaccacagcagaaattgagattaggttgaaacacttgatcaacatgatggaactggatgcaggccacgaagtagcttgggaaattcccttgccactaacttcaaaacttgccgccaggcaagacaaaaagattaactaagtaacgggagggaaaagtaacccctcattgtttgtgttttgcgaattatcagttgtgtaggttgtggaataagg

SEQ ID NO: 908 - DNA, 15273 bp, Rhizoctonia solani endornavirus 6
  source 1..15273: mol_type = other DNA
aacctaaatcaccaaatcttccaacatgacatcaacgattattatgggggaaagaaataaatgcagtggcgcagctgcatgtccattattggacaaacaaactgcgcacttacgtaacagcgaaacaaagagtggttgctttaaaccattcaccgcctctgttacgattaatgggacaacggagttatctgttgtttccaacggcggaataacacacagccaattttcattgttcacctcgatggaacaagagtctttcgcatttgactttgagacagatatgggactcgttaaattatttagtgacgttaactggactgatatgggtgtgatattcatcggaactaaaatgatttttgactgggggttgatcatgtacagatatcaagacaacaaacagttaacaaaaaaggaattgctcgtacgcttgacatctgatgcaggcggtaagtcgctaagggaagcaactctattgcacatgcaaaattcccttgaattgctcaatgcatccacccaggcgacgaaatgcgtagagcttccaacagttagtaagccatgtgtggcacaaactgactcttacgtcaacaaccatgtctccgtttcaacgggcaaagtctacggattaattaattccctacctatgaaatttaggatgaagaaaaagatgtccaagagatacttcttgtacaagtatcgtgccatgcaacaagtcaaacctactccaaagaccgacgacgttgaagtggaagatcaaattggagtatcagccacaactgacacaaacgttacaatcattgacccaatcacaaccgtcaattacgagatcctatggcgacaacctgtcattaatgagcacctcgtcggcaccaaggacaattgcttggttaaacataacaatatcatcaagattactgtcgaagctgacccagatgacatcgttgtaggtggaatgggcgattgctggactagaattccagtgtttaaattagtcatccccgatgctgaagaagaaggtgcttggactggaacggtagaggagcatgttgctctcagggaaatgcacaagaaaaagaagtctttgccaagtgaatatgctatggacattgacgtgcgggactatcctggcatggaagaaatggaagatgaggacttcgaagacgactcagatttcgatgacgaatgggatgacagcgacgacgacgaatctgaagtccatttcgaggaaggtgacatggtaagattccagacggatgacatgttcttcgactatcctgcgaacgagccaatgaatgcttacaccctaattgaaatcctagaatggatgtatgaagaagaagaccgacattcttcactatatctcaagacgccgaactggcgattcatagtttggaatgggatgatacatttggaaaacaatatgttctcatcaagttacaagtacactatcaatgagaaccaccctcaaaaattcacatcattgcagggcgctttagagcagcttaaagatttggtcgctgaaaatgaaacaaccactatatcactcaaagtcggtgctccaaacatcagaggtatgctcagcaggactgacaatgaagttatcgacgcgctcggtgacatgtatagcaacaaatacgttgatattgtagacaaccatgatttaagagtcgtgagaaggttctacgcagctcaccaaaagagtatcctgttaacagtccaaccgtcaaaaacggtgaaagaccactttagcgggttaacaaacataactatattgacacgcaacgacctcacgattgatgctgatttcacattctgtcgtgaattagcaatgttcgttgcatacaccatggtggacccgatggacttctcgtcagacgacacggtgaccaaattcctacaaacccaacctgaagctaaattgccttctgttgacgccaagactcacatatgtactgaattgacctccaacatgctcgattcgcatgacatagtgtacgttattgctccaactctgctaggaacctcatacggtgagttgaaactggaagtcggaaattacatcacacacggaaatctcgtcgaatacttcccaaagaactcaacgctcacacacacaattaccggcataaacccaattttacaaggtggacgcgttgcgaatgtaaatgggcttaaagtttattgcttggcaacgcatatggttggcccattttgtatatacgctttaacaacaatagaacacattaacatctatccggagcaaaacaagaccaggaaattcgaagtacctatcttcgactcgtggctattcagcgaagtaggcgttgacaatcttaagttcgagatgaccgaagtcaatcaagaattgttgaacagactattaaacaggaacattaccaacacagtttccgatgaaaagatggtagagtacataatggcgcttagttggtacagctataacaagcgcggagtggagatagccaatgtcaaagtgacgcctgaaatggctaaaacacacttgtacctagctaaaggactgttgatgcgtgaagaactttctgagcaattaacccaagcagcactcaccaaaggtagcatttcaagaatagcaatcgcaacattatcagctatgctccgcgtcaaatcgtttactctgggggaaactaccacgaacatcattcaatgggtagaatcactgttcaacacaacacaagttcttgacagcgctaacaaagctgtacaattctgggacacactagacatatggaggtcctcgtcaactgaattggtgcacggaaatcctagcatcactggctgcagtcaccacgcgagttgtgaattgactgaaaccggacatgcatgcttgcattgcggctttgaaaccgctgataaacagactttgtattgcgaatgttgctacgacacggaacacgactgcaagcacgactgcgacgtagtgcatgtgggaaggaatgtgtgcaagtgctgcaaaaagaatacagaaaacgaaccaagtgtcacaacgaaaacagtgtactgtgactgttgcctactcaaacatacagaaacagtgtctgaagagcagtcgaagcgcgagagtgacgaacccaaaacaagaccatccaaaccagttcgccacgaggaatcgggaccgggagagcacaaagagtcaatggctaagccggccgtccaaccaggaatttccaaaccatataagaaaggacacacacacacctgcgaaaaatgtcgcgcaagtttcgcctgcgagtgctctaacgcccttgaaaacgacgtaaggcaaagaccaaaggacagttgtccaatgtgcgaaggcaacaaaacaaacaagttactgtattctacaatactgcaaactggtgagacagtcttccagcctctgaccacccaacaatatttgactagacttacaccaaacgcagttgtaacactgacgaatccagaattggctttggaaactcataacgtcgactttacaacaaggagaacaagcggcataccattcttgactaaagacatgtactcaaattctgaattcgagtttacgaatattaaaactgctggaccagcagattgcgggtttgaggctgtgcaacactacttaactactatggttacggagacacacatatttaactcaatcaaaaagattgagaacttcacagctgacgatataaagaaattattccgtgaaaatagaatgaatctactcctcgtcacttcaactacggaagtggtcaggtgcaaacagaacgatgaatttgccgttataatgcacgcaatggctaatggggagaacatcaatcattggtatgtcgcggatgccaagcacgccagtaaggtcgtgccatatggatcaattcacaacactcgctcagagcacgaaaaacaagccaaacgtatcttcagcaaatcttattctgaattaacaagggaacaacaacttaacttgtcttaccatttagcttccgcaactgagatagtctttaaaggatcattgccgttcgttaaactagtaggggacactatgtcaaactgtgaccaaccaacgaggtatggtgacattaaagttaaagtccataacaaactaattgacctggttgaattaatgctacaagcgaaaaagactgggaagattgacgacaggctgagcgaacctctaataactgacagcaccacgccgatcgaagagaaactgttgggcgaagccagggcagcactctacgacatagccataatgtggaccaaaccgcaacagaattgcagagtaaaaatcgtcagcactactttctatggtgggaccaattgcatgtatctacctggaattaaacgcggagacatgatttcatataactataaaggtgttattacttcaaacatagttgaaccgacccgcgagggaatggtcgcagtagatcgccagacagcaaacgacgttaccgtctaccttccaaaagcaagtttatcctccttgctcatgaagtttgccaccatcaataaagcattagttggtgacaaccatgacaaaaatgccaacgcgaggtttatacattactcaggccctggaggtgcaggtaagacaacagcagttgtagagaaaatggttgaagcggtaaacgatgatccagaaaccaagatagtcgcaacagctatgtcgcgagaagcaactgacactttgcgtacacgactcttcgccgtaattccgcaatacaacttgacagtggaaacattcgagagaatcagttcatttgacaatcttaagtgtgattatttgataattgatgaagctacgatgatacacgactggcagttccatgcgatgccagtgaccgcgaaaaatgtcattctaatcggtgatactggacaaattggagccgaagacttcagcttgataccgggtaggaggccagtaatatcagtcatggatagatatgaggatattggcgaacgcgtggaatcttgggaagtcaagcgatacggcaatccgctagctgaggaactaagccgccatccggccctacgcaaactacaaggcaacaaggatatgaagaccgctgttaatctatactggaatacaaacctagtgggtagtcaaatactagaagcctttgcgcattgcgatgttgtaatagtattttacaatgatcatgtcgatttaatcaagaaagctctatccaatagcaatattgttgtaacgactgcggccaagtaccaaagcaaagaagcagatcacgtgggtgtcctacaatcaccaataatccgcaatcaagtgccacaagacggtgatatgcatttaaacttccaatacacttatagtgccgcgacgcgtgctaggaaatcactttcatggttatctgtggcatgccacaacactggagtaccactggccactagacttggtattcgtgttgggtccttctacaacctactcgggaagacgacaataagtgacgttaagtgggattggaatatgcaatacgaaacagtagagcaagaagaagtcgacctaccgcccatgttacctgacagacagaaagtcgtcgaaaaactggttggtgccataacgctggtacacaacggaatagaaacagtaacaatgaacgcacacgataggatctgcagagcgcttggactagatatcagcggtaagacactgccaaatgcggcgacgatcgctcgaatcaaagccaactctacccaaccgccaagaattttctttgcgctcgacaatagcccatggataacacctgacccttacactggtgcacgtgactggatggatcacataggtgttgtatacgagtatgagtaccatggagtatacgtcaaattattttataactacaattattacggatacagctgtaaaatctggaccgtggaaaatccgactatcgtgcctgagtactgtatgatcgacagcgcgcttgatccattgctacttgcaaacagaatcaggcactatgaaacaactggtaaatacatgtcaaacccacccatttccacagtatcgtgttgggctatagtgacagacgttttcgaactaggtggaactaccagaagcttaacatattgccagaggaccaaagcaattgtgccctacacactcagatacatttatcccaagaacaacgagactcttgagcgatattcaaataatctcaaactcaatgcaactaagatctgcaacatgtataacacaaatgcagtctcgtacagcgacatatcgagacaggtcgttagagcatgtgcattagcatgtggatttaaagaaatgtctcagtcttctgaaggtacaacgtacgaggtgcaggcgaaacatcctaaattcgcacaggttggggtgcgggttgttaacaacgtaatgcaagtaaataatccaaatgctccgatctgtcagatgcttgctctatgtgtgatgaactctaattatgtgctcaaaataatgggtaacatacacaaaccaaggatgcccgtcatttcaaatacgaacttacaactcgaacgtgcgcgcgcgctagctgctctcaatgacctaactttgcccgttgatgcagtcgatgacataagccggctcgattaccaagcgttcgtgacagatttcttagaggtcgggcgtgagcggaactcaacactcaacattgaaatgaccaaagcaggggagaattattcattcaaaatgtcagcaacggtgggcttcataacggggtcacggaccgtagttatgaaacccgacctcacagtattcagcacagagctgggtagaacacgcacagcacagttcagacgatcactgcatgcatactcttacggaccgccgggtagtttcgagaccggaaacattaaaatgaaattatcaaaatttgctacaaacaggatcagagtgttggcgtacatagtcaaagtcttccacgcaaacaatgaagagttccagcccagagtcggcacttattggctcgacatcaaaacgagctacactggatgcgctgcttgcactgccttatactttacactagatggacacaaaacgacagtcactgcggactacgactttaggccacgatacgtatttggcccgcacgctgacattattaaggaattactcgaagaacctggcaaatgtaggttatacccgcctgagtttgaggacaagaattttgggttggccattctaaccgaacgggtgtatggctggtggaagcagatgttcactaaactatcgtacatgcagtacatgcgtgacaacaaatacaacaacatcatcactatcaacaggattagggaaacgttggggaaaaacgtggctaacgtagaatatgatgacatgaccaattatcccttctggaaccaacgatgcacccaattgtctgtaataattgacggcaaacgcgaaattattgacaatcctggactacacactaggcaacatttcacaaaaatggattacattcttgagtcgctcgcaaatttgaacaaagcccagcatggtaacaagatcagcagaataatatcgatggtgtacgtgagcaatattggggctctcgagcgaattgccggaatgcaagaatctatagcatggcacaaggcgaacaagactgccacagccaacacactcgcttctaagtcaacgaaacaactagttaaagcactcaaatatgaggaggaagtccatcccgtcccacataaagtatatgaatacgccaaagagaagtacggctatcaatcactaatgtcaaacaacgctgaaaccattgccgactacgcacaacaagcaaccgatgtcgtgatgtgtgctgggttggttggacgcaactcaatgaaagtggcttattacggaaactgtccgtacataacgttattgatgccaagcgtaagtatggttgagaaatacaaccaaaactacgatatactgcaaacaaaactacagattccaacgatgcttaaaatgtgtgaaactttccttagtcatttgccggccgatgacgagagatattcatttgtaagcaacctaaagaccaaatacagcgttaaaatctcagacgcagacgtagcatattgttccccagccatactcaaaggatcaaactatgaaatccttgacagacttaaagaactaatggcaaaccattctaaggtctacatcttcttaggtaggaaggtagatgagaacgcagacaactgctactacagagtcgatgaaagcaataacattctagcaacaggtaaatggattgagcattgtatacacaatggtaataacatcatgccagggtttaaattacatattgccaacatgttgccaacaggaaacttgctgaccatcagtagcaacaactgggtagacaaaccaatgatcggaaaatcgttccaaatcgtcaaattgcctttgctttttactaatccatccaaaataatcaacaaatcgacgctatttgactttgttgagtatgcagtagatgttgcgttctacaacaacatggaacgtcgagcaatcaacaacgcaacactcaaagatctcaaagtccaagctcgcacaatggtaaatgtaggccagtttactactgcaaacgtagcatcgaagtacaaagtgaacgttgcaacggccgcacaaacggccctatttgcttacattgctgcacagaaccttaataggaaatacgcactcacagggatgcttgaccaagaaagaccagtgagtagtttgttcaagttagcaggacttaaggcgatcactgacatgctaggcgacagtggtgaccaactcaattacgacaatttactagagttaatgacgaactatctgcctatcaatgacgtatacaacgtcatcattcagactgtcgagaatctcaaagcactgtcgatcaatccaaaggccaattacagatgcatcaaaacaactcaaggacaagtaacagtaccaaaaatgaaaccaacgagcgataagtacgattgcaataatgttgtgacttatgaccaaaagtgctccacttgtgtcgaccgaccagagttaactgatactatcaaatccatcggtttggaatacatggacgatccacgagccgttctagttaaatctgccaggtgtgaacacaaaggaattgctatagttgactctgataacaaagatgctcttactcataaagagcagttattcgtagcacacccaacactcgacttagccggacatgcgttcgcacatataactgcaaacaaagccggttactatgacgaaaactttgaatgggcagaactcagagctcagaacattcacttgccatactatgaatcatgtgtttataacgaatgtaggcttgattttacagcactagacactctcaacgtacgtgtcgggactataatatacaatagttcagactgtataatcactatatcgttaaaggcttatcaaaacaacggagaatacatacgattcggaaataacaacgtcgtcatggtggctgacccaagtggcgaggagaaaataatccggacaggcagacgcagcaaccaaagcaacatcaaagtaagtcttgtaactaacgtgagtcaaaagatcagtttctttagcatgtcagacatgtgctacatcatggaagacgctgaagaagtcgtcagaggagttgcacaacaatgccatcatacatggaatgaattgcagagcgttgaattcacaaagttaagttctggtgaatacaaatcgagatataacaacaccttctggaagttgttagtagggcacaacagatggggcgtcaacattaacccgctacacggaaatatgcacttgttgtcgaacacagtcaaagaacctggagcacttaacattgatgagttgaaattcatacaccaactgcaacacactttacaagttggcctagacaatcttcttgtcgaccattcaggaagacgcatcaagtctttccagaataaattcgtgcacatatacgcactggacaaaaacatcgaccgaactgtaatgcatgcaactgacgataccgatgtgacgttaattatttgcaacgatggataccaagccaagaaaacacctgtccacgtcaatctaatcagagtgcctgcggacgcagtaggcaggtacaacgcagcaatgagattaatcgtcggattattagctaaggcagcttacacgcaattccacgaaggccaaccgcacatcgtgagttatttctatgaaatgttcgcgtacaagctagccaagaagaccaagtcaggtgtaagtttatcatgggcaaggaatttcggatgtcctataggacacacagtctggagagggatgccaacaggagaaaactggtacaagataatgagaacaagtgttgcctatggtggtaagtacggcagtgacgaaatccattacgcaatctggccagtcgacacttggtacgtgtcaccgtatagctatctcaagtcctatagcattggatctatcattgatgcaggtcgtaacttgacgaaagtggcaattccagacaatctcactgcgtacggaataacttacgaggaatactcaaaattcgacaacaaatacggtatggaagcgatgccgactatgtatcgcaatttcgacaagcgatggaatagtaaacagggtgggagattagttgacactacaacaccaccactgaactacttccgcaacactataagcgctggttcagaaaggttcttctgcgactcggatataacaattaattgcaacgatatcgacatggatgaatcttcaaccgtaagcatctacttcacagacgagaatggaacgagtgacagcggaagtgacggctcatctgaacccgaggacagcaacagtgaaactgagtatgagtccgtagttgaaagtgacaatgatggagcatcggaccgaattgtctctgacaaggctccgtcgttagtagacagcgatgcggaggtagaaacaatcgttgcaagtgatggttacgaaacaatgtctgaaggcaaaggtaggacttcaaaaggtgttgttagcaatgacaacgcgatcgctaaagcaactgaacacaaattattgacaggcgagggtaagtactgcggcattgatgcttgcccggcagaattgcgcaaagaacttaatgcaacgatcatctcacaaaacacagcacaacaggtatatgaagggtggttcgatgatgaacaacttaagcgagccttcagcactatgggatatgactatgcgtcgattaaaaagaaccgtgaagatgcacgaccaaccaccgcggccgaagtattacgcggtaacagaccaactgtgatataccacaatgatgcaggcgtgcactggtatgatggttatattttaaccgcgctcactattaaagagcagacagccaatagaattgcaagcaagcttgaattaaccgtcgcagaagttacagagcaagtgaagatacaagatgatggaacagtcgaaactctccaactaccaaatggatcagagtacacatatgagtggaacacaaccaccaagcacgtaatagacatgacccggcagacactagcttacatggaaacaatcaatccattaagtgatgaaatgagcgagtatttgtcgacactcataggtagaaaagtatcattcgtcacaccaacgaaaaacaatgtaaacgaatctaacacgttcaaagactatatggtacatatagtggcggaagggagttctccaattagggaccaagttaaacgaaacgttggcttagaatttgcaccattattattagaaaaccagctgcatacagtcgtgcaatatgaaaccttgacgggtgaccccaaaaaccctcagagacatccgctgaatgaaatagtacaatcggaaaaatacaatcctgaaactgatggacaatgcactcaaatgtgcatcgaatattgctatatgttcatgtcggcagaagcggatgagtcagtactcggtggaatcagctacaacatgggtgactgggcaacgacagacaggacagtaaaaacagcatacttaatcaacatgaactgcataataatggactcgggccttaaagaagcacacattcacatcattaacgaaggtccgattgccatattaggatataagtattatgagggtagtaaaaacggacattgcatcgtgcacagcatagtgcaggaccatgcagatcttaacctaggtagattcactacaactagacatggatatacatttgcgccacaaacgctcaagtttagactcgatgaaatgacacccggtaagatggttgattacttaactgaaactgaacgtgacatcaagcgtggggacatacctgaattaaatgactggcacatgcgatggaccggcaggatggatatagtggcaaataaaaagaaaaacgcagtagccactgagtatcaaaaatgcggggaccttatgtgtgtcaatttgcgccccgaaggaggatacgtatacaggacgggaaatagtagtagtacagcaaagaacaagggtatggaactcatggtgacgtgtacaggcgaagacggtaaaacatatgcattgtcaaaacactgcaccgagtacgttcttgacgtcaatatgttgcccacattcacccctcgtagacaacaagccgtcatcaaacaagagaatggtctattaaatatcgaatccaaacagatagcactgagaaactacaatgaatatggagcattaccggtgaacagagaagcaaagaatttggttatcttgcaatacgatggagtgagtcatcacttccgtgcagatcgtgaagcaatattagcagccatgactgacgacaagagacaaataataatcccggtgattaagaatgcggcagcgttcgagtggatagtgcaatccggaggaccatttgtgccaatcgttatgggtagagatgctagtctgggatggggcggtgttcaagatttcattaaatcctgtttgcaaatatgcattgacacgatatccgacgtaaacacgaactattacaatgcggctgcagttaataaagtcatccaatggcaactattaggcaacaggtggggacccacaaagaaacaaatgatggtgaacgaaaaaggaaaactcgaagagcgcgacttatctcaaaccaaagacaaggattatgagaatgaactcgtaacaagcgtgtggaaaatcactcaaacgttactgaacaaatatgaagtagcggacaaagataatgaagatgacaaggttacaatcagatacaagaaaatgctacaagattggaagtaccagatgaacgtatcagtcaaagtgatcaagcaaagtgacgatttacaaccagcaagattcagtttcgacaagagagataaagacctgatgcggaagacaggcatactgttggacctgactaacagttacataattgatttacacagcaataccgtattcagatataccaatataggtcgcggcacatttgaagaagctgtaaaagaggttatcctagaaaacgatgtgatcaacaccacgaatgaactctataaaggccagtttgacaagacatttggcaaggtattacccgtaatcgcggaaaaggcctatgaattcactgacgaccaaaaacaaaccgcaatgacaatcgacgttttgaacgactcatacgtaacagattggaaagtgtaccctgagataataagcaacaaccatggaggtaatgacatttataccggcaatggacaattcgattgtccaatcaatgtggagatccttgaacacgatcgcagccccaagattatcaatttctacgaggacaacacagcaatggtcgataactcaattgaactaccaaatcaggacataggactgcgcggcggtgaactaatgactggtctcacagttgcaaagaaagggttagcagtggaatatccgactcacgcacaaccaaattatatacaaagagcaggcgcaggcgttgctgccatatctaagctgtactccaacaaagtcagtctgaggcaggttcaacatgatcctaaaggtgacgcagacgatttcatatcagtgtacgcacaagaaggctccataacagcaatcccgcaggtcaacatagacgcagcagcgacactagaatggttaaaagaaagacctggaaccagcaaagtcgtagctgactttatagaggtaattgagaatggtctagacatcgtaggaatggataaagttaacgtacacaccaaacttgagtcaagactgaaagacgtaatgatggaagcaatagatgaaataggaatgccagagattatagatgagcaaagaatacgcttgattgtttggcagcgtaaaggaataacagcagtttttgcaccgtttttccagcaattaaaagagaatttaaaaaggtgtctcaagcacaacattgtatacgctgacggactaactccgatgcaaataagcgagctagttaagaaactcgacattaacgatgccaggtttgtggaagacgacctcgaaaaacaagacagacaaactgacatgacgctaattaaaacagagatggaagtttacaaacggctaggtggcaatccaggcgtaattgatatgtgggagacagtacatcacaactggcgcgctaagggtttgggttataagttcgatggtgatgcatgcagacacaccggacaagcgacgacagccctgggcaatgccatagtcaacttactagttaagaagcggattgtgcgtgaaatgggcaataacttactactcatgttagtactaggtgatgacaatctaatcataacaaaatatccgttaactgcacaacaagtgtcccaacagtcagcaagacactttaacatggcttcaaaagccgaggtgagtatggtgcagggaactttcctgagaatgatctgctacaaagacgaaaaacttggcaatttcggtctgggacccgacattgtgaggctgcgtagaaaatacgaagtactcaatggcgtgtctgaaatcaatgaccaaaacatcataatgcgtgctatctcatactgttgcatgatcgggttaacaccagagacacacgcattcacgcaaaagtcgggcttcaatgtgaaattacattcgtggtattcatggagcgccttaagacacgcaacagcaaccaaatataaaaccactgaagcaatgatagacaacgaatacagtctacttatgaagaccttggtggagaacaaaatatttattaatgaacaactcatgttcacttcaaaaatgagctaattatttctttcccc

SEQ ID NO: 909 - DNA, 14325 bp, Rhizoctonia solani endornavirus 7
  source 1..14325: mol_type = other DNA
tgaccaacttaaactaccaaacaatgaatcatccaaccaatgtttcaaacacacacacacaactcccctcaggggagttacctgttcggcggtcgtcccgaacaggtgtaaaaactaagacgataccgtcacacttcagaagtgcgtctgccggttacgaagccggtggaaggtacattacgaaggtgacaaagcatttccgtcataattctgattctgcagcaactttgatggaaagctacaaacaaatcaatcaagcccggaaaaatcgtggacaatttatgatgcaagccagtgtcacaccatctattgttaaggttgaagagtcaaatctgccttcgatcgatttgaacaaagttaagattggaggtgaaggagattgttggaagaaattattggttaattacagtccatcagaaccgcaagactgtattgatttattcaacgctattatcggtgatgcagatgctccaataggtgaatcatcaccatgggggacttatgaccctttgacgctggaagaaatagtcaatgagtacattaaaaccacaggccaaatcagaactttaagatcttggactgctgaatatatcaacatttggatcgtcatcagcgacatcacttcaactaccgcacacttggacagtgttttcaccagtgctgaaagacccgttgatgaaccagggaaaatcaaattgaatatggccgaattgacattacattaccaccctaatctcaaattcaaacagattgatggcgaacctgcaactaaagtagccaaagttcacaaggctattacaaaattcagtaacgaatttgttgctaaggaggctgaactgaaaagattgaaaattggagttactacggagtatttgatgcgatccaagtttttcgacaaattggaatttaataccgatgatgcaaattctaaagaatacatacaggctgtaactgaccatgactctcgatgtatcaacaatgcttgggctagaaataaattcaattttgttatcacaaccaaaccagataaagtcgttgacactagtgccgttcgtgatgttgacagtatgttgactgttaccaatgctgcaattttgggcgatgcaaatcaaagattcttatttgatgtggccctatcttatggatacttgaaccttgaaccaaagttcacaacgatcgatcgcgaagcaatggaaatgttgaacaaacaaccattcttcgaaattaccgaagcaattgaaaaccacactcttttgacaaccaaccccgattttgacgatgttattaaacataacattactgtggctgtggtacctttgctgagtaaagaaccagaaggacctttgagtagtggtctaggttattacaagacagattccaattgtagttacgtatcttggggcacaaccacgaatgtggaagtgtacggttggataaccggtttaatgcaaggtgatcgcagcctatcaagaaatggacatgttgttcatgttgtcagtaggaaaattttcgacgctgttcaagtgatggtgttatcacctttgacaactaataaaacacaaattggagaaataaccaccagaaaatttgaagttccaatgttaattccgacgagtttatggtcgttgggaatacctatatttaaaaccgttacttgcaatcttaacttagatttattaaacagattgataaataaagacttaactggaaaagttagtccggaattgttgcttgaatatggaatggccttatcttggtacagttacaacaaaaggggagttgaaatcagtgaccacaaaattgatccgttcgatgttaaattacacgtttatattactaaagtattagtgaggagggagagtttccttcagaatttggaatctatggccttcgaaccaggattcaacagcgtgttgatttctactgcagctgctgccatagaacatttaacaggaaaattttctgaggacattgaacaaaagagatcgataattgatagcgtcatcaatcgactaaaagtcccaaacatcacgaattcatttggtgaagttttggataattgggctagtattgatgcttggacgatgcgaaacacagttgaagtaatggaagttgttgctccgccaaaatgtcatcatcataaatactgtccacaaccaattactggaactgaatgtctacattgttttgagcctactgcccttgacaacggttattgtaaatgttgtttcaacttcacggattgtctgcatgaatgcatcagcgaacattccacaggtgaattgatttgtggttgttgccacaagaggatagaagaagtttgcccttgttgtcgttcaaaacacatcaagaatgttgaagatactgagcctgaccgtaggacaagaaataaaactagagcaagactagagcggaagagagtggaatctggacataaggaaaagcctgaaacacaagtccccaaacccagctattctgcagtgactcaaactgatactcagacgaagtcgaaaactcaaagcacgaatgttgatgatgtagtacaatttagcaatgccgaattagtaacaatgttggctgagaacgctgtactcatcactcgagatgaaatgagcttagaagatgtggaggttgacccatcttctaagttgagcattattccttttgttattcagaagcacccggtggaaaaattgtcaaatttcgaattaattgaacttgtcgaaccaatgggttcgcttgattgcggaattaatgctgttagacattatgtcggattagattattcatcgactttaactagaagggtaactaacaaagacagtaattggtcaacacatattctatgtcaagtgttgaacgcttacggattgaacgcagcaatcattgaaccgagtggcgtcacattccaaagagttgacgatacagaagaattcgcttgtataatttatgaaacgagtttcgaagttgaatctaatgaacaatacttgcccgactatcaacattggaaagttggaaaaattaaaagaaaatcaatgtacagaatcgaagaatgggcctatcctcaagctacaatgcaagaatatgcttcaacatctttgaaaatgtacaataaaacgtaccccgaattaaatgaagaacaaaaattggcagtttgcatgagtttggcctctcataatgtgttcaaaccaactgcagcaattaatcaaccaaaaatggagaatggtcgtttgttcaatagttctgtccacaacattgaaaatggtttattcaacgtttcagttccagatcaataccaggcaatagtttcaacaacttttgacaatttactatcgccggatgttcctgaagaactcaacaaagtttgggacgactacgaaaacgttctaaacattaaagaaaatgttgaaagtgccatctacaactgtctgtttacaatcaagaagacaattgccgatcctattaaatattgtaggtcaaagaaattaaatgtcaagaaagctggacttgattcttatgttgatttagaaggcagtcaaatcaaaaacggtgacatgttgataattaacaataaaggtgtcttcgaaccaatttttgtcactgtacgaaatggcagaatcaaaatagaaatcgaaggaaagcaaattagaattgttaccatttacgttccaaaacaatcgttcattagcacgattatgagattgacttcattgtttaaggctaactttgatgacactgctttagaagtattactttctacttctaaagtcctatacggttatggaggatgtggaaagactacggaagttggtaaatggagaaagaataatcaggaagtcaatgtcgcttttatcgcttggacaactggtggtcaagcttcattgagagaaaaattgcctttcgaaaatgtctactcatttgaaaaatacgcacgtgaaggaggtctccacgaaatgttaattattgacgaagcttctttggtgcatgcctgggaattatgtctcatagctggaccaacagttaaatcgttgtggattttaggagatttaaatcaaattgctgctgttgacatgaacatatccggcggagctagattaccgcagaatctgctcgctcgagccatagataaatcttcagaaattgaatatcgaccgtggacatacaggttaggtaaagatttggtaaatgaattgaaaaagaatccaggaatggctgacattgaatctagaagcaagagtaatactacatttacaaccgaatggtttgaagactttgaagcatcaaaaatttatgaaattttcaaagactgtgatgttatattgtgtttttacaatgaacatgtgtccagggtatcaaaggtaatgttacatagtggaattaagaaagtaactacagttaccaaattccaaggattggaaaaaccaaatgttggagtgttgcaaatgggtttgcgcaatgatgctgatatccacttggattacaatttcggagtttctgcggctactagggcttcctcccatttagtttgggtaagtgtaagatgtcatactgacaaaacaccgttgagtgacagacttggaacgaaatattctggtttattattaagtcagatagacatgaggaacccagtaggatttttggcatttgctgatgaaaacgaaccaattaaggttattgttgatgaaattccagaattaacttgggatgaattggtcaccaacgttgcaaaatcagtccaaccaaagcatgatgttagcatcgacgattttagtatcaacaagttcagccaattgttaaaacattttgcaagctttgttaaagttgaattagtgtcaaagacgtcagataaattggtgttgaatttcaaagcttttggcaggaaagaaaaattaacggttaacagcaattttgatttaacgggggctattccaaaacagttcacaacacaatttgaagcaatggttaaatggtcatgtaatgctaaattttcacaagacaatcctgtctttttgtcgaagaaggcttgccatcgtttgcgaattctagaattcattattaaagtgtacaaagctaacaacaaagaatataaagttgagtgccttcctgggcatactttcatagttgatgacaatagttgcgctgcatgcggaccgctcactattttaaataaaaagaaacatgaagtattcaatgttacaaaggattatttcacagaaaatgctagattatgcactggccacttgaaagaagaaattgtcgaaatgttcgaaagtgactcttgccctttaattccagatgaattcgatcatgagaaattatctgtagcgattttagctgaaagagtggccacttggcaaaaagatgttccacatgtgttgaagagtggaggaaagtggatgtattgggatgaaactttcaacaaattgttagcaattgaagttaaacgtgaaatagatcttgatattaaaatcaccggaccggatccaatgaggtggtatccattcaaaaagaagaccggtttgctatcgcgtagtacttcaataagttacattaaaaacgataaaagaatcgtgactaagtttaacaaaccaatgagtctaatgccattcattctagaatctttgttgaacatgtatgaaacttacgtcaaggaaaagaccctatcacccatagctgtttctttatttaataaatatggtgcactaaacgactttggcatggttgaatctattgaatggcacaaaaacaggaaaactgcggcttattacaatttaactagtagaatgggcaaattaaaaattaaaagtttggcttacgaaagaacggtgttgagcttgccgaaagaattgttcaatgcctgtgctcatatagatccaactttgaacataacctctaatacttttggttatttgggtgaaccttatgaagctgccagtgacattattcttgttagatatctgagtaatactcacaacattgacgattatcaaattagattaaattgtatcatgtctacttatatgaatgatatcgtgcaaccggtgtatcctatgatcggtgttgatccaaagagtgctgaaatagttgttcaaagatcaagttttgctaatattttaaataatcacatgaaacatttggcagacgatcatcctttattcaaacctatcaaacaacagttagatgaagacaacgtgtttatatcagataaagtggacaaatcaaaagaaaatctatgtactggtccttccatcgtatctgatgttaaaatcttgtgcaagttggccaccacttatcgaaagataatattttggttacctagcaattgtttcaaagtaaaagatactagttatctttacattaaagataagtctcaacatgcttacaaggtcgatcctgctgtactagaaggaatcaagaacggttttacggttggagattctgcgacacgatttagaatacatttacttaaaactctaaatcatataggcatctttgaaattagcaatgggaatggcaacctatgggctactccacatgagaaaacctcaggtttcattaaattgactttacctaaattggtaattgacccctcgaagataattgacagtggtcaattaattcaagaagacgttagcactttcgatattgacgttttgaataatttgcgaaggcgtatgttgcgtcctggaacgaccgaagacgacttgaaagttcaagctagaacattgctaaatactgctcaattttcgacgaatagtatattccaaaagtataatatgacagtagctgccatgatgaaacacatgaaagtagcttatgcgattagtaaatttgaagatataatgctcggattcttaaaaggaaatagttggacagatgatctcgaaactgctgggatttcgataatcgctgatttcatgcgaataattgttccggacttgccattcaaaaatctgatttcgagcataccagctgaatatcaaaacgttttgttcaaaactatgttagcgattactaatcaattagataaaataagacctataacaataggtcaaactaaatcatttgtaactgaattaaattataacaggttaggcttaaccggatcgctaattaagttgttcagaaacagtaactatgtaaaaattactgcacccacacatttgtacagaattcatggttgtaaagaatgcgaatcggcagttaaatatttggagaggtgtggtttgcgagttcccattgtaaattcacaagtgacgagagatttagttcttaaaacaagtaaatgcacacatacaagtcaatttgaatacacgttcaacactaaactaatgggattgcacactccggtccaccccgaatttgaagatgggcaattaatacccatcctcgatccaaaaaccttgactacagacaaagatatcaatgttcctgaattgaatgctccaatagaatgggcgttaatattaaattcgtcggtaactgtgacgattggaaaacgtttacccgttgtgtacgttcctatgaagaacaacaacgttgtaatttacaacaacaaaccgatacacaaatccttcccgattccgaaaaatccaattgaaacgatgattgaatacaatagaagaatactcaatttaactaacgaaagtgcaatccacctaccaggtcaaaacgtaactgatcaacgtttgagaagtgtgttgccgtctgaaatgattgacttgaacgtttattcaaagttggagtacacacggaatgtatttggaacagatttcgacaatctaggcatgattgttggaagtgatttaagaattgctccatgttattgggcggaacttcatttaaagaaaaacgctcatttccaatggtgcggagttgatgaaaatggaaattatattccaggacaattgtataatatcaatgacttagaatctccttacttacgacctatatattcagattggattgataaagatgactattctgtagttgaaccatcaacatttggagctccaggcgacagggtagtagccatgaaagctggagaaacatacaccagaggagtgtctgacactgaaatgattgtcagaagagtgggactaataagacaaggcgacgtgatggagacaaacaattcttattattattgttcagattgcaacacaatatattgttacccgacatttgtacacacttatttgtgcgaaaacggtcacaataccatattagtaggacatccaaagggtttgtcagatactttaccaccttgggtcacatttaggaaatatccaaaagatttggttgaattaactgaaagtgaagatgtcatagaaacattagaaaatgtaaccaatgattatgagcataacgcttttacaccacgttcatttgattcagtcctcaaatcgctacaaactaaagaattattaggatggaaagaaaaattggatttgtcagacggcaataaaaccactttgggttctgcagtttggacacttttgacaaagaaagaaagaaaccatatttgtgacattcctggatatttatcattggatgcatactcatggatagctgcaactcataaaagacattggttgcaaggcagtactaataattatgattacgctaacgactttttgccgattaaaacctctgcactatggttaaatgggataagagggcaagagtggtggctgaataatgacggggttctgtacatcagtgatcctggagggcttgatcaattctttacacaaatgatttgtctaagtcaaatctatcataatgaatggattattcaaaattgtccagctgggtttactttatgcgacgttaaatggctcgattactcatgttgcacaaaaatacaatgggtgaatgaaaataacaaacacgtaaacgaagatatttatactgatttgattgacaatttaaatgataccaagtatcaagaaggtatcgcatcaatgactatgttatccccaggcagttgggctctggaaattgctagaagtgaagatggtttgatgtcttacggattggcttgtaacagctggaattttagcagaccatacataggaaatgtaaatcacggcaataaatttaatgacagtccgctggagatagatacagtaattccgttgcccacagctaccagattccctgaacactttagttcatggcaaggcacttacgataacaacactagattgtgcactaatttatacaccaaaaacgacgtgagaggttcattgattttgcctgcacattctgaaggtcttccacctaaaggagtactaaaagaagaactcgatgctaacgacgcaaatcaacatggcgttgggtggctaactggttataaaaataaatgtttacatccaaacaacaatttgaagagaaccagacagtacaaagtttgtgggccaaaaacttgtgttgcagatttaattggtgcaaacaaattgggattgcattccagcattgttaaaccagaacagtttaacaaagtaactgacatggtaattcctaaaacatcaaccgtggatgttgttgccattttgagtgttagagacgtttctacgcttgtcaatgatagacaatggtatcacagatacatgggtttgccgatcgattaccaatcaacaagttcgcaaaagaacgaaagtgatgaagaatacaactcagatgtggaatcagatgaggaatccgattctggtagcgatgatgaagaagatcgggaatcttaccataccgttgatgaagaaaacgaaccgagtgaaaatcaatcaggtaatgatcaaattgaagaaaaggatggtgatcaatattctgattccgacaatgaaacaattaaagctgacagagacgatgagactctcgacgattacaatcccgacgaattaaaatcactagatgaaacaatagacggttcgtactcagaaaacgccagacatttcgtagaatgcattgggactgaggaacataaggatgacgtcgatttgccagattggtacattgaacaaaatttcactctaagtgatactgagtatgaaatattcatcaatccagtaatgcctaaaagattggctaaaggacgtgacttattgagtgcaaatacccacggcaccagtaaggttttctcaaagggggttaaagtctccgggttagtatacaaagccttgaagaagttatacaatattatacttagattaaaaataaagcactctgacattgttcacatttatgccatgcatgaaggcatagcagaaagatcattgtcgataaacaaaggaagacacatctgtttcaccacaaatgaggctaaatacaagagtagaggttttgaaacaataaaattgttgaaagaacctggaagattaggtgcatgtttgagaccaatattcggaatgttgtgtcctgaagccaaagccattgtaactcatgggggtagagttaatactcatggaatatggattgaaagatgcatggaatgggtacttgataataaagaatgtaaatctaacttcgccgttagcgcgtggtccacaatgactccttatatggacggtttttgtttcattccaggttgcgctcgtagtgcaaaatacatcaactcgaatattttatattctacaatttatggcatagatgaagcagaaattaaagaattgaatctttcaaaaacttatattaatgccaccactacagcgaaatattcaaatatcggaatacatccaatcctaaaagctatggacgagcaacaccagaaagaaaaactcccagaacatttgtataaattgaatgatcttccaatggtctttgtcaataaatcgctcgtttcagctagcaacgtgaaattggcttggcatcatgatgggaatgttttcaccaaagaaactagaggttacacgatggaaaaagatcctgagttcgaagcttggtttgagaatttcattcaaggtgataaggaagttaatctgggtttgaatctgttacaaaacaaaaatgtagagtatgtagcaaaagtggatggtgacgtgagagtattaatgaatccagaagtaactgaaagctgtgtagaacattgcgtgagaagatttttgttcactgaaatatcggaagccgacccggatgacatcattggtcaagggtggttcaagagcttcatgaacttggacgaaatcaaaagttcattattcacgatcggcctgaactacgaaataatagaaggtgataccgtttacggatgcttgtttaatgaaggtccaaaattacaaatcagattatctaaaaaccaatacggtcgaggtcacgcagttttgtgtgaattcaaaattaaaaactttgaagaatggagtactccaaagaagtccgtttacaaggagaaaagagatgaaattttagctaaagaaggagcctggattgatttagatgcttacttgagtggaatttctgatcggtatgatggaatttacgatttcaacgacgtcaaaaatgctaaagctagaattcgcggaagacttgacattatgtcacgcagaaaacagaggaccatcatgtgtgtaggtcaacaattatctaattgtgaggctttacaaattcaaggagtgggaccaggagctttgttatgtttcagatcaagtaatggtttgaaattttcggtttcagaaaaattgaaagacaattcaataatcgtccgcgtcagggacgtctattcaagattttgcatagataccggagccagactaaaattaaaggatgctaaaccagaagtgaagaagttaattttagctgagcaaagagaatatgctttcatgtcttactcagataaagcttgggcaatgaactcgatgaaaaccctagcttccattccagttgactccaaagctaaagttgtctatttgcgtaactttgacaatcgtgcgcatcacaacttcgatctgagagaagatttttacaatcgtgatccgaacacaatcagagtaatgggcagagtgggtttcaaattatcgataagtaatgaatcttgggctttattcagggaaataggcgatgtcaaattggtcatagaagacggttatgtaatgatagcaggaaatggatgttataccgaagacaaagatttaaagttgatgcaatttggcatgagagaacaagaaaagatagaaaaattctctgagatggatgaaaactctatcaacatacatcagataataggaacgttgggtttgatgaacccagaaaacaaggatggcgacggatggcggagtgaatgtgaaggatctcaattaaatctgtggtcacgcggtttcaatatggggtatgaatatcctgaagataagaaatttgaagtgacactgattccactcaaataccaaaacaaaaatttcgagcatttagttaatctaaatagtcaatacaaattatgtaattggaagcaaggattaggagtactgatcaatttggttggagccggttacatggaatacgctatgaagaacgtcaaaagtgtcaaagtccatgaaaatatacttgacagtcacaatactattgatgatctagcagcgaacactattgcaagtaagactgatcaaacatcactagaagtgaagcaggctgtttacagcgtcacaagtttaaacaatttagtgataaatgacgattcagataggtacactctgatgaaaacagaaacgggattgaccgagaatagacaagccacggttttgtatggaactggtaccatgactgatccaataaatggagaggtgtatagagtacctgttccggctgacacaatgaattattgggatgatgaaacagctatgattggcggaacaatgaaacttccaaatactgacattaaattacaaaacagggaagaatttgatggcgtaaaacaagtcgagaaagctataatggttcagtacccatcacacagtcaacccgcatacactaaaagaatgacagcagggttacaagctgttagtgatttattcggaggaaaaatagctttaagacaagttgaacacgatcctttacaagatgcagatttattcgaacacacttatttcaaacctggagctaaagctgctttacctagtatcgggttgaatcctgaagctattcttgattggttaaaggaaagacctgacaaagataaaatttgcgaggatttgatggacttactgacgtctggcttagacataagaggtttagataaagtgaacgttcatatgaaactagaatcgagaatgaaagacgttgccatgcatatggataggatccttaatggacaaccattagattcaaacaatggaatgccggaaacaattgatgaacagagaatcagattgatcgtttggcaaagaaaaggcattgctgctattttcagtcctttctttaaagaagttaaggacgccttgaagaaagtattgatcgacaatgttgtttacgttgatggaatgactccacaacaaatcagtgcaagactaaatcaggtggatggtgatgttacattcgctgaagatgatttgaaaaagcaagaccgtcaaactgacagcacattgatcgacacagaaatggaaatatacaagaaattgggagctaacccatcaattgtgaatttgtggagaaacgtgcataatcattggagggccaaaggagttggtttaaaatttgttggagatgcaagcagacacactggacaagccacgacggctttagggaatgctatagttaatttgatggttaaaagaagattagtagccgaattaggtaacaatttacaattaatgatggttttaggagatgacaatatcattttaactaagggagccattactgaacagcaaatttctttaaatagtgccagacatttcaacatgcaaagtgagccgtacgttggaagaatatgcggaggatttttgagaatgattatcttcaaaaacaatgttggatccttaagtgctgggcctgacgttattcgtttaagaaggaggttcgaagtaacaaatggagtttcagaagctacagaagaaaatttaatatctaggtcgatgagttattgcgtgatgttgggagatctaccgcctgtgagaagaatagtcgaaaaagagggatggccagtagaattgtctaaatggtacgattggcacgccctatcgacgtgtttggcaagcaaatatagatgctcacaggaacaagtggaaactgaattagccaatttaattgaaatgattgaaaaacgtgaattcaggaccaacacgaagttgatgttgactagtaaagggaactagtcaacgtagtttattgtgtgtgtgtgtg

SEQ ID NO: 910 - DNA, 13589 bp, Rhizopus microsporus endornavirus 1
  source 1..13589: mol_type = other DNA
tgcgctaagaattgcttggttctcattttgctgtttaaaagtaagaaagttcagcagtataaccatgaatgacctgaataaagttattcgaagaatcacaacaactaacaactcgcaaggcgaagctgatagccttgcgagatcaattaatcagcaaaatgagaaccaagcaattcttagcgcagacgcacgatgttggttgcgactaagtgagttgttttggcacatcaactcgagctatcctgaacacctcctcggtgtgctggattcagatatcgtgcgcggtaacgatccagagaattggccacggtatacatacacacttcctttcagcagggtgaagtacatgaacacagtagctcaaaacggtattgaaaagggccttgaagaggttgtgcaagaactatccaaccccattacgtcgagtaccatacggttcaaaaccaatggtctctacagtttcggagtccaggacttcttgttcaatggtacacaagtaaaattggtttctctgaggctagtatgggaactcatattacgtgacgcgccccactgggtcattgtgcctggattaaccattgcagatggattgtaccatctcgatcccgagaagccgactacgagtggagtgttgcgcatgtctgtttacgagtgcatgaggaaggcagcaccagtggaattccgggtgaccatgagctcaaaaggggtgttgatcaacgggatgacgccgactgagcactcccagcggtccacgactttgacgattggattcctaggcatttcaattgaggagatcatgtcgtccctaaggatggagaaaagtagcgactttgtcaacaacacaattgggcacgacagtctcatagtcaacaatgtgctatctcgcactcggttcgacatcatcaacacgcctacaccattcgaaaagccatctgaggaagagttgatgtcatcagtgacatacaattatttaaacgatgtggatgatagcaattttaaacatgtactattgtgcttggtgtacatggccgtgaaagctaacatagcagagagcgttatattctcaccgtcagttgaagaattaatacaaaatcaggattggatggtggctgacacgctacagggagcaagcacccattacataatgttagcatgggaccaactgccgacattcgccccagactacattcacattattggtctcaacctatccggcggagaatatagcaccatagacaagtccgaaatcgggcatcagtttaccgtgggtgagaaaatattcatcagcccttacaattcaaacgaatgtttcgaatacacctctcccggacggttggctttcactggttctagatacataaatcatagaaacctcacctatggaagactagtagaccaaaactacaagtcgggttctctaataaccttcacgagagaacgccactcaattgtcactaaagagccgcaagtggagtgggcagaattgcaagtaccttacataaatccgagcttgttaactacagctggcttgccgcaaattacgacaaaacgggtgttgctgaacaagcaattgctgaatgatatgctagcaagaaatctgtacggagcgatgtcttatgaaagtttggtggaatacggtttgagcttgagttatatcaaatattacaaaggctcaatacctgtcaacgtaaaagatatcgatacggaaatgatcagaatccatgcgtatgttgcgtatgtgttgcaacaacggaacgagttggccacgaagctaactatcgaagctctgacaggtagtgcagggctcagattgagccttgctacagtctcggctatgttgaagttcgcattgcagcaaataacagtgtccaacgacgacaactggttcacagataagctgtccaaattgttgcgtggtattagagtggataacaaggtgggcaaattgtccacacattgggctgatctagattgcttcgctagaacctccgagaatttcggtataatagcaagtggagtttccaattgcgatcaccattacgaggggaatttgtgtgactcagatataaccgggattatttgctcgtgttgtaagaacctaaccggccagccagactacgtagatttatgtatccattgcaagccgtcaactaccccaaggcaggtaccggaaaaaccagatatggatcattttgtcctagctgataacttaactgaggagcatgaggaagaaagtatggattgggaggtccaggaggaacaagagtgtcatgatcaggcagtgatagaaccgcagtatgacttgggacgaacagctgaggttccaagacaccaagatccggccacaacagacgcagaggaactgaattctgagcaaagggaaggaagtcacggtagtgcatccacgagtggcgaactagactcggttacttctggttcagtcacggaggatcagacaaccatggaaactttgaagattgcagtggatccactcgttctacgatcttggttgaatggagaggaattagaggaccaagtggacaaaacaaattattattcaataatacccgcaatccccatgggtgagtcaacagcaactgtgtccgatggtctgaagataattaaaacacttcaggtgcctgaggaacactgtggcacagaggtgataaaactgttcactggagtgggactggatcctgaatggtgtaatctaaatttgggctgtagggaacctctaacaggatcccaaatattaaaagccttgattcatttcaaagtcaatgttggagtaatagtcaacaacactatcactttcacaaaggttgtgaatagtgatgaatttgccgttgtcaattatatcagcagagagggaatactaggccattgggaagcggtacaggttcagaggacgaaggtcgcgataccatacataatcccgggtttaggtttggacgattacgattccttagcacttcaagtacacacctgcaaattttcacaattgagcaaggaaaagcaattgcaagtattaaaattgttatcgatcaaaccaaaccattcaacttactctaagcacgtggatctaaagcgggtgggaaacaaactcactaatggcctcacgagtggcacaccgtttttggatgtgaatatagagatcgaagccgaataccactccttagtagatgatcttatgaagaagtcggatattgttgaaccaataatgacgaaagtgacggatccatgggatttcaaatcaaacttgatccaagctctaaagatcagctataggaacttggcggccgtatacaactttgaatggaagcccaagagggtgatttctgggacgctcaccaacaactcgagtctggccactatctttgtgacgagtaacaaaattaaaaccggagacgtagtggtggtcaagggtcagaaatttttctacaagggccctataatagcagctaggaataggctggttattccacaaaacgtgtccataaggcagagtatacaagtagcagtacaggtaagtaagataagttccaccagcgaagttaagaggattcaggcttgcaagagggttcttgcgaatccatccctaatggaaaaagcgaaagtgttgttacgaaacgcaacaggtattaggggaatttggggctgtggtaaatcaaattctattgcaaatgccatacaagagtcggaactagttgaacaagctgtagcggtcacccgtggagcacaagctgggttggtcgccagattgggcaacaaattggttgctagcatagagagttacagttacatgccagacgcctccgtggaggtattgcacattgatgaggcaagtttgttgcaaccatggcagatctcgctgctcaccaccgccaatttgacaagaatcaatttgtatggagacaagcaccaaattgctgcaggatattatgagcatgagttcggagtcgtggtcaaatccaacgcgctggaattggccgccaatcttcaaacggctgattttacttaccggacaggaaatccgttgatgcgtgagttgaacaaagcgctgggaacctcgtacgtgaccaaagcagagcacacaacagatttcgaaatccaacaaatgaaccttagagatgaggttaaactgaagcagtggatagaagaatccgatgtgattatatgcttctataacgaccacgttcaatacatcaataatttgataagagcggatgccatgctgatgtcgagattgttagcgaagcgtaacattctaccggtagtagtcaccgtggagagttgtcagggattggaagctgaatccattctggtttaccaagagccgtttggtcgcggcaacgtccatatcaacaaaacttttacactcgcggcagcaactagaggcagaaaacagctacgatgggttagtgtcggaatgggaagttcctctaagtgggatttgaggcaatgtctgggttatgatttgctgggccaagcacctgatagagactccgccactatcttaatcggtccgaatggagcagagttggatcccagagaggtgtcagttgcagagggggttgacctggaagacttgtcaaccgaggagatcaatgaactagtcagcaaattggttttcaagtacatgggtgaggaagaactaataaacacttgccagttcgatgatatacaccccgccattctggaaactatcataagggagaatgccaagaagttcaatgccagggtgaaagtcaccttgagcgaggaaagtatacgtgttgacatcagggtatatcttgtatcaaagtatttcattatcaatagagatatgcaagtgtctaccgacttatcagaagaccacaaggttcaactccaaaggactataaataatgtgtttggtgataaagtcgttaaacgcctggcttcgaagattgacaaacctccgatcagagtctggagtgtgctatcctcagaaatatctaggaacctggtaatgatcagtcacttagcaaagatacacgaattcatggctacgacctttacattgaaataccagtctgcagagttgctggtacaaacaaccgggggttgttccgtatgctgtgggttgaagattactagcgtatcaaccggatcgacacttcatattacggaggattacaatatcacaggggtgagatactactctattgagggagaggaccacatcttggagtccttcatcactccagacggcttcaatacaattagaattctggggaagccgataaatgaaaccacagagtggtcaaacttgttgacagcagaacggatacataaattcctgaaatcaggaataagaaagttgattaacggaggacaactaatgcattcggaggagaactcctctaagaagaagttgcttgaagtagaactggccaatcgagcaactttcgtaggaaagttcgatggctatagtcacgtggagaactggcctatagcgttaaaaggaccagatgacaggatattctataaggttggagatacagtgattaaatccacgacagcgcgaagctggttcacatcgacaggaatggacctgagtgaggcggacaaaagaaaaatggtagagctagcaatgagaagtgatttggatgacttccagaagtatgcagggtatgcagttgtggaaaacgctagaaggaggttattgggagcggatcctttatcagcgatgataaaaccattatcctggcacgagaatcaaccatctagtaaggtggcagataaactcagagacaaagtgacaaagttgtattttcagaagaaacgactttcaaaccgagttttctatacaccaacccccgtacacaatctgatatcggatttgtataagttgcctaatataacggcagcaattacgggagcgactcagtgtgacgcgaatcttgccgccgcggagatagtcgtactagacgcagtggcatcttcccggaatgacgtcagatttataggagaaacactattctcggcctattcagcaaacctaaatctaaaattctctttaccatggtggcattctcagctcaacgcacaacactccgcttctttgaggactactagggccatgatattgaaccatattcgagcaattaaacggggggaaactgtggagaatgaaaacgaggcccaggcgctgatagaagaattggagttattctcagcaaagagagcatgtaaattttactacccgagcaaggagattaaagagagcacagtagtgttaggtccatcaatattcgatctgatagaaactgatgtggtaaacctgattttatcttctaaagagttgttgttttgggccccgtattaccaacacgacaactatttacacttgtccagatccaaaatagtgataagaccacctaagtggtttaaagtcgagggaggacacaccattctcgatggaaataaagccacaatattgatcaagaaaacgttctctgacgtagctctgtataaattagtcactggtcacgtgacatatgcctccgttcaaacagcacggcacaataaggtgcaggtacctatgccggtgttcctgctgagccccgaagaaataattgacaacaagagctttataaaacatgaaaaagtgactgtagatatagacataatttcttccctcatgaaaagaatgttgagaccaggtaccacttttgaagacctgttagtgcacgctagaactttataccactcggataggtacagttcagtcaccatccacagaagcgttttagagactgctgctgaagccaagaacgcagctatagttgcttacttgctccacaaaacagaactaaaaagtctggacttgttcacgggacagagagaccagtccatcatcagacaaacgttcatggatgggttgaaatcactcttaggggaattgggcactatcgtggagtcgaacgcccattcagtgaaagtagatttagatagagtggtggaggaagtgacaggcaacaaaatgttagcgcagcttgtagataattttgtagaggaacttgataagttacaattaatgacattgcgaccaaaaaggagaatcaatcatcaagtacagaatctgacagatttaatgataaacttcgtgaagtggttgaggaacccaaacttacacaaaagtcacgatacactacaatctcaagaggtccgcggtaggaagtcaacgaaccggaaagctgtcgtttgtttcttcggcaccagaggtgatcaagcaattgctgccacagttgccaccgcagtggactacgaggaggtggtattgtttacgaacgaagatatagtcgaaaaggcatcagcccagctacatgggactagcgtccgggtggcttcgaacggattaaacacaaacgatatatttgcaatgtggaggacatcaaacccgtcgcacctggagtctttcgccatccagaaagtgttggaggaagcagtggattcagacctattcgttaacaactttaacacaccgatcttagaagctaaattgccgagaaatcctatagtcatagaatatacacccatggacgtgatgcatgaactgggaaagccagccatctgggcattccgacaaatctgcaaggtgattctccattccaaggaaattgaacctcatcccgagtccgagaaggtggttaagaagctgagggtgcaatattccagctttggaaaatgggcctcagccatcaacatcaatcctgtttctaacggatcaatactcaacaacaagtttgttgtgtaccacccactattagaagaacatttgattgaggagttgataacttcgctgggacgaaccaacgtagtagtagtgagaggatgtaaatacagagaaagcgatgtagatagtgtagatttgatcaacagcaaggactgtgtggtcctccaccatggtggcctggggacgtgtgcagcaatagcagccagcaccaactacagcctgtgctggccagtcatgaaagaacaaattcaaaatgcaaattatcttgaagttctaggtgtgagctccactgtcaacaccatacatgacgcgatttccgaatttaggagttggagatacatgggaaagacaagattgcgcttgtactccctggttaacagtgagctagccctagacaaagttatgaaaagtttaaaaaccgctgattacctagtgcaaccggaagcgtatgaagatagaatctcctactgggtagaggaactaagtaatagaaagggtttttgtaaggtggttgaacacaaggtaactttatctgacgtgaatgaagatctgaccattttcggaatggatcacaaactaaattgggccgttggagaggctagcggtgacttgtatgcagtggccaatgaacccaaatacaaccaccaaatagtcggccttaatatgtggttaattaactatcccagtgataagacgccggccatattcaggttacaacgacaagaaaaagctgtattcgtgcccacacaaaaacaaattaggtatgttgtggaggggacgtacatctgtatctcatgtaacaaccccctaagcagtgatccgatggcgcagtgcaagttgtgtactaggaatgatttacaaactgcaatctcactgagtggggaggaagctatggtatgcaatcaatatagccttattgactatctgtgcacgtgtggaactcacacttgcactagtgccaacgataagtggtattgcacatgcggcaagttgattaccgacggaaatgtgtatagagcaggggtcacgaatggagatgcaaccatgatgttcaagtatgtgtcaaacaccaggctaaacataagtgaatgtgattggagacaaacaattagagacctaagtaaagtaaagacgctccaaagcatggtagttattgatggaaggaaacccacggtaaatttttcaccgttcatccctcctccaaacacatccgaagcattcattaagaaattcaaggagttgatggttagggtgcagacgtacaaccgggatcaaccagcacccgctgaaatatcccaactcaagatcaactcatcacatgaatttatgcaaagattatcaactggacgatcatggaccagctcggagctacacttcgtcgatccaaagtacttaaagtcgacaaagatttccgatagtcaagcactgtttctagcgcgcgttgcatatgagttagaacagaacatcagccccggagcgactgtgggagtgtatgcactagaaccaggctccatagaacgcagcttgaaccaacaagatgattatagggtagtttttgcgtccaggaaaatagaacacttagattcagaaaataccatatggatagagactaaccactccttggggagaatcaacgcgtgcgtgaggttgttgccatggctgttaggaccagaagcctcctacatcatatgtggaggtcgatatggtgttcatggtatcgcactggaagaagtaatgagaaacagtgagtacaaagactgcagtggaactcctagtaggagaggttggttttatatggatgctgcgaaactcacaacgaagccgacaatgggagataggctcaaaataatttcaatcttactgaactatggaagtatatacggtgtggacgaagctgtagccttcatgtttccgaaaatgcatctataccattcggatagatgggattattccaacaccaattccccatatttcaaggatagtcgactggatagatgggctactagctgcaccaccagtagattgccagatactctgattaagggagtggagatcccattgcagtggattgaagagggcttcggagacattaccggtttcaataagtttattaaactcttggatgaaaacttcatcccaaggaaagagaacagtccgagtaacaggttggagccattgatgatagaaaaatttcacatcatgaaagccaaccgcaacgttaaagcaaccaggtgtgaactaacaactcagagaaccatctcaatatgcggagtgggaaatgaggaattgtttaacccagctgaggatacgttttgccatagggaagtgttgtattattgcgtcaatgaacaacctgatggcagcaccgttgaaaaattcctgaagctagactttcaaccgctagaaagtgtggaaagtctggtggtcaaagcaacctggcttaatttcggagtaataataaagaacaaagacaagcatacagtggaaattttcaatccgacttccccgacccttgtgcgcttggaggtctcagaaggaacattgaaaaccgcgggccacgtgaagctaatgaaggccgatcctgaatccaacttggaactagtttgtgaaaacgatagaaagtctatagatgcaatactgtcagaatcctacccaagaacgattgtagggaagttgtatgaccagattttgaagttggaagctctcgaaaggcagtcgcccattacgccggagtatatcggacccatagccaacctgcccgaggggttgtggaaagtcgtgaataaccagactagagtgctgatctacaagaaggggagtaaactcacatctaatagtgatttatatggtagtgtacaagtaacgaagttggttacagaactgcacacagcggatggagcggaccatgatataatggtgggaattgaagtagaagattccaagagcacgatctccaaccccaacctcaatcgtattagttgcgacgttcaacaggacgaggcaaagtctgaaggtccacaggacacacgtagggtaactagaggatcctccaccccgaacaccgaatcgacaagtgaccaaaatgaggtcgacactaaattgcaaactgtgttggagaaactaaattacgatttagatgcatcatatgagcccagcgacacgacccatcgcagagattctgaaacgtccatggtgaccgcggcatcccaagagaataaagtattcgccataggtgataacattgtcggcagtgtggagcagaactggtacaagactgtcagtgaacggagcttgagtcctgaagtcctagtgagggaagctcgacagaaaccaggtgttggaaaaggaaaagaattgtggggcaagctaaagactggactgttggctgtagagttggcggcatattggtgttcgatcaaatttaatcggaaagaagcaaatctggtcacggtagaagagcaaaagaggttatcctcagattcgggggacgactgggaagattacaggagacaaatagaaaccccagcgttgttttatgaggaagtgatagaggatacatttttattgaagtacagaatgcaggatcaccattttaataaattgaggaccctgctgaacgttagagccaatcatgaaattgaggttccagaggaggaagccgacatagtagctagggctaacacaataataaacttctactgggatagaaaggatgagatttacctacccagagagctgtccagtatcccggatgttgaaggactagtgttgtccagaaaagatctacttacgttatcaaggatcgaaggttggaatatagaacacttgccaaaccaagactcttacatgttcaagcctatcaaatttagaaaaggtattagatccaatgagttcaggtcaatagtgtacctctcagtcttgcgatttgaaccggtaggattcggtgcacttccggaagagccagaagaggaaatggcttacggagcgccagaatcctgggaaaatgctaaaatcggaacggataggggcccggattaccacttctttgtagagccaccaaaaggatcctggttacaatccgagttcaaaccaagtcgttatcaactgacatgcatggactcattaggtctgctaggcggcaaagtacagaggttgtacaaatgtcaggtggacaggtctgttgttccgttagcggtcagtcagggacctcagtccttaatattagagacttcgacgcaagggagtgagtggtacgacaagccactgcaactagtccctcagccgaaaactgtgtacatatacgaggatgaacacggtatgcttgatgtaattgttccgctaccaaacgtcgacataggtttaagagtgagacagcagccggtggaaattaaggaattcacaaaatacaagctcacaaattacccagaacaagcagtgccggcatacaccaagagaatgttaagttccacaattgcagtttccaagttgttcggttcccaggctgtccatagaaaacactggcctagacacgaaactgagggagagaggttggtcaaatattgttatggaccgggggcaagagacaaaatcctcacaaatcgaaggaatgagctatggtataatctagaggatatgttgcaatggctgaaacaacgacctgataggaataaaatcacgacagaactgataactgtgattgaagaaggtatgctagtacatccgttaaacatcttaaatatccacaacaagatagaagccaggctgaaggatgtattattagatgaggaatcgctggctataagtgacacaaacgacataccaaaaaccaaaatacgccaaatagtgtggcaaaagaaaggtttaactgcgattttcgcaccagttttcacacgcgccaagcaacgctttaaagatttgttagccggaggaaaagtattgtatgttgatggatacacaccttggcaaattaacaaacgcctacatcaaattaaggtggtgcaagacacttggttttacgaggatgatttagaagcccaggataagcagaccgacaaacactccctggatttcgaaatgtggtggtatgtcaaccacttgggagtaagtccagtattagttgatttgtggcgagaagcgcacaatcattggataggtaaaaatcaggaagtgcaaatccttgaggacggtatgagacagacaggacaggcaacaacagcgctgggtaacgctttgaccaacctagtaagcaagtcacgaactgtggaacggtacttcaacactatagacctgatgatgatactaggggatgataatctcattatattgcgggaggagccagacttgagcaaatccgtggaggacgctgcaatctattacaatatggtgaataaaccagtaaaaagtaaaactggaggcggctttctcagaatgcaggcacacatatctaaggagggctatgtagcattagggccggacatagtgagactaaggagaaggtttgaattaaccaacaataacagtgctagtgacgtgaaaaatctggagaatagggctgagaactataaatacatggtgggagacttgttcgggaagttcgggagcaaatatcccttatggtacgattaccaggaattgaggaagtctctagctgctaaatataacacaacagaggcggaaattgacaataacgctggtttactagtcgatatgatactggagaacaaagcgcaaccgtttactaaaacgatgttcgccaatatcgagcatagaacgttcaaaacgtaagttgaagagtctcgtcgcagaggttagttgttgtggttctgcgacc

SEQ ID NO: 911 - DNA, 11599 bp, Rhizopus microsporus endornavirus 2
  source 1..11599: mol_type = other DNA
gaataacagtccaatggtcagaaaacaaacaagagtacgacacacaacacttgatttcactaagggagccttcgaaagaaggttccccgaattatcaaactttaacaaagttagtacgcccagattcaccagcctaagccgccaagtcaagagggcgtacaaagccagatttggccaggaagtgccaatcgtatacagcatagacagaggcatgaatatagtcgtcgacggggatactatgtctgtgccacaagcagtcatggtgttacaaggcagggcttaccgtagtacggacgatgcccccactaagacgaacgcccagaactctacggcgttcagcactcgacgccggttcacgccgctacgcagaataccccacgcacttgtcaaggcggcgcagagattggtaacagcgtaccgcaacccatacgacactctcaacaggtattgcgccccgtaccgcaatctcaagatgatggcctctatgcccggcatgttgtcaacagcttactacggtcacaaggtgaacattgactataaagtcaaggtccacaggtgtgccagatgcaacatgcttaatgcatgccacaaggacatggtccaaaacaagatggcctctatgatggggctgagtgccgatgagtacgacgacccgtacaaccagaccttcgtcgattacaacctactcgattgtggattctgcggcgcaccactcaccctcacgccaatcagaccagacttcaacctaaaacctacgtttgaggattggaacacccccaaccacgtcggcgcattgacggaacaactcggagtgcttgggtacctggacggtacctacgatgttgactccgaatattaccataaggcgatggcgaatgacttgcgggtggcaaagttggctatgtccaggtttaacttcaagttagtgcaggtaccagcgaacctaacccagcaagagttggacgccctgcgccaagagttcccagacgtcatgctacaacagcagccaggaattgctaccagcagagatttcgacgacgccgttttagagtgtgccaaagccaacctcggacagagcttcggccacacccaggctgacattgtcatagaagcacacctagtcagcgtcatctcagtgttgcgcaactgcgtaccaggtgacgtaatctgtgtgcacagcagattcgggaaggtacacggtcaacgcaccgacagagcgcagctgttcgaactgtacaactccaccgaactattgtacgaagactgcaactacaccctctcactcagtgcggatgacagagatgtccttgaaagtgatgtagtctatgacgtgggtaaaacctaccacgtggtaaggactcacaagctcctcaacaacgagatcattttcatcaagtgcgtgccagggggtcacgtgagcaaggtggcgagcaccgtgacgatgagggcctctgacagtgtggaaatcgagctaccgcggattaaaccccaaggggtggtaaacttcaccggtctactcgccatgaccaccgagagggtaaagttgaacacaagactgctccgccagctgcaggcgagaaacatttcaggcgatcagacattccagagtttggttgactatgcaagagctatcgcccattccagagtgagcttcaaatccaaaacgatcaccaactacgacatcacacatactgatgtcatcaaccacgctatggtggcttacgtactcggagcacgagcacgactagccctcccctcggccaaaggaaggagtacgttgcaaaaccgagtgactgatataatcctcaatgagctgatgcaaacggttttcgaagccgcaacaaccgcgttccaggtccacgggaagggagcgattagtcatttgttcgatctgttggacgagtcagatatgctcaaattacagtcctatttgacccacccagcctgggacgtgtttgatcacaaatcaggcgaggtcaggttcggcagggccaaggaattgaacatctcgggggtcaaagtcaccgctgaagattcatgtggacacaggcatgacagctgtgagcacaacactggcagcaggacgtgcatctgttgtggcaggctgtgtgatgacaatctgtgttgctgctgctcagaggcaagggactgtgcacacgagcaccacagttgcacacatgaagggcccaatcgctgtatctgttgcttgaagccgagcacaggcaacttctgtgattgctgtgaccctgggccggtagggcaagaccccgtcacccaagacgggcccgatcatgaaccagattacaccagcgctgaccgtggtaaagaccgcgcagacaacagaaccagcccggaaggacaagtggaccaacaaaccactacagaaccgtccgagtacgacctgaactgtcagaccatagcagagaaagccacacccagttacctatcagtggtttgtgacgggccgtgcccctacatcgaggcaatggcagaaagcgggttactcaaagcagataccaaacaccacaccattctgccattcgtaccttgcggacgatggaacgcggcacaaggagcctttaaagtggaaaactactctgatccagccaatagcgacacaaactgcgccctgcactgtttcatgagactgaagaccaacaccagtctccaggagctacgacaactagtcggagagggtccccacggagttgaacacctggtgactctgtcacaagtgtacgagaaaaacctgattattgtcaccagcagttcaatcaccatatgcaagcgcgagccatgctccgagctcttcggggtcataatgcacaaaggctacgtgggtagcgacgagttacattgggtgttggccaacggacaaatgaccacgtttcccgatgtcagcccagtacaggccgagtatgtacccaactccatcattacggacctgtccagtagaatgatgcacgtcaaccactacccaatgtcactgagcgagtacctgagtgtgagaaaggacctaagggtcaaatttgaggcagcggtcctatcgtacatcggagaaaccacaaccatgacaccacttcaagtgatcaggtcaaatgactccgtggcactagtcaatgcccagggcgagcaatacaggttcaactataaggcaggaactcagagtggaagcattcttgcaaaactcttcaacgcgcgtgacccggattcagacacagatctctacaagtatgtggacttcggaggtgatggcaccactatcaccactaacctcccgcgagatctgctcgcagcgaacgtgtaccacatcaataagctgtactacagctgcaccagggccaacgggtcagttttgaggccctgggcacctgctcggctcgtgaggtgcggggtgggtaggtacgttgtgaccaacatccacgaaccccttaagacaggtgacgtccttacccttcgcacggcgcgtggcaccacaacgcaaatagtcaccgccaagaacgggctggcagtcgtgtcactagacccatccaaccctccctgtttgaaggcttccgtgcgtctcacaaagcaatccatggcatccctgctccgtagcacttgcatgctgagcacgatggacagcacgatcaacctgaaagaggcagattctcggactaaggccattctggccgttgcggggtggggcaagactaaccatattgtcggacaagcccgacggagggcgcaagaaggtcacaaggtactcctgtgcgcgtcatccacaacagctcaacaggtgctacgagagagggcaggccggtccatccaagtacggtctgtagaatccatgctgtacagacctcaacgctacgacatcatctatttagacgaggccaccatgattgattgtgtcacctggtaccacctggccagatgctgcgacgaattggtaatggtcggagatcccacgcaaatcggcgtcattgacaccatactccttccaggagtgcgatcgaaattgggagcagttgagcacgttactgataaggagtatcattggcagacgcgaaggttcggatcctccctctgcagagtgctaaaacctttttacccagagatcgagtcagtcgccgaccatgacactcaggtggagttctgtgacctgaagcgctgggatccacacgccattagggccataatcaagtcgaaaaaccctgatgtgattttgtgccaccagcatgccgtgcggcgatcacttagtcggatcactgataaggaggtgagcacaatacacaagttccaggggaacgagagaaacaaagtgcttctggtacaatatgactggacacacacaaaccagggaatcaccgttgatgaaaactacatgatatcggcggtcacacgatgtagatcggcgctgaccgtactttccatccaaatgggccagctgcagcaagacctataccatcgggtcggcagagggttcctaggttacggtatacaagacaagttggcgagggccatacataagatcatacgagaaaaccaaccgaaaacccggcaaactcatcaagacaccaagcccaagcgcacggccaagatagacagccaacaactgcacacgatctgcgagtacatagtccagcgggccaaaagcaaaggggtcaacgccgacgtggagcaagccggcgaccaagctcgcgttgtattcaagaagatgggattcgagcttggtacgctctggttcgacacccacgggaattacaaatccacaggtgtggtcagcaaacacctgccagaggatccggtcgccgaggccctcgcgtttgtcactgatgaagatcagaaaccagagaaacaggaggtgaagcgacgttgttgcaccccggacgaccgtccagacctgccgagccccgagttgaaacaccacaacaacatcaagattacctactctcagtcatgccgcctgatgagcttgcaccacgcacttatgctgttgcaacaatcaggagccacattgcaaataccagtcaaaggcggggccgtcacattcaaggcacgggcgggttgcagtgtgtgttgcggactttacatcacgcacaacggatcaccccaatattacctggtggaacagtacaaagacttcccgaacagacgagtctacgcaacggacaaagtcgaaccccaggtgacagagttattcgtcgagttgatgcagctagtgactggcaaagagtccacaaccgccttgcctcgcgaactggttagcataatgaacgtcaagcacatgtgggaggcattggtactcgaccgagccatgttgtggttacgccaaaactgtgacaaggtcaagtatgcgttgggattaggtgacgatccggggcactgccaactatacgctcaggctaatgagaagagggtcgcacagctaaaggctcgcatggagtcagatgggttgcaacttataccaggagatcatcacaagtacccccacatgcagctgcacaacaccttgggcctgggagccagcaccacaggcacgtacatgtgccgcctgcacccagacgggtacgaaaagatagactggaacgccagtagtctatcttccaaactcacattccttctgaacacactagaatcagaaaagttgcagttgttgaaattatcagacagtcgtaaagtaggcgccattgacggcatgacgttcagcttggaggaacaccgatcgcgcaactccccggtccacaaatggttgcgagaaaagacagagtcagtgcagctccaaatgctcaagaacaggcaagaccctatgtatttgccctcaaacttgtacagccaattccacgaaagcctccgcaagtgcgtgcctgagggttacatcaatcagatcagcatgccagccatcaaagcagggttcgatgcttgtattgatactgcgatgatcaagtacgccaaagcgaagccagcaatagtactcacaaaatatgcctggatccccgtggtcaactcgcagtgggagctggacccgtacaaaatggaatcatggcactcatcagcgagcacagaattcgctgagtcacagctagctcatgtctatgaactgatgcaagacaaatccatcaaagacccagcctcgcaagcggtgatggacaaactgcggtcacaaagctactaccaaacactaagtgacgccgatcttgagagagacccgagacctgtgatcgccaccacagcgggcctagccaacttagaacaattgtacaaacgctgtgctgccggcctacctactgtcttcctctgcccgaacctttccaccagcgggttccgggatgtcctgacacaaaacaagcgaggtggtgtggtgacggttaccgcagcctctggagagcactatgccattcccgaatcattgtgcgataaactgtaccaaccgggaagtcccgccgttcaggtcggcaccgtcgcaggtctgtctatcatgacgaacgcgcgtcaacccaactactatgcgaccaaccctggcgacaacagcctcggtacagtcaccattacgggaccagtatacactaaggatttggtgacagcaaaaacagaaggcatattccgatcacgcacagtcaggatccctgtgagggtgttccgaagcctgtgcttacgttgcacagtggccgacacaagcttcgaggacctgctcaattacgcgcgaaccctggccaatgcacggtactacagcaataggtccgcatgggagcaggtagacatgtcgatatcggacctccaatttgctagctcagttatctacttcaacaccaggggcgtgatggaacaaaccgagcggatggtcagattgctcaacacctggaacaccaccaacccgtgggccagccaaactctcgcccacatcaagacctcgttgatggaaccgtactccaaagtgctatctcacttcgggttggacctctcactggacgagatgttagaaaagcctgagctcataaaccgcatcaacaaacacctacagcaaaatgccacgcttaacaagcacgccatgaaaataggacaatcaagacgcatgattgtacgtgccaacagggaaaccaaggccgcacaaaacaccagcgaccacaaaccccggcacaaacaaagaggcacaacggacgtgcggttaaatgaatctgaccacgttctactcgccacgttcggttccacaggtgacatgcagccttttatagcgctcggtcgagagctcagccggtacgtacgctccgtgacgctagcagggcacgtatctctcaaaccactagtagaaggagcgggcctgaagttccacaccatgagaggcgactataatatatccatgaaggaccacattgaattctccggaccgggcgatcaactgcacataaaacagggagcgcagcggttcaaaaccgaggtggacgagttactgagatctttggacgagaccccgaccaacataacggcactcatcagcacacccttcagtctaggcacggagacgttcgcagagcgcaggcaactgaagttgatcacactctgtagtcaacattggggtcctagcaacagaatagccgaggccgcgatgaaccgccccgagtcgcctagcaccgcgttcatggtattactgtacacccaagttcaagatgtcattaacaagtaccgacaattctggggcatgaagcagtgcggtccagcggagctgcataagatgaggactaagtacgtgtatagcatgcttaaaccatacgcactagccgactccatgacgttgaactatctaggctgggtggacgacaacgggtaccggcaggttgagcgcgaatgtcacaccacccgcggctgcaggcgggcactcgtctcctttggatccatgaccggcacgattcgactatctgcggaacaggcggtttgcgacacactcttggccaatggatggcaagtcatgattgtcaacccaatagttcacagaattggggtcgataccgtaacaggctacgtcaactacactgagttggcaaagcgcgctgaggtgttcatacaccacggtggcgctggcaccacccagagatgtgtggtagaccaaatcccgcaagtcatcatccccttcttcggtgaccaaccaagctggggccatgccactgagagcagaggcttaggagcaactgtgcagcgcaaggacatccgggacaagcttatgtcagcaatccacacagctacatccgaagccgtccggagcaatctggcggctatacaagatttcaattggcgggaaagggtgccaaccatcctgctggaacccggtaccagaccgaaaatggacgacagctcaccaccacaggactccgacggcccctcgactggagacggcagcaacgaggacgcacccccgtcgaccaaccaagggatggagggatggcgcacagtcgaccgaggcgcctccaccggtgttaaacacggtcagctcaagtccgccgacgcatcaccaagtacccgtgacaaccggtttgaagtcctgtccactggaccagatgagacaaaccccgcctatgaaaggatggtacagtccaacaaatcggccacggagaaggtcaataaaatcagcccaggcctgtactccgtggtgaatctcaggaccatcggcacactgtacaaccccactgggaacgacagctgcgtgctggagagtctcaagtacagccgacccacttcattccaatcagagatatcacgaaagttcgctgcgcttggggtggccaggtacgtctcttgggatgagttcgaagacgttatgatgctactgccgctaaatatcgttttcaaacaggagcaccaaagcacaggaatactaatacggaaatccggggtcacacggacgacattcctggaggtgtcgcaccaaggcaaccggctacactgcacagccgtggctgtgaacgaccagttcgaaatcgtcgacgacttggaagacgcagatgacatcttcgacagcccgctgcagtcagatagggtgaatagtaagctgtgccgcgaggtgagcgaacaatacacaccacaggttgaccaggccatcacaaacgatgagctaagatacgccagcgtggacttggactgcactaagatcaaacaaggcttgctcaccagattggacatacaatcactcctcttacacaatcagtacatagtatgtgagaccgtccttgggcctagggtggccgcaatacagaagctggaaagagggttctggttaatcaacgtcaacaccagtgcgtccgggatcatagtcatccgaacaaaggatgatcttaaacctcgcggacagacgcaggccgtggatcagacggtcggggctgggtcaggtttcgtgttcaaggtccagaataataatgaaggttggcgtcaggatcgtgaacccgcccaccagcaccacgggaacgaggtgaacacgtccagccggatcaactgggacgatcagccacaccagccatcttccggcttctggcaagtcaaaccccaacaacaagttgtactgataccaagaccggcttacatcatcaaggacgaacgcgccatcaccgccctatgcgagatgcacccaatcttccaggacgtcgaatctctgctgggcttgacagagcgacgaaaggtcacaaagtgtcgtgaatcaggcgaccaggatcaagtaaccaaaatctataatattgcaatcaagcggcacgcagcagacgacaaaattttactctgccgtgacgaactccaactcctcgggaccaacagaacagccaggaccgtgatgctcgcagacgacgtggttaaacgcacgcggtacagacatatccctgacacgctacgatctggtccagacgtggtctgccaccgacaagagctaccttacgccgtggtggacgactgtggctggtcggtgcctctacctgaacggggctcatcgaaaatccacaacatcgcggcgatcaaattcatggatctcacccatgtacccaaagctccaaaacctgaccgatttgcaagagtggtaccaacatttcgcccttacatcaacgtggccactggtgatttctgcatggtgctatccgaggcccacatcgagcccaaactggaagcattgaccttcttccagagtaatgacctgaccgattgtctagtcatacacacaccagaaacctctgtcatcaaatccacgatgcagcccggcccgttggtcgtcgagaccaaaactgctctcacaaaatacccagaacaaagccggccagtgttcaccaagttcgcaggagcactagaaaactccgtgaacaccagattgggcgcggttaaaaccatcaggaaacacgccaaccagaccattcacagccaattgaacatgttctcagaggcttacatactatccaacgccaaagaacaactagacgcataccagagggagccctgctccttcaactaccaagaaatccacaaatggttacgagagcggcctgacgcagttaagatccagaatgagctcgagttgatcctggacgagggcttcatggccaatcctctaaaccgggtcaaagtacacctcaagcttgagtcgctgctaaaggataaaccggtaaaccaaccacaagataccatctgccgcattatcgcctggcaagccaaaggcatatgtgccatgtactcaccctgcttcatggaagccaaggacaggctgaaatctttactacggccagaagtggtgtatgcggacgggctcacccctgacaccctgtcggcgctgatgcgcaccacggacgttaattgccactttttcgagaatgacctgtcgaaacaggaccggcaaacagacgaatacatgctcgacttcgaatttgcagtgtatcaaatgctaggggttgatcaagatcttctcaagtcatggaggaccgtgcaccagcactggaggtacaaaggcgacaccgtatccgggacgttaaatggtatgcgactaaccggacaggccacaacggccctcgggaacgcaatagtcaatttagccatacacagcaggctagttctcatgaacatgcacacgatcaaacggatgttaatcctgggagatgacatgctcatcgtttcgagcaaaccgttgttaatcaaagacctcacaaagtacatagcggaccactacaatatggagagcaaaccatacttttcatcgacccacgggacattttgtagcatgatctgttacaaagcggaagagagccttgagttgggaccagacatagtgaggctacgaaagagatttgagctgccaaatggggtgcacgaggtaacaggcgagctcttggaggcaaggagtctgtcctatctacagatgatcggatggacacctgagactgccaggattgctcaccgcatcaaccccgccgtcaaattggtgcgatggtacgacttcaaatccatggtcgccgcgtgcggagccaagtataaaatgaacgcgcatgaagtattagataactacaaggcgctgttgaccatgatagagaagccgaaaatctaccaacacaaatgggtggggatcggaaattcgaaacattaaggtgataattcggggggg

SEQ ID NO: 912 - DNA, 6579 bp, Sanya endornavirus 1
  source 1..6579: mol_type = other DNA
ctgcggatttgttatggagtgcaatgaaggaatattgttaattaacagcaatcatttggatggtgatcaagacgatgttcttgcccttttgactaacctgcgcagaaccttcacatacaacaacaacatgtttgacatcataaattcatggttaatggatgattcaatttggccgaatacgggtgatggtttcttactaacaaggatatctgaaaggactttcaacattgtcagaagtatgctcaatgatgatgggttttgtcaatctggcacaacatacagagctttcaacactgaactatccaacagactgccccccggcgctgttgtggctataccaactcaccaaaaaatgtatgcatatgcagtcaacactgaaaacggggttgtgtatcaaccacaaaacatcttgtccactaccttgtgtcaagacataaaaatatgctctggtatacagggttggtatgatgaagctccgctatcacaagcaaacattgcactcgctgacaatatattgaataagaaactaattgcagacatgacagagaagaagtgtatcttcttacccgccaccttgtgcaagcggtttgacacttacttacagcaaaatactatatcatcacacattaataaagtcagcgcacctcataacagggacacgattgcagaagtagtggatgcaatattcatagagcatataatagcattcaccaaaaccaaaacgctcacatgtgtgggcgtggatgcacaaatattctgtttgaattataaaagaggcatgaggatggcatcacaatttgttacaaacggcgacaaaaccatattgagcaattttgtcaagaattacaagttgtcattggaaagtaaaatgagtggtgcattgtcagatgaacaattgctatcacttaaggaatcaatcagccattttagtgatgttaaaaatttcctgacagaaactgtggacggtgtgtgttattactcgttaaattccaaaataaacagcgttaggaatacgaattccttctgctgcactgttgataacgctagcaaatacttattggagagggacggtaaatactacaccattggtgattcaggtgtgatggttaaagtagggcacagggtgggttgtgtattgagactgggagagttccaattgacttgtggcacgaacaatgccaatcatccgaacctagtaaacccgctcatgagtgacgtaaagaaaaggcattttgtatcaaacaccggtgataacctacacatacacataccaaataatatattcagcaaattagtggcaagatgcctattagatcacacaacgttgaaagacgctttaacttatgccaaggcgctctgctcaaccatgttgtacacaagtgacagcgtacatttcagggaagaggttaatgttatggacatctacaagtacactgttttatgcatgaatgtagcctggaggaataggcagatggtaacctgcttgagagatgcaagcaatttgggttgttcaactgatgacaagacgactagtgcatttttatctttggttagttcagcaatgttagaattcacgagggattacaattttttgacaccactgttaggaaaattaaaagagttcgcagattccattatacctgagtctgaacaggacaaattattatccctggtgaggaacaaccagttcttagaagtgtgtcaaccgtaccacataataattatgcgctcagacgatcaacatgaatcaatcacagataacaggcaagacagtgatgacgatgaagttgcatttcatgatgccgaaagcggcaatgataatcaaaaccacagtgcaaccccaaacaacgatgggaataaatgggtacaatctacactcaccactgctcacagctcgcatggaggtgacagcaatgcacccagtgcaaacgaatctcagacagatgcaagacaagctagcgatgaaagcaacaaaaaccgaagtggcaaggaaacaagtgtaactgcaattgacaggacaatcgatattatgtcgcaatctgagatggtagttacggattccaacgtcgttaatttgattttggcacacaacacaattaatgagaataaaacaaacaaccaagtaaacactcaagaaaacgcaacaacaacacgcaacatgacacagctggtagacaatgacgaatgcattgacacccagatagattccgatgatgttaattttgcaactgtagtaccaagagcaagctcaataaccaagtgcgacttctgctttgttcatgctggcagcaaaggtgatgattacccaatgttatcaatgcagaaactcttagttgcaacgggtgctaccgtttgtgcactaattcctgcggatttgagcgataggattggcggggttaaatattacgaatacgtggatacttataggaagttcacaaccactgccagcgcccagcgtaaacaaggattaattaaactgttgctaaatgcagtactacctaaaaaacttttcgccgctcattgcaacaaacacaaaacggtggtggcacctttctttagcgcagaggcatgcgctgtcacacctattgaaacatacatacgtctagtcccgcagtggatatgccataatgaaacatgggatggaaggacctggggagttcatagcgccactttggaagtcataaacaaaattgtgtctcgccgtttcagcaaagtgccaacaaaagttttttattgtaacccaagctttatttgccctgcagagaacaatttgggattcccaatgcatgacgcagaatttgattacgacgccaacacgcgctcatttattgatttctctcgtcgttacgaacacaaaatcacagtcgtttctgcaggcagtatgctaccacctgaccctatttcatatttccaaacaatattcaacactttgagtgggcccatgtgctgggttactggtgaaatgtcataccactctttcgagttcacatatgccaacgcaacattcaattgcaacaaaaatttcatgagtggcaatgtgtttataataaatagcattaaatacaaactggtgctggatatattgcatgaagttcacacacacggcggtgcaggtactctatcaacattgttgatgtctaatgcaaaaatacatgtgcatcccgttgcgtttgaccagcaaaacaacaaacactacttggaaaacgttgatgtcacaaggggagatctgaccactgaatggaagtttttccatgaacgcactgttgcactgctagcacctgactcaaaaattaaccctactacactcagagttcaatcaaataaatttgaaatcaacactgctcaacaccagctcagtagcgacataatattatcagcacacaacataaaatccattcaactcaaccccaacaacgttgactcagattgcgtgttgaccgcaacacttcaatgcattgatgatgccatgtgggctagcaatgcagcaacactatacgagtgctacacaatgtctgatatatgcgatgttttgcactacttgatatcactaggtttaccatttcaactagcacaccgtggtgtatgttacgttagccctgggagggaaaaatcaagccaaataagcataaacgttgatgatttattgacacatgccagttcaatgtctgttgagttaggtgatgcactcaaatgtgtagtattgcaagaattcgattggtattggttcattcggtttagctgcatcacaaatgtcaacactaccatggcagagcttaacaaagctttaacaacaaacaacgcgaaagagcacagattcttttcagttgctaataggaagaagagcaaccctattctactgttggatgcgacaacagttcccggcgggttttacaccaatgacaagctggatcacaacaaaatgtacttgtgcctaacaaatgttgggtgtgtttacggcttagcatttaaggatagcattagtggtagctctagaaccctgatatacaccggttgcacatcgaaggcaaggtgtgtagcagtggcttgcacaaacaacatacaactgttcctatctgctgaaaggccaatacaagcgattgcatacggtaaagcagcattaaatcactcaacgttgaaacagttacgaaaatacggcatacacatgcaattagctgacccagaattcaccggggatctaatagtgtttaacactgaccacgatatcaatgaagacagccacgagttgagactattaaaaaacgcttcgacaatatctatgccacgacacacatatgacaacaaatttctcaagcaactaacacagacaaacaataagcttagacgatgcatagtgtcaggcaaacaaatggttgtgatgcatttgaagagtgaacacgaaccaaccatgcgcgcttgcagattgataaagggcataaaccttgacacaactcaacacaaagcctttgccgagtggtctgacaaagacaccatatcattcatgcaccgaactttctgtgacaaaaatggaaagatgactgggatttacaaccaacatagtgataaaccagcgccaacaaacttatccaccctccttgaatacttaggcttagttcacaactcatgggcctcggatgcactcaccgcctgggtgcaaaaataccacacacctgcccattcttgtatacttaggaattgtgaagaggttatcgatgcggtagatgctgatactatgctgtgcagaagttacataataaagggtagaacgatatttatagccaagaattttctgtgcttaacgataccaatatcgggcgcaggacacaacagtgtgatgaaaactaagatccatggcggtttgttaatgtcagctgaggattacatcatggtggagcgcaagcaattgagcgctttaacaaagagaacgtctaatgagtcaaaacaaataacttacaacgcaacggcaatgctgcccatgggagcaaatacaaatactatgactgtggatgagttatccactgagtacaactgtatattgataggatatacagaaaacttagattacgattgtgaagtgatacgcatagatgacttaccagatatgttatccatggaatattgggcgtacgatgacgtgataccacctatagtacatctacctacaaacaagaatttcacaataagctcaagggttcacccaaataggatgacaaaatctgattatatggtgatggaggcagccccaactttcgcaagaccaagcctaacaaagaccttcacgtcatcattcaacatgatgtcaaccagatatggaggttataaacaactgcaacgcaagccgctagacataaacatggagtatgaattatttaaagcaaattattataaacaagattatctgaatctgctgcagcattataaagagagaattgtaactgtgcagccttcagacgtattggcttggatcaaaaaacacaactatcccaatgctgctatattatccctagaacaacaaattaatgctggctgggaattaagtggaataaaccttgtcactgccagcggtaaagttgaacaaacaacaaaattgaccatattaacacgttggtttgatgatgttacaacgcgagcaattgtggcagcctcatatgctatatcagcgatattttctactttctttttgcaaatgaaagacagatttaaatcactgctaagcaggcaatatatatatgtagacggcatgacaccaattgagataagtgacaacatcaaatcagccggcgccttttgttacatagtagaagatgatttgagcaagcaagatagacaaaccagtgaggatatacttagcattgaatacaaaatatatttagacatgggggctgatcctgttacattgcagttctacatgacatgccacaaaaagtggcgctggaaaggtgttgggctgagtggctactggaacgcaatgcgcttaaccgggcaagtaacgactgcattgggtaacgccattgccaacctaatagtgcacaaccgatttgtggcgaggaacaaagacaaaattgcaatgatattgtttttgggcgatgacatagtaatgttgtgcaaacaattagtgaatgtaaatagacatggcacagaaacaaaaacactgtacaacatggagagcaagataagtataaacaagcacgctggcgggtttctatcaatgatagtttacaacattaacggcaacactggtataggaccatattacaggaggttgcgacacaggtactcagttgtgaactacacatataaacaagaggacgcacgtgacaaattggaagctaggaccctatcatattgcttcatgctaggaggagtaagtacatcaaggagcatagcacacacaataaatgcagatgtcattatacccaattggtatgatgttaatacttgcatagaggcaaactgtacatacgacagatcaagtgaaacaaccgttttaaaccacttgggtcagctcgtacacatgatgcatgaacgaaatgcatcgtacaagacaatcaagcaatggtcatataaacagtgacggtgtgg

SEQ ID NO: 913 - DNA, 11906 bp, Sclerotinia sclerotiorum endornavirus 11
  source 1..11906: mol_type = other DNA
atataaatttactcactacacaaccgccaacatgaaccagaacaataaccttacaacagcaacaatgaccatggcaccaggctatcaaacaatcaacattgcaagccatccctcttcgggagttataggcatggcttgcacaactaacgaaactcccaaaaataacacaaccaccaccagtaatgataacaatgcaaagcttgctgacgctaacgtgtcgacacattttgctacggaagaagaagttaaagctaaactttccagtttggcgttttctgtggagaatggcaagatcatattagactcagatagtctaattagtggtgacccaagcattgagacagaaaatcattgttggactgccatcctcaagtgtattatgaaggttggggtaaattcaacagtatacagtgctatgcatagtctacgttacaaccaaccaatccatataagcataataaataaaatgccagctcttgcaatcatgtttgatacagaacatcgccgcagccttagtgatttgcgtgacctattcaagacactaataggcaaggattttaatattgatattttcaaatgtgatcgcttgtatctaaagaaaatagggcctggtaaagtacatttagaaatggtacgtgttgtgcctgttgggttcccagataataatcattatattactatatatgatttgttaacggcggatttaaatactctaagattaccgattgattttgattatttgtacaaggccgcagcagataaaaatgacctcgtcatgacccaaatctttgacatactcagaaatggagaacaaattttcagtgctatatctgaaaatgattccatgggtcataccaataagatattagaaaaattggcccatgacctacaagtcccagttgcagctattgaaacgggagaaattaatgcccaactaaaggagactcttgcccgtgttgccactttagcagtcaaaccaagagacactagagttgaacaattacccaatgattgctctgatgaaattgtagaccaacttattaaagatcatggatcatttaagttcgtacgtggcgtagctggatcgcacccccacccctatcacaacgcatcacggcacgccattacaagaactattattagtagatatccaaaatcggacgtcttatatgatatcggaggcaatttctattaccacgctcaaaatggtgattggcatgtgcatagtgtattcaagactgagaagcatgaagatgcctcaagatatcagacttatactaaatctttggtaaagtatgccacaaataaaatcagcaataaaaatatctctggatcacttaattctgtttcaaatagcatgctgacacaatgcttaacgaaaacaaataatctttggtgcaacaacagctgggatggctgcccgcatgggcccaattcatcagcatcctttgccatgtctattgacacactatttaatattgaaccggccgagctcctagctggttatattgaccataaagtcctaactgcaacacatgcactcacaataccagctgcttggcatagcgccgatagtggttcaatgaagttcggggaaggctattggcagaaaattggcggtcagcttattgttacattcccaggtgaatcattagtttataccaaccctatacggttaattgaactgtacatgaacaccccaatacttatgaacgacacacatgccatttattgtagagtcagtggttacactggaccccatttgattattgaacattttgtattgcctagaacgaaagtactgagcaaaatagtacagcactcactttggacaaacccagacatagatagcatctcagtagtagtgccccacattgatatatatgcacctgttagcttactacgtcgagaaccctttacacttgagcctatgatgcttaacatcaaattctatgaaaaactgcttaatcgactattactcccgcatacatgggaggctctcttgcaatatgcggcaggcttagtgggtaggacttatggttctgcatcaggctttaccacgcaatacaatttaacaaatagtgaagttaagcggcactgtttggtagcttattggtcaaacaataggggattagaaagtctaaaacctttaatcaagcggagtgaagaattggttcatcaaccaagtttcttgcaacaaatgtggtcatcacttaaaacattcttaatggaattgggccgagagtttgaccccacagataatgccatcttcaataaatttttaacagacaacagccaagataacatgcatgtatctctattgctggaccgcgccttcaaaacaatagataccgtatctgaaagcacacgcttacgcctgtcacataccatcacaaatggtcaggctatggaactccaggtgaatagtaagctgccagcaccagatgttgacacatggcgtgaggaacacacaactctcaatcatcttactgttaacaacctgcttaaaactatagaagaagtaaacaggagtgagaatataggctgtgttatctcagcacgatgtaagcataatcacaagatggcacatgtgcataaacacggtgatttcaacgttcaaaatattggtgaatgtgtctgctgtggggttatcagtacggttgattttacatcacattgctcactatgtgcagaacacgatctatgtcttggtaagagcatctcttgtaaacacgcacatacattcaagaatgatgaatgctgtggctataaaaattgtaattgcaagaaaactctaaaatgttcatgctgtggaatgccttccgaacaaatcagatgcaaaatatgtgggcctgaaacgcgcactatcattccacaaactgcaaaaaaagataatgatgacaccaactataatatcaatagtagtggtgtctcagaagatgcagaattttggaatgatgaggaccatgaagccaaaccaacagataccaaagagccaagtgatcaaaatcaacgtaatacaggagcaaacacaacgcaattcccgccattccaaccacaaagatcagctagcgtcccaaacttgaaaattttgcccactaactcaatgatgttggcgaatgtagaatattatcctagtaaagcagcccattatacctattattggcctaacaaggctgagcatggagtatcggaacattctaagcaccatgctaccgttgaatctttagcttcagattacaacagtgaaggatatgattcaggtaacagtgacaacgatagttacagagcggagagtgtagttactgatgctaatgtaactcaagacttgagcgcaagagctgagaataagattatggctaaggaaatgttatcagaattgcgtgatctgtatgttgatgatgaagcaccaattgatgcgttagggttcaagccaggtgaacgcatgtcaagtctatatacaccattgaccttttatccaggtgctaaagacagagaaccacgtagcacttatgtacccataaacctaagtcagcgtcaaaatgtggtcactgtttgggttgagagctatggtcaagctatcggtgatggcacatgtgctgctgatgcattagcccaagtgtcaagtcaagattacaagtatatctgcgaacttttacagctattaacagggaatactgaatggtggagtgatgtagaactggctattgcagcagctgctttaagaatcaacttatgtgttgcaacaccagcgggctcaatactatacattaatgacaccaacatgagcacctatgttagtatatgcacactagttcaagaaacaggtgactcacattgggtaccatgcacagcgctgatagatcaagtatatgccagagatgttaatcaaaagtacatgaacttcttatttttagcgacatattcaaccatgcgtgaaacaggaacagttgatgttaatgaaatacaaaaagctgttaatgagtgtcattctattggattacaagcagcaattaatgtgtctttccatatcgacaatgattggatgaacattttaaaaacttgtcctggagggatattcacacaagaaggctaccaacacacctcccaaccattcatttctcatgatattaatacttacatacataaagaaaatgatcttactattgtgtctgcaccgacaggatttgggaaaaccactaaggcagcaaaatttgggaagccacatgaaaaacacttagtgataagcccaaatagggtaactgttataaacgcagcatcctattgcactgatattctcaaaattacagcaagtgctagagccaacagccagtggtacccacttgacctaccactcaaattaataaacgactgtcaagttgtatatatgacagtagatagtctttacgcagttatcagcaatggtataactaatgactggaagcagctgttaagtggtaggaaaatatggttggacgaaatacatgacgttacgcccaactatatgtatgttgctaaacaattaggctcatatgtaactggagtcatgtcagccacaatccatggtaaaccagtaataacagagacaaaacacagtgtagtcacgacgttttgctcccaagaagtccttagtaacttatacgctgattacctagaacaaggacccacgcgggagcaagcatggattgtgccaaacgtggcgggcacatatgaactaccaactgagtcgatagtcaaatataatcaaagtgaaggcagatttgcaagtgtctcgtcaaagacagcaccagaagttaactggcaagttgttaacagtgttattgccaccaattgcattacaactggggcgaccatgccacacattaaacacattagtgatttagggatccgcattacatctcatttccactacccgccaataataggtatgaagaaagatgttaaaactatcaagttttacacatatagcaggtataattactctatgagtgacttgatgcagagcaggggccgggccggaagaacagatactggcacagctatcatggctctgccctcagatgagcaacaactgccaccacatgtaagtttgttgtatgccctcaagaaccagcttgcagtgcctacgtcggctaaacctctatgtgattcactcattaaattgccttttaatgaacaagcatttgatgcagagtttaatgaaaataaagataagatagactccaaaatacaacagtgggattcttatttgacctggaaagaagacctactagaatttaaaaaactgctgcaaactacaaaagttcattactctgacgtcacatatactaaggaggatatgcaaactatgctggtacagagcctcagcaataagcctattgtaactttacatggggctaaacacgacagagctcagcacaccatagcatccactaaaataagactgccaaagttagccaagtgtgtctgtggtgccacctcacttgtccataacccatcatgtggattgccatatatcacaaatgccactgagttagaatggttagatagagcttatagcaagtatgatggatctatgttcagccatgatgaaacaatcatagctattgataccagcccgagcagtgctaacatagatatccgattcaaattagcacaacaatatttcaacatatatagtaaaatgttgaacactatactcatcaatgcaaaaaatgcttcgcaaccatcgctacctatagggcctaaacatggagtgatatttacgtcagctaagaaaaataatgactatgcagttaaaaacatacagcaccccaataaagtacaaaataactcagtggttggcatattcgatagagataacagaactttaacattagcaagggttaataatggcatcataaatgtgaggctttcaggtgtgaatgctgtgattatcacaccaatattcacagctaactatgccttacttttagcttatgaatgcttgcagaaagagcttactcttagcaacacatctcaagtagctaaccaatcaatcattatatcaggacccgctggttcaggtaaaactaggctacttgccggccgctaccatacagaccccaaatctaaaatattggtaactaaacaacttgatgtacagtttgattataacatatcaccagtctcaccaaacaagcttttacagatgagacaagactatgaaacaatttatatagatgaaggtggtctcatgacagcaagtgattacattcttctagcttccaaatgtaaaaaaatggtaatatcaggtgatttagcccagaaggtggctgatgatgtagatcttgaaacaagtgtcagtctagataacacctggtttaccagtcaagtgcacaataaaatagaattgacagaaacgtatagatttggtaacgcaactagagaattcttagcaccaattgggtttaattatgtatgccacaacaccaaagataaaggcatatttatgaaacaatgtaattggtttaataagaaaacttttaatgataacctacttgagtttgacatacaactggttatcacgcactcaaatgccatggcatctaatatacgtgagttcctcggtcctaacagcccaataaagtgtatgactacaggaagagcgcaaggcagtcaggcatcgcgtactttatatgtggctgtaaataacccatctgttacatacactataccagaagtttacacagccttaaccagacataaagaacattgcgttatcttatgtgattccacggcattcaatactctcaaatctatgggtctttactcgcaccaggctgaacaacaaagcttaagatacgggtataaactcgatcagttattagatagctcttgtactaccatatcaagtgttgtgaacgtcaatctcatggctaacaataagattaccacggtctacaatgatgttaaagcaaccttaacaaatttatataaggacatgctgatgaagattgatgagtatattcttaggccacaagccaattacagcttaatgttacttaatgtaataatggactttaatggcataataagtagtgaccaagctgagaaagtttgccgtaatgagagtgactctgtcatatatcatgagatgtacaaaatcatagcacaggatggggttggctcagtgtgcaccattgacacatatacagaattatgtgaactactagcaactgtaactaaagaagggcaattgctgctagtagtgcagaacactatagattccatggggacaccaagactgttaacagccgtggttgacatacacaaaaaacgagtcttaattagagaccactaccatgcccatatggatcaagctaacgcagcaagcctgattgagttcataaatcaaggtgtttccataggtgcttgggacgaacaaatggtgcttgtaggtcatgaaaataccagctatttgcaggaatatttagacaaagcgaataaaatttttaaacgaagcaaacaatttcaagtttacaacaccatggtgcggtcgtgtgttaaactcttacaatcaatatccgacaccaaattcgtaggggttaaaagctttaaaattatttacaatatattacaacacaatgtattagaaagtaatgaggatattgagcaattaacaggatatgagttttttagagactatattaaaactatcgcaacagctagagcaacagtaaccctactaatgggattgctagatagatcaaacagctatgataatattagttcagtcttgccaaccttttactcagatacagtagtagaagagcgttacaatgtgaattcattgacccatatgctaaaacggcagtcccaacagcgtcatggggcaatagtcatagaccaatccctcattatcaatttaattaatgccttgatgcttgataaattaggactagatgttgtggcagccggcttaattggagctactgaatttactatcacaacagtgaatgattatctacaggcatcattaccagtacatgtgattgattattacctagaacaagctcgggataaaatccaggatagacaaattgctttaggtacacatgattacagccaagaagctggcaaatgggatggaatagccgcagctaacacaataaaagactatgtcactagtgtgtccaagataaacccatatgaagactggtcattctttaatgttaatattcctgaagccaaagctgataatcttagttcacgacacgggaaaatgacgacgcaactgataaatgaattattgaaatcagccaagaagataggtctcaatgataccagtctagccatactgtcagccctcaggtctgtgcttgagatgagcggattaaatggtactatgcaaaaattaatttatagtattatgaatttcttttcacaattgggtgcctcagccaagagattttttgaatttgacagtataatagaggatcaccaatataagatagaagaattacaagctgagaatgcaatacttcgcagggctatggaagagaaggaagatgatcaaccattttatgatgctcgtgattacacaatcaaattggatcataatggtgatgaccactccatcgatgatgtgcctgtcgtgagtactgggccctttgagcatgaaaaagcgaccctgcactctaaagcagtggatatgcaatatgcgagggaagactttaaaagagagcctcaggacaaagccagagaaaactcaggtttaactaaacacattaaaatgttaatggcaaacggcaaaatgaactatgctgagaatgccttcaatgtcaagggtcaatcaatttcgacaagcttaaagtatgaagaccgtcatgattacaaatctggcatgttgaaaacatggcaacaccatgagcattatagcactctaaaacatataggcataccagaagtatggatatcacaatttggcagtaatatctatatagcagtcgatgctgtcgccctaaaactagaatggcaaacaagtaatagttacaaactatgctggcatgatgagtcagcattagccaatgagtctatgttgtcatttgtccttaaaactttatcaacactaggtggcgctaaaggcccacaacaaaatactctcattaaaaccattgtcacaatcctgaagcagttacttcagtggtgtagtttaattaaagatgaaatggtatggaacaccaaatattactcaggagcaataccacgagaacagagaaattatcctgtgccggttgaagagatttggcggtacctgcaagacaacaccaagtttatgcgcatgttaaccattcgaaaaggagctaggtcaaggatggtgatggtaggtgaccgcttgcacattactaggcgggttaatgcgcctatattagattgccacacatttgctgtctgttccccaacgcaaacaggctgtcggatgaccgtctattcagccaccgattataggattaaactaatgtacaagacaatgggtttgaattctgttaatctagatgacatcgaagacttgagagcaggcaaggctgggcttgatgggttaaggcgattgggaatcaatattgacgcctcacacttagaaactgacgacttcaattcatggaagacaatattgcacaaagctctaaatgcaaaccctttaactgctctatttgacatgactcttgatgacgtttacacatcgtacaaaaaattagttgaacaagagaatgacttattagagttatcaaagaccatcaacaaatatgcatacagtataggcacaaatgtgggggtatgtataccatcagggcatggtaaaactaccaccgtgaacctcatgagaaagaaatatcataatttcaacataattgatgctgacgagtgtgtcacggacataacagtattacaaagctataattatgagcgcgtcatgcaaggatacgctagtgatattagtaaaaacttgcccaataacaacaaacctacaatcctgttctgtcatgatacacaatgcgtaccagataattacaaaacgatcattatattcaataaacagaccccgtatacaccagagcgactctggaaaagtgaaaatgaaggatcactcaagtctaagacgcatttataccccacatttcaccttaacttcgatgagattgaactcacagtattgcatatggcaatgaccagccgcgtaccaagtatcaaactctcagccaaaagtgagattattgaccccatgccgtcagaggaagcatatcaattttttactgacccgggagcagatctattgtattatatgccgcaggatggcaatgtagcgttcagagaccataatcatggcataagtcaacagcgcatatacaaacaaggaccgcatgtgggcttgtgtaggccagcagtgcaaatgttagccaatgccacctttaatgctgtctcaacaagggttaaaggagttcaaaagttacgaactaatgattttaatgataaggaatatttagccaagatgtcacattggttcaaaccaggatgggaaaacaaattaaaagagtaccaagaggaagtcatcacaccttcagtgaacgctgcattagaatgggctatcaataaaggccataaggttgaactcatgcgtgatatggtggagtcagtaatggattatgaacaagcagtagaatatacgaatgtacaagcgcacttcaagactgaaaatttactaaaagaaaatgttggggagctagaacatcaaatcggccgcattataatatggcataaccaaaacttaaatatgattatgtgcccgatgataaatgagtgcaagaagagattagttcttttatttgatgaaaggaaaattacatattctgatgggatggatatggtccaattaaacagtttgttaagcaaaataaaaccaactaaatacctggttgaattagatctaagtaaacaagaccgtcaaacagataaacaaattttacactatgaacattggatgttggagaaactcggccttgatggacgagtttgtagctacatgaactcattgcttggtggtttctctatcaaaactcctgatggtgttaacaccaaaacaccagccatacatatgtctggaggagctatgacgtctttaggcaatgaaatgcgcaacttattgctgctatctgatatatgccagaataaagaaatcaaccatgtcttcaccctaggagatgatagcctaatcatgaccaatgacgaatttgatggtaaatatgttggcctagtggcagcaagcaaccacaatgtcagttgcactttcaatcaatcaacaactagtggggtatttttacaattaataattgcagaagtcaatggtaagtatgtagcaacacacaatttcaaaaggttaagggaaaaactagcttactccccttatgggtcacatacagatgaatacaagtcgaaagtggcatcatacttactgatggtgggtgaatcaccgtacacagtgacacgtatgcagcaacttgggtttgactcctttgtacctatgggaacaacatttgaagaaagactccaagctaacgccatacatcataacacagatggggccgagattgtgaacaccatcaatgatttagtagtgttatcatatggcaaacaccaagagattttaacaatacaaggtgttggagttatacggtacaaacatcttaaagctggtttccatgcagctggagagagggtatcagatcaaacattgttagctaaatttcagcacgcaatgcaacagtacaatgagaataattaatagggatatgtaatatgaacccctgttgatacatgagttagttgagtataataatgtcatactatgctatgcatagtatgttactact

SEQ ID NO: 914 - DNA, 10596 bp, Sclerotinia sclerotiorum endornavirus 1-WX
  source 1..10596: mol_type = other DNA
aaatcacaatcaccatgtctcaatcaattactcacacaactattactactaaaacaataaccgatgcacaaacaaatacacataagagggcttttgggtccctcttaaaagattacccaaacaaaaaccatcaacgtggtacaacgtggtttgacgttgttgatccacctcaacagcaaaaatattggcccaaacttacgcctaaccctagatggaaaaaattatctacatcaaaagatgctattggcaaagttgagcttggtggtgagactcaagttatggcaagttacaattgttggcaatgcatttttggttatgatttaggcattaacactgccatatctcttgaaatgattaaaatgaccataatgtgtcaaccagaagatgcagcacatattcaaatccaggctagttacgccaacggcatgctgcacattgcaaacccccctggactgccgacaggggagatgacacctgaactattctctgctcaaaggaaatttgttgaacacccaatagaaggatgtattaaattaattgaccttgttgatttatacgacgaaggtactatggtcggttttactcctcgtactattacagagaagttggctaatgatataggtgttgatgttagctctgttgatacacaacaactcaaaaaagcaatatctgattctgttaatagccgtggcacaagagctgtcactaaattcactgaccaggcaatcatattgccaacaagttgccctgaagagattgttaatgatctgaataatgagttcggaaatgcaacatttattcgtggcaacaaagaacatcacccgcatatttaccacaatgccagtcgcaaagctgtcacaaacttattgtgtggttggcatggcagggacgctctaatatatgatattggtggcaacccagctagccatcttaacgcaggccggtttactgtacatagcgtttatagcaaaaaccaagctgcagacaatgcacgacacatcaaatggtcaaagcagtgtgtggcatgggcacgtcgcaatatgaacaacgatagcaaccattcagtggttaatggtgtagcaaattcaatattaatgccaaatagtgccctatggtgctcagatggaataaataagtgtgtccactctagcaaacatggatcttttggtatttctattgacaccttattccatttaccagttaacgatctatttgatttttatatgagaaataagatttttcatactgtgcatgcgatcactttaccgaacaattactcatatgcaagaagtggtgcgcttaagtacaatgaaggccattggtataaaaaaggtgatgattggacaattgaatttaatggagaaagtttagcatatagccaaagtattgccctcactgatacttatttatctgtgcctttacataacattggtgagatggttgtttattgcaaggtgtcaggttataagggtgctcatctaataatagaacactatttaattgatcgagcacaactcgatcaattgtatttaaagcatgttatgtggtttaatactaatatggacgaattatttgtaatggtgccacgtattaatatggatcaatcaaccacagtcatgggcagaattccatacactatggagcaagtagttattaacgttcgattctatgaacgtcttttaaacagattgatgcagtcatacacttgggatagtgttttgtcctatgctgctggtcttataggtcgtgtttatgcaacatcaagtggtttacatatgaagtggaatttaactaattcacaggtgcgtgatcattgcttgatcgcctactggactactaatcgtatcaatgaatcgatcaagccactgcttgcccaggcagaacgtgcatcccgagatcctgatttcttaactagcttatggaattcactcaaaaactggctaaaagattttggctctcaatttgaccccactggcaacaccacagtccaaaaatttatagctgataataaaggtgacacccttaggcttattcaaatgttcaatagtaccgtacgtagtgttgaatcacttaatgtagcaacacagatggtacactcaagaagtgtcgtagactgggttgcatcctccactggagttagctacaggcgtctagatgttgatattgacacttggcgaatgaaacaagatatgagtggcaataaaatgacagtttatgatcatattgaatttaaagatgcaaagccagcaggggttaatattggttgtttaaccacaaagacatgcccacatgaccacaaaccattccatctacatttatctgatctaaatagacgtatgggtaactgtgcatgttgtggtgtgatcagtaatctgaacataacaaagctatgtaccatttgttccgatatactaccttgccacggaaaaaacttacgatgcacccacacccatgaacaattaaatgacgaatgttgttcattggctaagtgtacttgcagaaaggacaaacattgctcatgctgtggtttaccatctgttaatatgtactgtaaagtatgccaatttttacctgacaaatcggtgaaaccacagccaactacaacggttgatgacaataacatcaccatcgcacctgtcattgtaaaaccaacaaccgccaaaaaagaggcacctgtacgtttcacattcgaaaaaccacaggctaccagcacaaatgatgatgtgaaggacaacacaacaatcaatcatccactttctactaataataatttcaaatttgatgccttaaaagaacaggaagtggataaaattattacatatgatgatgaaaccactattaaagaagataataaggaaatacatagtattgatgctgaatcagttggtacagttgataccaatattgatgctggccgatctattaataacgacgttggaccattattacctgaagaagatgttgctggcattgatcaaatcaatacgctaatgagagcagttgttaatgttgaggatgttaatccagggcatgctgatactatactaacaaggctgccaccacactatcaaggaggtctggcagttcgcgttgttggatacaccgacgtgccgggtgatggcacatgtggtgcccacgccctaagtgttgctcttggattgaatgtagatgatgtaaaacattggttaaccattgcaactggccatgatgactggcataattctgaggagttagctgcctgtgctttagcatatggccgaaatttaatttgtgttgatattggtgacaccactatatatagaggtggtgaccaagactatgctggttctatcatacatggcactgtcgtcggttgtggtgcacactggttggcaggaaattgtaatatccttagttactcttcactcttcactaataagttaataactgactacaccaatctgctacgtgcagctcatctcgccttaaatggcaatgaccaaacagccctggcatactcacacagtgactttgatattgatagcatcatagatatgggtggtaacatcgtcattagccatgatggaatctctatacaacatgaaggtggcaattcaaggtgtcaaatatctgataagtcagatagtatgaagatgattgttggaccaactggatcaggtaaaactacaacagcattccaacacattgaaggtaaagtactattgattacaccactgcgttcagcagtaaataatagctttgattatctacgcaataaagtgaaagtggttgctcgagctcaaggcgcttggatacctgataatattgacatgaaagatataaataaatcagacctagtaataatgactatggagacattatattcaggtatatttattggacatgacaagaagaatatttatcatcaattagtgtcagcacgtgccatcatatgtgatgaagttcatgagattagccctcactatgccagattattgactgttctaccaaaaaacaagacatacgtttgctcagctactatgcctggtatcaagctagattataactgtaaatttgatgtgacaacaaattttgtccagggtgatactattgactattggtttaatgaagttaaatctaataaagcaatgccacccaatacttgttatatagttggaacaaagaatgaatgtacatttgctgagatgccagcagatattaaagccatcaattcatctacgattaacaatatatctatcaatgatgttggcaaatgcatagctactaatattgtgacaacaagtataaccatgccgcaagttacaaatattattgatttaggagttagaataacaagtgatgttataatcaaaccatatctaactgacgttgagaaaaacatcagatttttcaactatagtaaacgattatatagttgggcagagatgactcaagctagaggcagagttggtcgtgtctccaatggtatgttctatggaccatgccctgacaagacaacgcgccaatcaaatattgatgcattattgaatagttgttatacacgtgttccatgttacagtggtttactacatgaatggcaaatggttaatcagaagaattatgatgaagtagtcaattacttcaccacacttggcaatacatttgataacaaacccacttggtggcaagagtttcaatcatggcaggattcagttgcagagctattgcagtgtaagaattccaatcaacaaccagtatttgttgatgagtacataaacaaagaggatatcttggctttaatacctaactacattggcactaacccaatttcaacaagtttgaaacatgctaaacatagagttggcgctttacgttatagttgcactattgattgggataatgtgctacctaagcacttatatgaggcaacagataatattgattttgaaagcttggtgatatctgttcctgatagctcacaatttcttaatatagaaactgattcaaatgaagatatagcatcaaaactacggttactggctattgctagtatactaaatgctatcaaagggttaatggcacgtggtcagatttacattaacacgaacaaatggagtgatcagcatggccaatatatattatatgatagtttggaagatgcacaagcactatcaggcattaacttatctgaatatgacattattgggctagttgatattaaaaaatcaagcatgcgtattacacattaccagcaatctaataagtgggtaggtcatgttattgtaccaacatacaaaacacaccattatatgggccaattgactgatataggtctaattcgcgatcgccaagcaccattggttgacacacttcgcaactcaacgttatatgtgggaccacctgggagtggcaaaacaaccatgatgattagtgagaataaatcatcatacaccacgactatcagctctggacaactaaagaaccatggtacatggttgcccccatcgttgatacctcatagtcaagaaaatattaatattgatgaagttgggttgttagatgtttccgtcatattgtctcttgcaagtcgatctaacaaattaactggtactggtgatatcagtcaggttgtgcatacagctaatgagacaaatgcctattatactgggtttgatagtggcattgacctgttttcaaagtatgcaaacaagatatatcttgacaaaacccaccgttttggtccacaaacatgtaatttagtcgccaaattagggtttgaaattaatcctactaatatggataaggtcgaagagattaaaggttatgtgtgcgcaataaatgataacaaatcatatagtaaagtattaattgcttctgaaccggatgcaataatctgtgctactaaccatctagcaagaatgttcaggaaaattacacaaatcccagtatataatattgctaaatgtcaaggtattgacacaccaaatacattagttgttttacagggcgggcaaattgatatgctagccaacaatcagttgtatgtagctctaactagacatagccaatgtgtctctatagtcgttgacccacctcatgcagcactattaatgcaattatgtatcaaaacagagaatatgatatcatataccgatgcgcttggtggtgcaagcaatattacacaaccgattcttaaccatattatagagtcgaacaagaataatctactgaaagatgctcaagtgatgaattatttaacaactatctgtgctttgcagtctggaaagattacacccaacacaatgattgtgatcatggatcagatgaatttccattacaagaattgcccatttaggtttgttagattaaaagaaattaaagatattaaacaattagaatgtgttgttagcatatatggcatccagtgcgtggtgtatgacgtttccctaactaatgaacgtgaattgctcagttgtttactgagccaagtaacaacaaataaacatatcaaagaatatctacgtaatctaccaaggaaatttataacaacaggaaagaaaattggttacaacttatatctctggcttagtaaatttatgaaagataatattactatacttagtggttacttcaatactaatgaggatattaacattggtggcagtactgacctgagtcacataatttggctagcgatcaatggtgtccatagtgcatttatgacattagtgcacatattagatgatgtcgggagtaagttgtccaagtatacggatggaagttatgcagctgaacaattcaaagaactgttaatcgaaacatggaaaaagagcaatccatttagcttcggtgatctgaagataagtaatagcctcatgtcactttacaaattattccgagaccacctcagcaaaggtgttaacacattatgggatttcataaaatatgttgttagtacactgcgtgaatggtggcataaacaattcaatgtcgataaaccaacatattatgaacttgaaggcaccagcatgtctttgatagccactgactcaccatgtattaatataatgaggaatagtttggatggtgatcattcgctaattgatggttctcctacaattcccaatacacaatatattacacaactagacaatttaattgacaattcaataataggttgggagaagaaagctactccttctccaacatgtgaagactgtcctgatgatgtacaggatgtcttagatgagattgaagttttatttgattatgaagaagaaactattaatcataacccaacagttagtagtgagcaccttgaacctagtatagatgaatttggccaaatgccgagattaagctccagtgagcctgtagaaattaaagataatatgtcctcagttggtatagagcatccagagccaacattagacaaatcaactcagatagtagaaaataatccaattgaactagataaggggattaatgaaagtaagcaaaaccaatgcttatgcatggaaacatgtagtgactggcagttagctgataacatagtcactaacctcgatttgaatacttataaaccaaacttaatgggtaggatggttatagagaagataccgggtggtatcaaaataaacttaaagttaccaggtgttggtaaattcaatgctgtcactaaaaaatgctgtggagataatacacatttgatctatgtgactgtcaatggagagcagataacactcaagatcgataaaacagcttcaggttatgcattatactgcatgccggatgtagttgatgtcaatttttctcagctagaacaagccataaaaatgttaagtaaactaggtggtggcaaactcaataatggcatgactttgttagttgattcacttaagatcacccgcaaatttattaaaaaattgattagattgacgcattataaattgaaatacttaatgggtagaatcaatttgcgccatcttacaagtaataggtcaaacttagaagtctatcgtacaatatgtcataggttgcctacctcatatagtaacagtaaattcagtacacgtgagtgtattggtggtacagtattgtcaactatagagctagtaccgaataatgctgccaatcgcagtgaaattttcatagcaatatacaatgtgaatggtgatacacaaatactcatttttacaaatgataataattattcaaattatatcacacgtcgcctaatgaccccaattgaacatggcgatttcgctggtgacagatcagcaattagtgcattgctcagactaggtattgacatcaaatcaattatgacacaagataacgatctaaccattaatgacattaagaagtggctactagctaatccactcacatcaatgtttgatgtcactgaccaacggacttacaataatgccaaagaacactcaattgttgagaaacatttatttactgacatccataatatattggataagccattagacattaagtatgcattttgtatacccagtggccatggtaaaacaacaacagttaatagaatacggagaagcaaccaagagttcacagtccttgatgttgatgaagtacaagaacaagcaacaatattgcacttagggtttgaggataaaatgttaaattataaaggaaaattagaaaagtacatcgcgaatagtacaaaaccaccagatgcagtattcatacattcgcctatctgtgcacctgctggttacaaagtcataataatcataaatgatggtgctgatgtcccattggatagaatttggtctggtaaaaacgtcaaccatcttgagagtatgaataatataatccacacccgaaattatgatgatgtatataatgtaactattaactacttaaacaaaaaattaactggtgatatcactttagaggatggaactacaattgttgataatattgatagtatacttggagattcatttatgaggaacaatcctggatatgatgatatctatagattaccaaccggaaaagaagatatcttaaatatgagcacagggaatattggtttaggtgaacaaagattttttaaaacgggaccacatccagaagtgatgcgtccaacagttaataaaataccctctgctttaccgaatgctattatgactagattgatgggtcgtgtgaaatatagaacagttgaccttggtatcaaggattaccacaaattaatgactaaattcttcattagtggttatgaatctaaacttgctagttatacagatgacccaattaatttgaattatgaagatatactcacctggttagtagccaaaggtaataaaatacaactgttagacaatatgttacgatctgttaaagatgatgagtttgctactgatccagctaacattaatgtgcattataaagttgagaatttaatgaaagagcaggtcaatgatatacttgatcaagttggtagagttattgtatggaataatcaaaatattaatatgtatgcatgcccagtcattaatgaagccaaagcacgtttcaaatcattattaaaacccaatgttatttacactgacggtatgacagttgctgatatgaataaaagtattggtcagtatagaagcagatggttgcttgagatggatttatcaaaacaagatagacaaacagatgcacaaatattaatttatgagtggaagttgatgggtatgttaggtgtacctgatatattgattgagttcatgacctcatttataccaacgttccgaatcaatggcacaagtcatgagaccgccaaactaccagctatacattttagtggtggtgccatgactagtatgggcaatgaaatacgcaatctattgttactatcagactgtattggtgaaaattatgtggcaatatacactctgggtgatgatagtcttgttttaatgaatacaaaacctgatttagagttgtataaacgcatttgtgcaagccgacataatgtacaaaacacagcagttgctagcacaaaatgtgcactgttcttacaaatgatagttgcgcgaaatgaagatggaacatactatttaagtcataattttgtgcgtttaaaggaaaaattagtgtattcaacgtacccgaataccagctctgattggaaaatgaaatatgcatcatacttaatgatggttgggtattcaacacaaaccaagaaagcaatggaatacagtgggtttgtgtctttcccaagtctaggaacaacaatgtcacaaagagttgcagctaatgctttatataatgaaataaatgatatacaagtgtttaatataataaatgatataattaatgccaagcagcaagtctcggaagagataattatacaactacccgtaataatgactggtaataaactaaagtcaggtatgaccagggttggtaaatatgttgacaatcataataaaatgcatgaactgttaatgcaatatatggaagagcatactgatatttagggtaatattgcaatgcaatattacccataaccaaataactatttagactacaaatagttgaatatacaacagcaagtaattatgtgtatttgttctgtgcccccca

SEQ ID NO: 915 - DNA, 7517 bp, Sclerotinia sclerotiorum endornavirus 2-A
  source 1..7517: mol_type = other DNA
taataatgatgatatccaacctagtagtaatgacattggcccacttctacctgaagaggaggttgctggcaccgagcaacttagcacattaatgagggcaattgttagtgttgaggatgttaaccctggacatgctgacacaatattaacaagactaccaccacattatcaaggaggtgtagccgttcgcgttgttggttacactgatgtgccaggtgacggcacgtgtggagcacatgctttaagtgtagcacttggacttaatgtggatgatgtgaaacattggttaactgtcgcaactggtcacgacgattggcataattctgaagaattagccgcttgtgctctagcatatggccgtaatttaatctgtgttgatgttggcgataccactatttatagaggtggtgatcaagattatgctggctctatcatacatggtactgtggttggttgtggtgcgcattggttagccggtaactgcaacattctcagttattcctcgctcttcacaaacaaattgatgactgattacaccaatctactaagagcagctcatcttaccctgaatggtagtgatcaaactgcactagcttactcacatagtgacttagacattgacagtattatagacatgaatggtagtattgttataagcaatgaagggatctccatagaacataaaggtggcaattcaagatgccaaatatctgataagtctgataatgtcaaactgattgttggaccaacaggatctggtaaaactactaccgctttccaacatatcgaaggtaaagtactactaatcacaccgcttcgttcagctgtaaccaatagttacaattatttaattgacaaagttaaagtggttgcccgcgcccaaggagtatggatacctgacaatataaatacaaaagatatcaacaaatctgaccttgtaataatgacaatggaaacactatattcaggtatattcattggccaggatggtaaaaatatttatcatcaactagtatcagcacgtgctatcatttgtgatgaagtacatgagatcagtcctcattatgctaggctactgactgttctaccaaagaacaaaacatatatttgttcagccactatgcctggcattaaactaaattacaattgtaaatttgacgtgggggggatagttggaacaaagagtgagtgcacatttgctgaaatgccaactgatattaaagcaattaattcaactactatcaataatgttgatattaacaaagttgacaaatgtattgcgactaatattgtgacaacaagtatcactatgccacaagtagcaaacattattgacttgggggttagaattaccagtgacgttatcatcaagccgtatttaaccgatgttgagaaaaatattagatttttcaattacagcaaacgcttgtatagttgggcggagatgactcaggcaaggggtagagttggccgtgtctccaatgggcaattttatggtccatgtcctgacaaaacaacgcgccaatcaaatattgatgcgattttgaacagttgttatacgcgtgctccatgctatagtggtttgctgcatgaatggcaaatggtcacccagaaaagctatgatgagacggttagttacttcaacaagctcggcaactcatttgatactaaaccaatttggtgggatgaattccaatcatggcaaaattcggttgcagagctattgcagtgcaaaaattccaatttacaaccagtattcgttgatgagtatatagataaagaagatattttggcattaatacctaattacattggaacaaacccaatatcaacgagtataaaacacactaaacacagagttggtgcattacgttatagttgtgcagttgattgggataatgttttacctaaacatctatatgaagcaaccgataatattgacttcgaaagcttagtaatatcagttcctgatagctcacaatttctcaatattgaaacagattcaaatgaagatatagcatccaaattacggctcttagctatagcaagtatattaaatgctatcaaagggttaatggcacgtggacaaatttatatcaatactaacaaatggagcgatcaacatggccagtacatattatatgatagtatagaggatgctcaagcattatcgggcatcaatttatcagagtatgatataattggattagttgatattaaaaaatcaagtatgcgcattacgcattaccaacaatcaaataagtggacaggtcatgtcatagtaccaacgtacaagacacaccattatatgggccaattaacagatattggtttaatacgtgatcgccaagcaccattagttgacacattgcgtaactcaacattgtatgtggggccaccaggaagtggtaagacaactatgatgattgatgaaaataaatcttcatataccacaacaattagctctggacagttgaaaaatcatgggacatggttacccccatcattaataccacatagccaagaaaatattaacattgacgaggttgggttattagatgtctcagttatactatcacttgctagccgatcaaacaggttaactggcacaggtgacatcagtcaagttgtgcatattgctaatgaaactaatgcatactatactggttttgacagtggaattgaattgttctcaaagtatgccaataaaatttacttagacaaaacccatcgttttggaccactgacctgcaacttagttgcaaaattagggtttgaaattaatcccgtcgatactaataaaattgaagaaatcaaaggttacatttgtgcgacaaatgataacaaatcgtacagtaaagtgctgattgcttctgagcctgatgcaataatttgtgccactaatcacttagcgagaatgtttaggagaatcacacaaatccctgtatataacattgctaaatgtcagggcattgacacaccaaacacattagttgtactgcaaggtggacaaattgatatgttggccaacaatcagttatatgttgctttaactagacatagccaatgcctttccataattgttgatccaccgcacgcagctctattaactcagctatgtgtcaaaacagaaaatatgatatcatacgccgacgcactaggtggtgcaagtagtattacacaaccaattcttaattatattgttgaatccaatagagataatttactgaatgatgctcaagtaatgaattacttaacgacaatctgtgcgttacaatcaggggaaatcacacccaatactttaattgtgatcatggatcaaatgaatctgcattataagaattgtccattcaaatttattagattacgagagattaaagatattaaacagttggagtgcattgttagcatatacggtttccagtgcgcggtgtataacgtctctttgactggagaacgggaattacttagttgcttattgagccaagtgacgacaaacaaacatattaaagagtatcttaagagtttaccaagtaagtttatgacaacaggaaagaaaatatgttataacttgtacctttggctcagtaagtttatgaaagacaatgccgctatactaagcaactacattaatactaatgaggttattgatattggtggcggacttgacttgagccatatattatggttggctatgaacggtgttcgcagtgcatttatgacactggtacacatactagatgatgttggaagcaaattatccagatatacagatgggagttatgctgctgaacaatttaaagagctgctaattgatacatggaagaaaagcaatccactgagtttgggtgatttggaaattagcaacagtcttatttcactctataagttgtttcgtgatcatctcaggaatggcatcaatacattatgggacttcgtccaatacatagtgagtgccatacgaaattggtggcaaaaccaatttaatgtaaataaaccaacatactatgaacttgaaggcactagtatgtcattaattgctaccgattcgccatgcattagcatgatgagaaatagcttggatggtgatcattcgctgattgatggctctcctatattcactaacacacaatacatttcacccctggatagcttggttgataattctacaacaggttgggagaagaaggccatcccttcaccaacatgtgaagattgtgtagatgatactcaggaagtattagatgaaattgacgtactgtttgattatgatgatgaaaccagcaatgaacataactcgttcgccaatagtacgagttccaaaccagccatagatgaaccacatcacataaaagaatccaaccccagtgagttagaagataaaaaagataacaagcgagataaatgcctatgtatggaagcatgtgatgattggcaattagctgacaatatagttactagccttgatttaaacacttataagcccaatttaatgggtaggatggtaattgagaagatgtctgatgggattaaaataaatttgaaattgccaggtgttggaaaattcaatgctgttaccaagaaatgctgtggtgataatactcatctaatatatgtgacagttaatggtgagcaattgacattgaaaattgaaaaaacagtttctggctatgcattatattgtatgcctaatgttgttgatgttaacttttcacagcttgaacaagctattaaaatgcttagtaaattaggaggtggcaaactcaataatggtatgactttattggttgattcactcaagattacccggaaattcatcaagaaactaattaggttaacacactataaattaaggtatttaatgggtacaatcaacttgcgccatctcacgagtaacaggtcaaatttagaagtttaccgtacaatatgccatagattgccgacttcatatagcaacagcaaattcagcacacgtgagtgtattggtggcacagttctgtcaactattgaattaattccaaataatgctgctaaccgaagtgaaattttcattgctatatacaatgtaagtggcgacacacagatactcatttttaccaatgataataactattctaattatatcacacgacgcttgatgactccagttgaacatggtaactttgctggtgatagatcagcaatcagtacactgctcagattgggtattgatattaagtcaattatgacgcaggataatgatctaaccattaatgatatcaaaaaatggttgctagccaacccattgacatcaatgtttgatgttactgatcaacggacttacaataacgcaaaagagcattcaattgttgaaaaacatttgttctcggatatccataatgtgttagataaaccgttagacatcaagtatgcattctgcatacctagtggtcacggtaaaacaacaacagttaatagaatacgaagaagtaatcaagaatacacagttctagatattgatgaagtacaagaacaagcaacgatattgcacttagattttgaagctaaaatgttaaattataaagcaaaattggagaaatacattatcaatagcacaaaaccacctgatgcggtattcatacactcacctatttgcgcgcctgctggttataaagttatagtaattctaaacgatggtgcagatgttccgatggatcgaatctggtcagataaaaacgtctgccatcttgaaagtatgaacaatatcatacacactcaaaattatgatgatgtatacaacgtaacaataaactatttaaacaaaaaactaactggtgacatcactttagagaatggaactacaattgtagataacatagatagtatactgggagatgcattcatgaggaataatcctgggtatgatgatatctatagactaccaactggaaaacaagatgttctaaatatgaatacaggaaacattggtcttggagaacaacggtttttcaaaactggaccacacccagaagtaatgcgtccaacagttaataaaataccttcagctttaccaaatgcaattatgaccaggctgatgggtcgtgtaaagtataggacggttgacttagccattaaggattaccataaattaatgactaaattctttattaaaggttatgaaacaaagcttgctagttacactgatgatccaatcaatttgaattatgaagacatactcaactggctaattgctaaaggtaataagatacaattattagataacatgttacgatctgtcaaagatgatgagtttgccactgatccagcaaatataaatgtacattataaggttgaaaacctaatgaaggaacaagttaatgatatacttgatcaagttggcagagtgattgtatggaataatcaaaacattaatatgtatgcttgccctgtcataaatgaagccaaagcacggtttaagtcgttattaaagccaaatgtcatttatactgatggcatgacagtcgctgatatgaataagagtattggccagtataaaagcaagtggttacttgaaatggacttatcaaagcaagataggcaaaccgatgcacaaatattgatatatgagtgggaattaatgggtatgttaggtgtaccaaatatattaatagaatttatgacatcatttatcccaacattccgaatcaatggcactagccatgaaacagcaaaattaccagctattcattttagtggtggtgccatgactagtatgggcaatgaaatacgtaatctattattactatctgactgcattggtagtaattacgtggcaatatatacattgggtgatgatagtcttgttctaatgaatatgaagcctgatctggagttatataaacgcatttgtgctagccgacataatgtagcaaacacagctgtcgccagcacagagtgtgctttgttcttacagatgatagttgcccgaaatgaagatgggacatactatttaagtcataattttgtgcgtcttaaagaaaaattggtatactcaacgtacccaaacactagctctgattggaaaatgaagtacgcatcatacttaatgatgataggatattcaacccaaaccaaaatagctatggagtacagtggatttgtatcatttccaagcctgggaacaacaatgtcacaaagagttgcagcaaatgccttatataacaaaattagtgatattcaagtgtttaatataatcaatgatataattaacgctaaacaacaggtatcagaggaaataattatacaattacctgtaattatgactggcaacaaactaaagtctggtatgagcaaagttggtaagtatgttgacaaccataataagatgcatgaactgttaatgcaatatatggaagagcatactgacacttagggtaatactactcagagtactacccttaatcaagtaaatactcaagccatgaatagccaaaatgcacaacagcaacaaattatgtgtatttattctgtgccccccc

SEQ ID NO: 916 - DNA, 12631 bp, Sclerotinia sclerotiorum endornavirus 3
  source 1..12631: mol_type = other DNA
acatggggatatatattaaatcaaccattactaccatgtctaactacaccaaacccaacattaacaccatggaccaatcaccacgaaaaaaaataacaaacattattgattctgttgctctcggggctaacaacagaattatgactctcgaaaaagcctcgaataacaaacaaaaacaaacaaagacacaggaaactgataaaacagacatcagctcatttggtactagatctttaacccataccattgaccattcggcatcaccaccttcctaccttagtgatgatggcagtagcagtgttaaccataaccgctacaaagggccattggccaccttagcaacaggtgaaacacggccacatgaccgcgtggagcgaaaggcagcgacggatttcactgacattgagttatattcgggtaactctgataagttaaatgcactacagatacaaatccctagcgacaagagcgagtttaatgaagctcctaccacatttactgagatgggtttcccaaaacatgacatcccagaaccttggtacgtcaagatgttatctacattccgctctagtgacacgaatgctggccattacaagtcattacatggggtatcgcctgcaagtcaaactgttactccatggaagcgaacagacgtgccaaaaccgattgaagatgttctcgataacagtagaacccctgatacgcccacccttagttcggcacgaaagtcatgcttgtgggtagccatgcatacccttaatccgaggggcatggaacagatacctatcaacataagcaatctaaagtacctcgactaccaaaaatacaaagtctggcgagcaggtgtgacaaagggctggttagctatcgaaataagacgtgatcactccaaaaatcatttacattgcctttccggcaactacgaggaacaattgttatcaggtgatggtaaattgactggtgttatccattggacaaagatgttcactgagattaacaatgaatctcagctatcctggggccaactaaattggagcaaccctgatgcgggtttggttggtgcgaaggctacagtgctcgaaaagctagcgcatgatctaaatgtgcctctaagtatgcttgatagcggtgcagtacgagcacaactagcatctactattgcttccatgtccgatatagcagtaaaaccacgtgacacaagagtagaacaattacctaacgacacgagtgacttggttatcgaccagttaagccgcgactatggtaattttaagtttattcggggctcaagtggtagccatccacacccttaccacaacgctgctcggcatgtcattacgcggtacattgtttcacttttccctaaatcagatctgttgtatgacattggtggtaacatgttgtatcacgtacaaaatggtgattggcatgtgcactctgtattcaaagctgaatcttacgaagataagtctcgatacttaacttacactacggctgtcgttaaacacattagcgtgagaaaatcacagaccaacatcaccggggcgaccaactcgatcacccaaagcatgttgtcaaaggtgttaacagctgacaataaactgtggtgtaacagtgcgtggggtgattgccaacacgggactaaaaaccatgccactttcgccatgtctgtagatacgctttttaatattgagccatctgagctgttaaaaggttatattgcacacaaagtaattatggcaaaacatgccctgactgtgcccaaggcgtggcatatggctgactctggaacgctcatgttcgatgaaggttactggtcaaagtcagatggcaatctaaacgtggtgttcccgggtgagtcaatgacctaccagaatagtattagtttaattgatacatacacaaagcgcccattaattatgggagatagccatgccgtttactgtagagtgaatggatataaaggaccacatctgatgatagaccatttcgtgctaccacgtactcttgtcatcgaacaatttatgaaacataccatctggtcaaatcctgacacaaacaccattgtagttgtagtgccagtcattgacatacatgcaccagtcactttattaaaacaacagccatttaccatggaagcaatggtattgaatatacccttttatgaaaaattgatgaataggctgttgcaaccacacacgtgggaaggacttacccaatacgcggctggcttagttggccgtacttacggatcagccagtggtttcacgcgtcaatttgacatcactaacagggatgttaagaatcattgtttagtagcatattggtcaaacaaccgttcgcttgaatcgattcgtccattggttaagcgagctgaggttgacgtacatcagccatcattcttacaacaactttggtcatcacttaaaactttcttaactgagttggggcgtgaatttgaccccacggagaccgacttcattaaaaaactggtcagtgacaattcagaagactcaatgcatcttggcctattactagacagtgcattcaaagccatagacagtgttaatgccagtactaggttagatgtatctcattacataactaacggcatgatgtacgagacaggagttacagctacaactaagtgtgtagacattgacacttggcgtcaaaaccacgttgaggtgtcacacagcacagtgtacactttgattactggcaaggatgatatagcacctgtcacaattgtgtcatgtaaagctgctgctgcatgtcagcataatcataatgtagcccatgagcacgtagttggcaactcaatcgatcaacgtgtagggatgtgcaactgctgtggtatacttagcactctaactgaccaaaatctgtgtgcactgtgtgggagcactcgattgtgccatggcaaaagccatctgtgcaagcatgagcacacggtacttaatgatgagtgttgtggcaagccagcatgtgcctgcaagaagaactataaatgttcatgttgccaaatgccaagctccttgccagtatgtgaaatgtgccgcaacgccccgccagccaaaactgccgtgtgggacgcaggcaccatcaagcaaaccggcacgcaagcagaaactaaactaacacaaccagcacctgcatcaaatacaaaccgcccagacgtgactgaagatattagtgataaccgcagtgatgatgatgttgataatgatatgccacttggtatgcttagtgacgcttctagacactcgagcaaaacaagtgctgttgccactaacgcacctagctacatgaattttggagaccacccatcaataataccaacaaatactaatataatagatagggcagaagttcaagaaagcgctaactcgccagttgattatgatgattttgtcaatgaaggctcagacaactctgtagttagctttgaaatacctgatgacatatctaccattaacgatagggttagctcagagcgacaattagatgaactgcgtaaattagtacctattaacaatcaaccaataaatgagtatggttttgctggcttggaagctttgagtacagtatacaatgctatacgcttcaccgagagtgcttccactaaaccagtaaccaaattgacactaccgccaaatttggttgccagacagacaactgtcagtgcagtcgttatagcatacggagaggcacgaggcgatggtttatgtggtgcacatgccctcagccaactatgcgatagtgatgtagatacagtgaccataatacttaagagagtaaccggcaaccatgactggtggtctgatgttgagctagcgaaagcagcagcagttttaggtattaacgtgctgatagcaacgccagcaggatctattttgtatattaacaactctagcgtgcgccaatatgttagtatatgcactctagttagcttgactggacaacgtcattgggtgccgtgtacaagcatggtggaccagttatacacgagcgatctacggaaccagtactataactacatatttttggcaacttatgcaagcatgagccaagattcaaccaaaactgttgctgatgtacgagaagcagtagaccgtttcgagccgatcaacattgactctgctagtattgtgtcttaccatgttgattatgagtggtctagcataattgctaattacccaaatggtgttttcactaatttgggctatgaacacacatctaaaagtttttatggtcagccaatttcaaactatgttactgagggtgaaaatggtttggtaatggtatcagcaccaacaggatttggcaaaacaacgcgcatagcggaatttaacgatcagaagaaaaatcatgtagtaatatcacctagccgagctacagtaatcagcgccaccgcttactgcaatgatgtgctcaatatagcatcgcaaggtcgtgcagactcaacctggcacccaaaaaacaaaaatgactcaactctcagtagtgcgaaagtagtttatttgacagtcgactctgcatacatggcattgtgtggaagtaaaccgaatgctacttggttaaaaatgttgtctggacggtgtatttggcttgatgaggtacatgatttaacaccaaagtatgtttgcctggccaaggctttaggttctcttgttacaggtgtgttgtctgcgacactacctaatgtaccacctgtcacagacacgctacatccaatacgaactatatttgcagctcctgatcaactagacaatgacttcaatgatttcattgagcgtggtcctgagaaaggatcattttgggtagtacccagttccacgcaaacggctgttatgccggctgaacgtgtcactcaagcagtgaatagtggtgtaaagtttgctagcatcacatctaagacattagctaatctggaactgacgaccataaattcggctatatgtacgaactgtatcactactggttcaaccctacccggcttagaaaacatgcatgacttaggttataggattacccctgagcttatattcccgccatataaagccgagattaagggcattagcaagatgcggttgtttaactataagcgacaccagtatgatatgacgcagttaactcagtcaagagggcgcgcaggtaggacgagcgtaggatacgcagctatgtcgctgccagcagcagctaacatgccagctgtacacgtcgaattactatacagcttgatggtagggatcccagcaaatacacgatgtaaagatctgtatgacaacttaaaaacgaataaggtggattttgacgctattaagcgtgagcgcgatgttgcagtgcaacgtggttatgattttcaaaatgaacaatgggatgtgcttgactcatggattgaaactgtgagtgagttatatctgcacttgaaaaataagatagctttcaccgacgccatggttgacaacaacacaatatcagctgcttttatgtctgcactcaacactgacagcaagttacacattgataaatctgtcaaacgacgaattcagactaacatgcatgacaaactagtccaatatcctaaattgcataaatgcggctgtggattactaacgattctaggaaaacacggatgtggcagccaactagtattgcccaaacctgaggttgagtggttcaatatgacaatagagcagtcatatgctaatggtagtttcagccaccctaaatcaatccttgcaattgacacatcatcttcagctcgtagcgtgaacttgtcaactaagttgtcacaacagttcatgtctctctatttcaagatgctaaacaccatactacactcagccaagcatgctacaaccagtaatgttccaaccaacataacccatggtgtcttgtttgaatgtatcaacagtaataagcacgccgatatttctgaattaaaacacccacataaattgaacaatggatctgtgttaggagtatttgatagcaacacaagagaactacgcctagagtgtgtggttggcacaacaatagattgttcagtcacttcaccacaggccgtagtaattctacctgtacatacagcaaactatgcattaggtatggccctcgctagcttaaccatgaatatcacgctcaatactgctatagcagttgctacgcgctcaacaattatagttggtccacctggctccggaaagactcgtgaattgcataggttgttcgatagcgaccaacacactaaaaggatagtatcaaaacaaactggacaaatatctgagttcaaaaacttgactgtgccaccaacagctgctatatttgcagataacgttgaaaccatatatgttgatgagtttggtttgatgacagcatccgatattttattgttgtctaccaagtgcaatgtgatggtactatctggcgatgtaaaccagaaagttgctgacgatactgacttagacacgtcgaccacactcgatctctcttggtttagggacaatgtagggtctacgaccgtattcaatgagtcttggcgcttcgggtctaaaacggcttctgtattgaattactttggcacactaggcccgtgccacaacgagaatgacaaaggtatcggtatggtgcaatttaactggctcacaaagaagaatatcaactcgattataattgaccatgacatacagttaatcataactcattctaacgctctggtaatgcagataaaacaaatactaggcccaaatagtaacattaattgtatgacaaccggtcgtgcacagggcagccaagaaaagcgcgtattgtacgtagcttatggtaatgccagtgagacatacacggcagctgaattgtatgtagctctctcacgacatagtgaacactgtataatagcagcagattacacatttgaagctacagctaagacatatgggttcaataggcacatgcaaaatgtagagacaatgcggtatggtgctaccatagtgccaaaaatccgtgatctgagtatgagttacatcatggaagcgtggtcaaacatacgatataattatcacgagtttgcggaacctaaatacaacaaagcatttgacaattacgttgggtactataacgctttgacgcactgtgctgaatacttgacgaatgatgtatcagataccaatgggttagatatcagtatatctgcttgtgtgatttacaacaagttgtaccgtggtgtcgatgacagtgaattcacacaacctctgacaccgcaacacttagaagtctataatggtatgacaaacatattcaacacgtttggtcccggaatcacagtacctgtagagagaaccgctaaggtaatgagtgaatacctaaggcctatcgctagtgtaagacagtatttcattataccattttcgactaatgtgaaactagttggtaatgctaataacttcacctcatacgcgctgtgtaatgtgctgacaggtgaaattgtgatgacacaaactaacaatctaacattccaattgcctacagccaactctctccggtcttttgttgaatccatgaagaatagtgttgactgggataaagatatgtgtgtacagatgtcaataagtgaaatactcttccaacgcctgaagaggagtattgccaagtcatatcaagagatgataaacgcatctgagtctatacataattatacgatcagtaacatgccaacactctactcgctgtcatgttgtaaagtgacaaacttgcccaaatcgctaacactgtttgaaaccatagctaatagcttacagactaactcaccatcacccagtgcgatgataactaaagtctatctcgacgctgtcaatcaactagttgaaggtgacacgcctagagggtcgagcctaggctatgcgacattatctgaagagctcatatatgatgctctagtgagcatactgcgtgagttttatgtgcatgataatataagtttgttcatttctcaggtgtgtgatattactgcttcaagttttgaaatcagtgagccctcaaacaacacacatgtattaacactaccaataaagcgtctgcatcaaacggtagaacatctccataaacacatccataacgtagtagttgttgatgtgaaacagcggaagataatcgccactcttgatataccgcctagcactgaacactattggcacattgatgatttgtataagagaacgcacgcactattagtattggggctattggatgaccaaatcaatacatacaataactataaattaagtgatgttctctcaaacatcaagaaaacagcgaccaaagcaattacggcccaagagcagtttttttctaagttgctcaagtatataaaaaatattatcaactcactaggtgtgaaaatgcgcaaagggaaagaaatgttaaacttatgcggtttacaacaattgtttgcagcacgaatgaagcaatcagataaattcacgcaaagtgcagtgaaggcgcgatttgactcatattcactagcaaccagcacgttaaagaaccatgcgatcaaaggcttacagcacctagtattaggccacatctccgaacattatgatattgatatcaacaagcaattacagagaacagttgcttctgcagtgagaatgacacatgacaatcgcgcaggtgatgatagctcaacatctttactattacggttgtactacagcttgaagttctatgcgcagggctatgagtcgggtgctgctgatatcatgggttatgatgtgttcaatattggtaacgtgaaagtgactattaatgaatcattgccagtaatgttattacgacggctcaatgatgatgcgcgtagtagtttaatgggagaagctagtcgaaagcaaacagttaaggcaaagcgcacacaagctaacaataccaatagatgggatgggcaaagtgtaggcctgtccataaagcggatgtttgctactgatggtggtaacacgtctgatgatgcaccttttgacgacctcctgtatgaattgaaggcgactctatcagacagtgtgtctgtcaccacattagaaaacgccaatagacatggaatggttaaacttaattcacttaagatggtacttgccatgtatcctagagtaacaacaaccatgttgactgtcactaaagcttactatgagttatataatcatgtatttacgccaatgctggcagtactacagaatacgataggtagaagcctagtcaaggtaaaaaacagtattgtacgctttttggaatatgatgctactcttgctgatgctaaattagagatacaggatctgcgcgattcgttagatagcgtgcgtcagagccccgtgctcacatcacttgaaccgacaccagtcagtgacgatagtagcgaagctgagtcatctatgtacgaagatgcacatgatggtatgagcaacaagatggaaccatcaagtacagacaaaatacatgagaactcagtactggctgaatacgtcaaacaacaactcatggcaggtaatgggtcaatagatgggtcgctgttcactacctgtgggagtgatgtcaaaacaaaaatggtatacagtcagagaaagaagtacaaatcaagcatgtttgttaaatgggaacatcaagaaaattactcaactgtacatgctagaccgttgccaaaaataaccatgggcacattagatggtgtcatttacatggtagttgacaaagttgctctaaaattagtacccacgtatgaaggttacaaaatatggtggaatgatgcaaatgcactcaagaatgaaaacaaactctgcattggtttaaatttgttaacacgaatagctggtgatagtgctggtgacgtaattttggcattgatcacaaaagtgtttacagatgttatcaactggtgtagactcactaaagatgaattagtctggaaaacgaaatatttggcaggcggcgtatgtcgcgctaaatacgactattcattctctacaacctccttataccacatcctacaagacagcaaaccatttaggcgtctaatgtgccatgacacaaggtcaagattcataatggttggtgacaagatacacataacaaggaggacggaagcattggtgctagattgtcatacttatgctgtagcatgcaatactgctacaggatgttgtctaaccatatacagtgcattacagagccgtattgatataatggtacgagctattgaagcaaacatggtcgctggcttgtgtgattatactgatagagctggcaagtcaggattggatggattgcgcaagttaggtataaacattgattcgaacacattgagtgacattgacttcgctaaatggaaagagattttacgagatgcacttgaaaacaatcctcttagcgctatatttgatatgggcctagatgacacttttacgtctttcaagcaattaatggaaagtgagaaagcgatgctagatatagaaagcagggtcgatagtactattagtttgcttaaatctaaagtagctatatgtatgccaagtggacatggtaagacaactcttaaaggaacactacagagaaagtacacgtctattgatgtgtatgatgctgatgactatattactgacgttgatgccttagggtggtcaaatttcgaccgcatgatgatgcaatataagttgcgcctgtcagatgctgttggtaactcggggaataataagcctaagttggtgttgtgccaccaccctgatgcagtcccagatggatttagcgtagttctgtttatgaataaagaaacaccctacacaccagaacgtttatggaagcgtaccaatgaagaacgcttgctaatggcgcaagacagatatccgctgtacacagtatcgtttgcagatatggaacatcaaactatgttatttatgctacgttctggtgctacgccgagtatcaagttgcatgcgaaaagtgagcttgttgacccgatgccgtacagtgaggcggagcaatttttccaatcgcccggaccagacaatctgtggcacatgccaatacaagggaggctgggtgttaatgatcataggctaggaaccgcacagcaagtaatttataagcaagggccgcatgtcggattgtgtaggccaacggttcaaatgttatgctcaagtactttcaatgctgtctcatcacgtttgcgcggcatagagcatctacgtaaagtcaatttcagtagggaagaatatatggtaaagatgagctattggttcaaaccaaactggcgtgatatactaagggactaccaaaatgaggtagttatgccgagtgtttcagcatcactcgagtgggctatcaacaaagggcacaaagttgagctgatacgcgatatggctgaggcagtcttaaattacgaacgcgccatagaatatacaaatatacaagcacatttcaaagtagagaatctcatgaaagaaaacgtagatgagctagaacaccaacttgggcgtatcattgtttggaacaatcaaaatgtcaacatgatactctgcccaattgttaatgaatgtaaggctcgatttaagaacctgttcaatgacaatttgctaacgtacacagatggcatggacatggtgtcacttaacaagcacctcagtaaaaattcacgctcaaagtatatgattgaactagatctcagcaaacaagacaggcaaacagataaacaaataatcgattttgaacagtggttattaacagagctaggacttgatggcagggttgtacattatatgaatggtatactggatgggtttagcttaaaaacaccagataatgtgacaggtttcatgccaacaatgcacttgtctggtggcgctatgacatcactagggaatgagatgcgtaacttgttactcttatctgacatatgcaaaggcaaagctgtaaaccatgtgtacacactgggtgatgatagcctgatactcacggacgatgattttgacggtaaatacgttgcaatagttgcggctaataaccacaatgttagatgtactttcactacatcagaagattcaggagtcttcctacaactcattgtgatgtgggtcaacggtaggtacatagccgtacacaatttcatgaggctaaaggataagttagcatattcaccatacaacgcagatagtgatgagttcaagtcgaagaccgcgtcgtacttattaatgattggaaaccattatttaactagcaagcgactccttgagctgggattcaatggaactgtcccgttagggacaactatggaagacaggctagaggcaaatgcgttacataacaattgtgatgtggcagatattctaaatattatacatgatattgtagtggtttcatatggtaaacatgaaagcaaaatcacgattactggtgtaggcgtgctaagttaccgccatctcaagagcggtatacatatgactaaaggccggcagagtgacacatctttattagcatcgttccaatcagcagtgcaacaagagttggacagtaactaagccaaccaatatgcggataacaaacagaagagagtcgaaggtagataaccttttttaaccccccactatatttt

SEQ ID NO: 917 - DNA, 11543 bp, Sclerotinia sclerotiorum endornavirus 8
  source 1..11543: mol_type = other DNA
caaacaaccaactaaacacaaacaacactttacaacaatgtcttaccaaaccgctgccacaaattcaaacaacaacaagaggagtcttggcctcctccctaaatatttgccaagaaaaaatatgtcacgatctgatgattttatcaatatggatagtgacacttatgccatgacaaacagcaaggtgtccagacacaaccaccctaagatatccaaacttagcacctcattgagaatcatgagggaagatgtgtatgggccacttggggcaattagttcaagaagaaattatgtttacaaagacttgatatgccataaatgccttgatgaacataacaagatctgctctgatgaggataagctcacttatgataatttcgcaaaatataggaatgatatcaaaagtcgaaagacaattggtggctttatctataaatcatacttccacctgaaacttgattgtgaaatcatcggtaattataaaccagttttccctttcttgaatgagcttattgagacaagcgtatcatttgttgcactcattaacctaatcgaacctgagaaaactgttaaaccagtaactgatccagttgttggcggtgacggcttctgttggaaaaaaatctttcctttctcaaactacggtaaattcatgacttatgctcattttaagcaacagttagaatttaagtacaacggagtcttcaagatgtacgttttacttatcatgaccgaggatggtaatttacaccttgaagatgttcagagctttggtttcggcaaagatgaatatttaggccctgaattagcacgtggtgctgaaactgccattggtaaagcagcgccaccttctgcttgggtacatgtatgtaaattacctgaatcgcatactgacctgccatgttggaatgacagcctccacaatgttaaaattgaaacacgcgaaactgaaccaaatggtttaatcagcactaagttcatgaagattgaccagagtgacaacacattaccacatgagctttggaatccgaacaaaactcttgtccgttgttcaattgacaaccttattgaaacattagtcagcaaaattggaaatgacaaaacccagaataaatattcaactatgcggtacggtctttgttactacagtggagttcttgttatgtatagatggaaatttgtcgatgccttaagtaacttcaccagacattactcgattgaagagtttaccgtgtatttgcgtacacttaacatgcaagtaaacaaatttaaagagatacgtggtttatcatggctcaaagaaggtattgttagtacagagtctgatgcaacagatgtgcggctgagtattgatagactatccgacgccaccaacatttatatgaatggttggacaaatacaactaggtgtgctctcgttggatatacaccaaaaaccatgcttgagaagattgcaaatgatatcggtctcgatagtagcatggtcaatactaatcaattgaataatgctattagtgatatggttaataaacgtgttacaaaagctgttaccaaacatgttgataatgccatcatactacctagcagttgtcctgacgatatagtaaatgatctcaataatgaatttggtaatggtacttttatgcgtggcaatacagctcatcactcacatgtctaccaccatggatcacgtgtggctgttactaacatgctatacaactggcacccacgtgagggcttagtctatgacattggtggcaatcccaatgttcacctaaatgctgggcatttcaatgtccatagtgtttacagcacaaacaaagcagctgacaatgctagacacatcaaatgggttaaaaatgctacaagctgggcaaaacgtaattgtgacgttgccaaacaaccaagcatcatacctggtatggcaaaatcaatattgtccgaccaaaatggcgtctggtgtgataaaggattaaaaaactgcgtccattccaacaaggctggttcattcgcaatgagcattgatacaatttttcatatcccgttggaagaactctttgatttttatgtgagaaacagagttattcatagtgtgcatgctctaacaataccaaatgactatagttatagatcgtccggtacattgaaatataatgaaggacactggtacaagaacaatgacgtatggaccattgaatttaacggtgaaagcttaccgtacactcaatctattgataaaacaaacgtcttattaagcacacctcttttcaccttaggagaactagttatttattgcaagattggcggccgacgtggtgcacaccaaattattgaacattttaccttgttacgatctgaactcgacagtctatacgcacagcatgttatgtggtttaatactaacatggatgaattatttgttatgatccctagaattgacatggataaatctaaaacactgatgggtagggaaccattccatcttgaacaagtcgttataaatatcagattttatgaacgactactcaatcgtctcatgcaatcttacacatgggaatcattactcagctatgcagcaggactaattggtagagtatacgcaacgagtagtggtttacatatgaagtgggatttaacaaatgcccaagtacgtgaccattgtctggtagcctactggagcatgaaccacataaatgagtcagcaaaaccattaatccagcaagctgagagatctaaccgtgatccagatttcctcactagcttatggcattcactgaaaaattggattaaagactttggttcacaatttgacccaactggctccaatgttatacaagattttattgcgtacaataagggtgataccctcaagctaattcaaatgtttaataatgcatctaaaagtgtagaatctttatcagttgcaacccaaatggtacactcacgcagcatcattgactgggttagcactgatcttggtatgatttatgaaggtgttaatattagtattgatacttggcgactaagcacacaaatgcaagataaattgccaaccgtatacgatttattaacgtaccaatcatctgagaaaatgtataaacgaagcttgtgtgctccactacctagctgcactcataaccacgatactctccatagtcatgttactggcccgcaaggtaggtcagctaaatgtgtctgctgtggtatatttagcaacatcaacacaaacggtggttgcaacctgtgcagtggcagtgcaccgtgcaccagaaaaaacctgaaatgtcagcatgaacacacaactataaatgatgagtgctgcagcaagaagcaatgcacatgcaagaaaacttttgcatgtctatgttgtgggttagattcagtaggttgctactgtaatgtgtgtgaattatcgccaaaaaacaatattgtgacacaatcaggaaaaccagcaacaaagcaacaaaattaccaagccgctacaaatatgcctaacgcaacaaatgatacgaacacctatgacactaaggctactggcccccccgagctgtcccgggaattcggatttaaacaaagcttcaacagtgacaataaaccagaaaccgacaaaatgtcagaaaacaacagtgatgaagacactatcacagaaccaaaaaattctatattcaccgccaaaccagctaacgatgaacccagtatggcagctgagaatccaaatagtggtgatgttaaccccagtgatgataatgatgatactttcaaatttgttaaagctaagctggctccacttgatgagctctacgctgatagttctatcattagttatcctagcccaatcatcaacattactactgaagaaagagattacaaccatgccaacattaacttattacctgaaaattacagtggcgccattggagtaaaagtagtcaattatgttaacgtacctggggatggccattgtggtgctcatgcccttgcccgtgcactgcacatcgacgtcgaatctattaaaaaatggttctcaatagcgctgggtcatgatgattggaatagtagtgatgaactagttgcatatgcgcaatcaataaacaaaaatattatcacggttgaaaaagatgctgctatattgacaagatccaatcaggatgatacagcaattgccatattacacggatcgttgattggccttggtatgcattgggtgccatgtgaatgtataatcgttagctatgcgtccatgtttaatgtaagaataaatcatacattccaagatatgttagctgctctgccggctactgatgtgatgaatgatgaaataactgcgttcactttcagtcacagccgcgaaaatttaagtaagatacttgctattggtcagtcattggtagttgattacgattacatcagcgtcaaaacacctggccactccaccaacccgatagtaagtgaccacaacacaaacggagtaaaattcattactgggcccacaggtagtggtaagacaacatttgctcatacattgattaagggaaagatattgatagtaaccccgttacggagtgctgttactaccacatacaactacatggcctcaaaatataaagtttgttgcaggtcaaacagtgaatgggcaccaactgaagcaaacaataacacttgccataattatgacatagtgataatgacaattgaaacattatatgcaggtttattcagtcttgagcgtggcaacgaaacttacacacaactcattaaaaatcggagcatcatatgtgatgaaatacacgacttgacaccacactatgctcgcattttaacccaattgcctgctcataaaacgtacctttgctcggccacaatccctggtatttcaacgaactataccaatacgtttgataccaccactagtttcctggcaaacggaacttttgacaaatggtttaacaatgatattgcaagggatgacatcaataatagtacatgttatattgttggaactaaaaatgaaactaacctatttaaaaacaaatccatatgtgcgttaaatagtgacactctaaacagaattgatgttagtaacgcaagcaaaattgttgctacgaaaattgctgctacatctattaccttaccatctattaaaactattatcgatagtggtgtacgcatctatgctgaaattatttttgaacctaccatcaaagacaaaactattcggttttttaattatacaaaatacaactacagctggcttgaaatgattcaatcaagaggccgcattggacgtgtacaggacggttttttctttggtaattgccctagtgattctactccgctatccgtggacagtatgttgctatacagtatgtatactaatacaatctgtccctcatcgctacagtctatatgggcaagtattacgcaagctaattacaacaaaataaaatctcaaattacaaacttatacccaaccgatggcactacaccagaatgggacaatgattttacagcgtggaaatccatttacaacgaattattagttggaaaaaaatcaggactccgacccaaattcagtgatctagaatgcagtcttgaaaatattatgctaaacttaggcaatattgttggtgtcagcaatgtcacaaaaaaaattggaaacagtattatcgaaacatcagtcatgtggaatgaaattggctttgacagcaaattactcaataacaataaaattgattttaataagctcgttgttaatgtcaatgattcacaaagcttgattaacattaaaacagataacaatcaacaactttcagagaaattactcttaatgacagtgtcaacgatttttgaaactatcacagggttaattgcatccggtagtgctatagtgaataagaacacaacagccaatcaggttggacaatttatagtatatccaaacataatggcagctgaaaaaagtcttggtattaagctgcgcgataatgaaattattggaatagtcaacaactcgactaaaactataactattaatattgttaagaacatcccaagtaatgatacgatgatagtagtatccaattatcgaaccatacattataaagctgaaatagccgccattgaagcaataagtgattcgaaaaataacattctacagacgcttagtaatagtaccatctacttcggcgctccaggaactggtaaaaccactgcaatcatgaaacatatggaaggtcattatcttactacaacgaacactcaaatgttgatgaaaaataaatcatgggtgcctcccaacgcagtcccatttaaccaaaatttggtgttagttgacgaagttggcctcatgtctgtcacaactatattgacattagcagctaagtgtaataaattgttgtgcacagcggaccttcagcaaatggtaaacacgcacagtgacacccatactatgtacagtgggtatgagtcagggcttcaattgttgaaaacatttagcagaaatgaagagctaacactaacgtatagatttggccctaaaacttgcgcaatggtaaatagattgggtttcaatctaaagtcagccgttgatagagatgagaccattactagctcaattggtaaagtgagtaataaaaagactattagcaatttactgtttgagattaacccagatttaatcatatgtagcagcaacgctcttgctagatatgtcaggcagatcacttctattaacacctgtaattttgctaaatgccaaggtttagaagttgaaaatgttttagtgctaatagataatttacataataacaaaaaagatgccaatgttaatgaattcgcaagtctgtacgttgccttaactagacacacgaagagagtacatatccacgtatcaacaaacgatgcatcgctactcaaaaccttaaatatcgcccccatgctaggtgagatctcagtaaacaacaatatagggggcagctggacattcaattttgatatttatggcaaaatgttagaggctattgttgacgatttatgcaaatccaattcttttaatgacggtatatcaattttgcgtgagtggggctcaggatatataacgagcaatactgcactactacgtatggataatttcaataccaattatgatccatcgacgctcatatttaattcgcttcatacggatgtaacaactggtttagaagtatgcagtgttagcttatttggccatagcatttatttatttaaattgttcctagatgataacaaaaccatagttgagttgttgactagtggtttgcctagtggcacagttgtcaaaaaatttatgattttaatagggaaaaaattcattaaaagaaccggtagagtaacagctaaattaatatctgcaattgcgtcaattatgagtataccgcgtgagatatatgaatttgttatgtcatttgacttggaagacaaacacaatattggcggcggtatcaatattgggcatttgtttgggatggcattacttggcattaaaaaagcagttgtactgttaatacgtataacaggatcaatcaaggacaaagtaatgagcagcgttgacggcaaattaaccgcacaatttttaaaagactacttttacgcatattttaacaccacctacagtagtgacgttgggggtggagtgtggccatcaaacattgttaacctgttccacgcatgtaatgagaaagtatcaaatgccgcaacccacatatacgattggatttgcagtatcattaaaaaaatagtcgctttcatgtcaaaaaacaataaggatggtgatgtagtaaacgatacacacattggtactgatcaacaaaacaagcaatatcatgaccacgacttgaaagaccggtcaacattagcgaaaaatacggtgggcaacgcaattaacaaaaatagcagaaaattgtcagttaccttcaatgaacaagccataaactactataatgatgggaacaccgaatacaccaatcttgatggtgaatcaaaaaaattgtcaagggcgcaacgggctaccttgcaattaaataaacaactaaatatcagtgataaagaaacaaactcaccaatacttatggattgcgacacagatgagtggactgatgattatgagttactgtttgactatgatgagattgtcagcgaacttggtgccgaaagcagtcaaagtttaactgatgctggtaattgtgaaaatagaaattatgattataagacacaagccagtgcgtctcataatgctactgataatgatatagctgacttgaccaccttgaataaaaatttaaatgtgaacgacacaactaaaaaaattgaggtaaccgaaccgcaaagctacaacgatgtaagcactaaacccagcagattggaggcaacaaaattagcagactatacctatataagcgacgtgaaaacaaagctaaatttcaacacatttaggcctaactttgttgggcgtatggtaatgactgttaaagaaggcaccatagttgctaatattaatataccaggagcaggaaaattcggaattacagtaaccaaattagaaactgaaggcgagcataaaataatagtgaaggataacaattctacaactgatctaataatgattaaaaccgatgatgggtatggtgtttatagtcaccacaataataatgctttcagcatggaagcttttggcactgctattaaacatatttccaaattgggtggaggccaaaatgattcagcaattaacttaatcaatgatatacttaaaactgtataccagtttgggaaaaaactaatcaaattgagctcatataaaatattgtatgtagctggcaaagttagtcaacgctgtttagtttccgataacgattgtcttaccacatacagaaagttgtgtaagcgtataccaacatgttacaagttttcaaaagaataccaatactcaacaagtggtgggacaacattatcaacaatcgagattatgtccacaaacaacagcccaacgaagctgtttattgggatatttgaggtgttcggtaaaacacgtgtcgttctttattcaaataatgttggtctgaccaatatattagaacgactattgctgacaaccaatgcgcaagcgtacaatgatgagattggcggatccgatggtgcaatatctgcattactcaagctcggtatcaatgtcaaagacatactctaccataataatgatttaggtgttaatgacattaaaaaatggttatacgctaaccccctaaattcaatgttcagtacatcagatgaaccaacgcatactagctataaatcactactgtaccaagagatgcatatgcatagtgaacttcgtgataagttagataaaactggaactagcaaaaggaaaattgctttctgcatagcaagtggccatggcaaaaccacaactgtaaaccgcatcagaagacaaaatcttgaattcaacatcttagacgcggacgaagttcaagagcaagctaacatattgctgttgccatttacagataaaatgcttaattacaaagctaaacttgaaaaatatagtgctgaacatccacaacttgatgctatgtttattcattcaccaatctgtgcccctagcgggtacaaactcgttacaatattgaacgacgctgcagtagtcccagttgacagagtgtggtcagaagacaatgtagaacacctcagtaagtacggttctgttactcacgttaatgggtatgaggacctgtataaactttgtgttagttatttaaacaaaactgctacaggcgatatcacgctcgagaatggagcaacgatagttgacaatattgactcgatattgggctatgattttatgcataaccagccaggatttgatgatttgtttagattaccagttgggtcacaagatagacttgaatttagtaatggtaatctaggattagggcaacagcgcgtatacgtcactggcgcacacgtcgatgtgatgcgaccaacaatcagtaagttaccttcagctttgccgaatgccatcacgtctagactcatgggtagacaaaaattgcgcagtatgcatatgactattgatgattatgaacatttaatgtcaaaaatgttgatcaaagattataagactatgttagagatattttcacaagacacaatatccatcaactatagagacatactagattggttagtaaacaaaggaaacaaactgcagctactagaaacgatgcttaagaaagtcgttaatgacgagcatgctactgacccagctagcataagcgtgcactataaggtcgagaaccttatgaaagagcaagttaacgacatcttagaccaagttggcagagtcattgtttggaataaccagaatataaacatgtatgcttgtccattaattaatgaggcaaaagcacgtttcaaaatgatgctcaagccagacgtcacatatgctgatgggatgacaattgctgacttaaatgaatcaatatctaaatatagatcaaaatggctattagaaatggatctgtcgaaacaagacaggcaaacagacatgccaattctaaaatatgaatgggatctaatgagacggcttggggtaccagaagattttattgagtttatgacatctttcatgccaacttttaagataactggttctaacaatgaaaaagcaaaattgccagctatacattttagtgggggtgctatgaccagtattggaaatgaaatacgtaacttactgctgattgctgattgcgtgggcaataattatacagccatttatacgctaggggatgacagccttgtactaatggacagtaagcccgacttagaatactatgataggatctgcaggagcagacacaacgtgataaacacagccctatgtgataaacagtgtgctcttttccttcaaatgattgtcaaccgcgatgctgatggaacattttatttgtcacacaatttccaaaggttgaaagaaaaaattgcgtattcagcgtatcctaattcaagcagtgattggaaaatgaaatatgcagcatacctaatgatgattgggtataccaaacaaaactacaatgcgatgatcgagatggggtttgcgacatttccacatttgggcactagtatgtcgcaacgagtatcggccaatgctatatacaataaaatctctgaagtgtcagtatttaatttaataaatgatataattcagacgaaaaacgtacagagtgaggaaataattatcgacacgacaatggtaatgactaagagcaatctgctaaatgggtataagagagttgggccttatgttgataatcatgccactatgcttaatactttgcaagagtatttcagtgagcataactaatgcaaatactataactaatgtcagcaaaatgcgatacccacacttgcatgtttgaacatatgcaacccattatgaatacaaccagatatatctataaacaaactaccatttagcgttgttgtttggtatatgtggccccccc

SEQ ID NO: 918 - DNA, 13562 bp, Sclerotinia sclerotiorum endornavirus 9
  source 1..13562: mol_type = other DNA
cgatctaactacaccaaatctaacaccaacaccatgaaccaatcaccacgaaacaaaataacaaacattattgattctgttgctctcgaggctaacaacagaatcatgactctcgaaaaagcctcgaaaaacaaacaaaaacaaacaaaaacacaggaaactgataaaacgaacatcagctcatttggtactagatctttaacccataccattgaccattcagcatcaccatcttccaaccttagtggtgatggcggtagcagtgttaaccataaccgctacaaggggccattggctactttagcaacaagtgaaacacggccacgtgaccgcgttgagcgaaagacagcgacggatttagctgacgttgagttatattcgggtaactctgacaagttaaacgcactacagatacaaattcctagcgataagagcgagtctaatgaagctcctaccacatttactgagatgggttttccaaaacacgacatccctgaaccttggtacgtcaagatgttatcaacattccgctctagtgacacgaatgctgaccattacaagtcattacatggggtatcgcctgcaagtcaaactgttattccatggaagcgaacagacgtgccaaaacctattgaagatgttctagataacagtagaacccctgatacgcccacccttagttcggcacgaaagtcgtgtttgtgggtagcaatgcatacccttaatccaaggggcatggaacagatacctatcaacataagcaatctaaagtatctggactaccaaaaatacaaagtctggcgagcaggtgtgacaaaaggttggttagctatcgaaataagacgtgatcactccaaaaatcacttgcattgcctttccggcaaccacaaggaacaattgttgtcaggtgatggtaaattgacgggtgttatccattggacaaagatgttcactgagattaacaatgaatctcagctatcctggggccaactaaattggagcaaccctgatgcgggtttgattaatttttaccacacgttatttcgtagcactaatacttcaatttcaactagtctgtatatacattgtgagaaatctaccatgcgggaactcatagattaccagtatccagggttcaagcaactcggtaagacgtttgctttgccagaaccgttcccaacccctatgccgctgggcgtcttaattgaacattttaaactcaagattaacctgaagaagggccagcaacttacatctatattgcgaaatgccaagcaccattacacgcttaccttaattgaccagagcaatattgagttgcgtaaagtacctgcaacgtttgatgactcatcacatctcagtttcagggcactcgacacaatactgtcaacgatttacagcatgtctcaagataggcaattagctatgaacaaccagaaaaatcagaaaatattgcctaaacctatggtaggcggcaaaggtgactgttggcaacaaattaccatgttttacgcctatactgaactatggtttggacgcacagatcgcagtgatgctatgcccatggaagaactttatgagataatcaagaagaaggcacttgttgagtacccaatgtttaggtttacgcatgagggtgacaacatgtaccacgttgagtatgttggtttagataggacccataagccatcctacaaagaaatgtggactgaagaagaatatgcagaaatcatggctgaagtcaaagtcaaatacgcagggtgttacagattaccggatttggctattgaatttaagcggataattgaccaaaaagaggctgagcacatgtcagtcgaaatcgacttggcttttgagtgcacagcttacattgacaaaatgtatgatctattcgtacgtgatgattatataactaccgaagagattgataacgatgtagataatttcttcaatgcagttgaagccgtgttaacgcaatatgagggcgataacatgctattggttggcgcgaaggctacagtgcttgaaaagctagcgcatgatctaaatgtgcctctaagtatgcttgatagtggtgcagtacgagcacaactagcatctactattgcttccatgtcagacatagcggtaaaaccacgtgacacaagagtagagcaactacctaacgacacgagtgacttagttatcgaccagttgagccgcgactatggtaattttaagtttattcggggctcaagcggtagccatccacacccttaccacaacgctgctcggcatgtcattacgcggtacattgtttctcttttcccaaaatcagacctgttatatgacattggtggtaacatgttgtatcacgtacaaaatggtgattggcatgtgcactctgtattcaaggctgaatcttacgaagataagtcacgatacttaacttacactacggctgtcgttaaacacattagcgtgagaaaatcacagaccaacatcaccggggcgaccaactcaatcacccaaagcatgttgtcaaaggtgttaacagcggacaataaactgtggtgtaacagtgcgtggggtgattgccaacacgggactaaaaaccatgccactttcgccatgtccgtagatacactttttaatattgagccatctgagctgttaaaaggttatattgcacacaaagtaattatggcaaaacacgccctgactgtgcccaaggcgtggcatatggctgactctggaacacttatgttcgatgaaggttactggtcaaagtcagatggcaacctaaacgtggtgttcccgggtgagtcaatgacctaccagaatagtattagtttaattgatacatacatcaagcgcccattaattatgggtgatagccatgccgtatactgtagagtgaatggatataaagggccacatttaatgatagatcatttcgtgctaccacgtactctagtcatcgaacaattcatgaaacatactatctggtcaaatcctgacacaaacaccattgtagttgtagtgcctgtcattgacatacatgcgccagtcactttattaaaacaacagccatttactatggaagcaatggtattgaatatacccttttatgaaaaattgatgaataggctgttgcaaccacacacatgggaagggctcacccaatacgcggctggcttagttggccgtacttacggatcagccagtggtttcacgcgtcaatttgacatcactaacagggatgttaagaatcattgtttagtagcatattggtcaaacaaccgttcgcttgaatcgattcgtccattggttaagcgagctgaggttgacgtgcatcagccatcattcttacaacaactttggtcatcacttaaaactttcttaacagagttggggcgtcaatttgaccccacggagactgacttcattaaaaaattggtcagtgataattcagaagactcaatgcatcttggcctattactagacagtgcattcaaagccatagacagtgttaatgccagtactaggttggacgtatcccattacataactaacggcatgatgtacgagacaggagtcacagctacaacgaagtgtgtagacattgacacatggcgtcaaaaccacgttgaggtgtcacacagcacagtgtacactttaattactggcaaggatgatatagcacctgtcacaattgtgtcgtgtaaagctgctgctgcatgccaacataatcacaaggtagcccatgagcatatcgttggcaactcaattgatcaacgcgtagggatgtgcaactgctgtggtatacttagcactctaaccgaccaaaatctatgcgcactgtgtgggagcactcgattgtgccatggcaaaagccacctgtgcaagcatgagcacacggtacttaacgatgagtgttgtggcaagccagcatgcacctgcaagaagaactataaatgttcatgttgccaaatgccaagctccttgccagtatgtgaaatgtgccgcaacgctccgccagccaaaactgccgtgtgggacgcaggcatcatcaagcaaactggcacgctagcagaaactaaaccaacagaaccagcacctgcatcaaatataaaccgcccagacgtaactgaagatattagtgatagccacagtggtgatgatgttgataatgatatgccagttggtatgctgagtgacgcttctagacactcgaacaaaatgagtgctgttgtcactaacgccccaagccacatgaattttggtgaccacccatcaataataccattaaatactaacataatagatagagcagaagttcaagaaagcgctaactcgccagttgattatgatgattttgtcaatgaaggctcaaacaactccgtagttagttttgaaatacctgatgacacatctaccattaacgacagggttagctcagagcgacaattagatgaactgcgtaaattagtacccattaataatcagccaatgaatgagtatggttttgctggcttagaagctttgagtacagtgtataacgctatacgcttcaccgagagtgcttccaccaaaccagtaaccaaattaacactaccgccaaatttggttgctagacagacaactgtcagtgcagttgttatagcgtatggagaggcacgaggcgatggtttatgtggtgcacatgccctcagccaactatgcgatagtgatgtggatacagtgaccacaatacttaagagagtaaccggcaaccatgactggtggtctgatgttgagctagcgaaagcagcagcagttttacgtattaatgtgctgatagcaacgccagcgggatcgattttatatattaacaactctagcgtgcgccaatatgttagcatttgcactctagttagcttgactggacagcgtcattgggtgccgtgtacaagtatggtggaccagttatatacgagcgatctacggaaccaatactataattacatatttttggcaacttatgcgagtatgagccaagactcaaccaaaactgttgctgatgtacgggaagcagtagaccgtttcgagccgatcaacattgactctgctagtattgtgtcctaccatgttgattatgagtggtctagcataattgctaattacccaaatggcgttttcaccaatttgggctatgaacacacatctaagagtttttatggtcagccaatttcaaactatgttaccgagggtgaaaatggtttggtaatggtatcagcaccaacaggatttggtaaaacaacgcgcatagcggaattcaacgatcagaagaaaaatcatgtagtaatatcacctagccgagctacagtaattagcgccactacttactgcaatgatgtgctcaacatagcatcgcaaggacgtgccgactcgacctggcacccaaaaaacaaaaatgactcaactcttagtagtgcaaaagtagtttatttgacagtcgactctgcttatatggcattgtgtggcagtaaaccgaatgctacttggttaaaaatgttgtctggacggtgtatttggcttgatgaagtacatgatttaacaccaaaatatgtctgcttggccaaggctttaggttctcttgttacaggtgtgttgtctgcaacactgcctaatgtaccacctgtcacagacacgctacatccaatacgaactatatttgcagctcctgatcaactagacaacgactttaatgatttcattgagcgtggtcctgaaaaaggatccttttgggtagttcccagttccacgcaaacggctgttatgccggctgaacgtgtcactcaggcagtgaatggtggtgtaaagtttgctagcatcacatctaagacattagccaatctggaactggcgaccataaattcagctatatgtacgaactgtatcactactggttcaaccctgcccggcttagagaacatgcatgacctaggatacaggattacccctgagcttatattcccgccacataaatccgagattaagggcattagcaagatgcggttgtttaactataagcgacaccagtatgatatgacgcagttaactcagtcaagggggcgcgcaggtaggacgagcgtaggatacgcagccatgtcactgccagcagcagctaacatgccagctgtacacgtcgagttactatacagcttgatggttggcattccagcaaatacacgatgtaaagatctgtatgataacttaaaaacgaacaaggtggattttgacgctattaagcgtgagcgcgatgttgcagtgcaacgtggttatgattttcaaaatgaacaatgggatgtgcttgactcatggattgaaactgtgagtgagttatatctgcacttgaaaaataagatagctttcactgacgcggtagttgacaacaacacaatatcagctgccttcatgtctgcactcaatactgacagcaagttacacattgataaatctgtcaaacgacgaattcagactaacatgcatgacaaactggtccgatatcctaaattgcataaatgcgactgtggattactaacggttctaggaaaacacggatgtggcaaccaactagtattgcccaagcctgaggctgagtggttcaatatgacaatggagcagtcatatgctaatggtagcttcagccaccctaaatcgatccttgcaattgacacatcatcttcagctcgtagtgtgaacctgtcaattaagttgtcacaacagttcatgtctctctatttcaagatgctaaacaccatactacactcagctaagcatgctacaaccagtaatgttccaaccaacataacccatggtgtcttgtttgaaagtatcaacagtaataagcacgctaatatttctgaattgaaacacccacataaattgaacaatggatctgtgctaggagtatttgatagcaacacaagagaactacgcctagagtgtgtggtaggcacaacaatagattgctcggtcacttcaccacaggccgtagtaattctacctgtacatacagcaaactatgcgttaggtatggccctcgctagcttaaccatgaatatcacgctcaatactgctatagcagttgctacgcgctcaacaataatagttggtccacctggctccggaaagactcgcgaattacataggttgttcgacagcgaccaacacaccaaaaggatagtatcaaaacagacgggacaaatatctgagttcaaaaacttgaccgttccaccaactgctgctatatttgcagataatgttgaaaccatatatgttgatgagtttggtttgatgacagcgtccgatattttattattgtctaccaagtgcaatgtgatggtactatctggcgatgtaaaccagaaagttgctgacgatactgacttagacacgtcgaccactctcgacctctcttggtttagagacaatgtagggtcgacgacagtattcaatgagtcttggcgcttcgggtctaaaacagcttctgtattgaattactttggcacattaggcccatgtcacaacgagaatgacaaaggtattggtatggtgcaatttaactggcttacaaagaagaatatcaactctatcataattgaccatgacatacaattaattataacccattctaatgctctggtaatgcagataaaacaaatattaggctcaaatagtaacattaattgtatgacaaccggtcgtgcacagggcagccaagaaaagcgcgtgttgtatgtagcttatggtaacgccagtgagacatacacggcagctgaattgtacgtagctctctcacgacatagcgaacactgtataatagcagcagactacacatttgaggctacagccaagacgtatgggttcaataggcacatgcagagtgtagagacaatgcgatatggtgctaccatagtaccgaaaattcgtgatctgagtatgagttatatcatggaagcgtggtcaaacatacgatttaattatcacgagtttgcggaacctaagtacaacaaagcatttgataattacgttgggtactataacactttgacacactgtgctgaatacttgactaatgatgtatcagataccaatgggttagatatcagtatatctgcttgtgtgatttacaacaagttgtaccgtggtgtcgatgacagtgaattcacgcaacctctgacaccgcaacaccttgaagtctataatggtatgacaaatatattcaacacgtttggccccggaatcacagtacctgtagagagaaccgctaaggtaatgagtgaatacctaaggcctatcgctagtgtaagacagtattacattataccattttcgactaatgtgaaactagttggtaatgctaataacttcacctcatacgcgctgtgtgatgtgctgacaggtgaaattgtgatgacacaaactaacaatctaacattccaattgcctactgccgactctctccggtcctttattgaatccatgaagaatagtgttgactgggataaagatatgtgtgtacaaatgtcaataagtgaaatactcttccaacgcttgaagaggagtattgctaagtcatatcaagagatgataaatgcatctgagtctatacataattacacgatcagtgacataccaacactctactcactgtcatgtcgtaaagtgacaaacttgcccaaatcgctaacgctgtttgaaactatagctgagagcttacagattaactcaccatcacccaatgtgatgataactaaagtctatttggacgctgtcaatcaactagtagaaggtgacacgcctagagggtcgagcctaggttatgcgacattatctgaagagctcatatatgatgcacttgtcagcgtactgcgtgagttttatgtgcatgataatataaatttgttcatttctcaagtgtgtgatattactgcttcaagttttgaaatcagtgagccctcaaacaacacacatgtattaatactaccaataaagcgtctacatcaaacggtagaacatctccataaacacatccataacgtagtagttattgatgtgaaacagcagaagataatcgctactcttgatataccgcctagcactgaacactattggcacattgatgatttgtataagagaacacacgcattattagtattggggctattggatgaccaaatcaacacgtacaataactataaattaagcgatgtcctctcaaacataaagaaaacagcgaccaaagcgatcacggcccaagagcagtttttttctaagttgctcaagtatataaagaatattatcaactcactaggtgtgaaaatgcgcaaagggaaagaaatgttaaacttatgcggtttacaacaattgtttgccgcacgaacgaagcaatcagatgaattcacgcaaagtgcagtgaaggcgcgatttgactcatattcactagcaaccagcacgttaaagaatcatgctatcaaaggcttacaacacctagtattaggccacatctccaaacattatgatattgatgtcaacaagcaattacagagaacagttgcttcagcagtgagaatgacacatgacaatcgcgcaggtgatgatagctcaacatctttactattacggttgtactacagcttgaagttctatgcgcagggctatgagtcgggtgctgctgatatcatgggttatgatgtgttcaatattggtaacgtgaaagtcactatcaatgaatcattgccggtgttgttattaagacggctcaatgatgatgcgcgcagtagtttaatgggagaagctagtcgtaagcgaacagttaagacaaagcgcacgcaagctaacaattccaacaagtgggacgggcaaagcgttggcctgtccataaagcggatgtttgctactgatggtggcaacacgtctgatgatgcaccttttgacgacctcttatatgaattgaagaccactctatcagacagtatgtctgtcaccacattagaaaacgccaatagacatggaatggttaaacttaattcacttaagatggtacttgccatgtatcctagagtaacaacaaccatgttgactgtcactaaagcttactatgagttatataatcatgtgtttaccccaatgctggaagtactacaaaatacgataggtaggggcctagtcaagattaaaaacagtattatacgctttttggaatatgatgctactcttgctgatgctaaattagagatacaagatctacgcgattcattagatagcgtgcgtcggagccccgtgctcacatcacttgaaccgacgccagtcagtgacgatagtagcgaagctgagtcatctatgtacgaggatgcacatgatggtattagtaacaagatggaaccatcaagtacagacaaaatacatgagaactcagtacttgctgaatacgtcaaacaacaactcatgtcaggcaatggttcaatagatgggtcgctgttcactacttgtgggagtgatgtcaaaaccaaaatggtatacagtcagagaaagaagtacaaatcaagtatgtttgttaaatgggaacatcaagaaaattattcaactgtacacgctagaccgttgccaaaaataaccatgggcacattagatggtgtcatttacatggtagttgacaaagttgctctaaaattagtacccacgtatgaaggttacaaaatatggtggaatgatgcaaatgcacttaagaatgaaaacaaactctgcattggtcttaatttgttaacacgaatagctggcgatagtgctggtgacataattttggcattgatcacaaaaatgtttacagatgtcatcaactggtgtagactcactaaagatgaattagtctggaaaacgaaatatttggctggcggtgtatgtcgcactaaatacaactattcattctctacaacctccttataccacatactacaagacagcaaaccatttaggcgtctaatgtgccatgacacaagatcaagattcataatggttggtgacaagatacacataacaaggaggacggaagctttggtgcttgattgtcacacttatgctgtagcaagcaatactgctacaggatgttgtctaaccatatacagtgcattacagagccgtattgatataatggtgcgagctattgaagcaaatatggtcgctggcttgtgtgattatactgatagagctggcaagtcaggattagatggattgcgcaagttaggtataaatattgattcgaacacattgagtgacattgactttgctaaatggaaagtgattttacgagatgcacttgaaaacaatcctcttagcgctatatttgatatgggccttgacgacacttttacgtctttcaagcaattaatggaaagtgagaaagcgatgctagatatagaaagcaaggtggatagtactattagcttgctcaaatctaaagtagctatatgtatgccaagtggacatggtaagacaactcttaaaggaacactacagcgaaagtacacgtctattgatgtgtacgatgccgatgattatattactgacgttgacgccttaagatggtcaaatttcgaccgcatgatgatgcaatataagttgcgcctgtcagatgctgttggtaactcggggaacaataagcctaagttggtattgtgccaccaccctgatgcagtcccagatggatttagcgtagtactatttatgaataaagaaacaccctacactcccgaacgtttatggaagcgtaccaatgaagaacgcttgttaatggcgcaagacagatatccgctgtacacagtatcgtttgcagatatggaacatcaagctatgttatttatgctacgttctggtgctacgcccagtatcaagttgcatgctaaaagtgagcttgttgacccgatgccatacagtgaggcggagcaatttttccaatcgcccggaccagacaatttgtggcacatgccaatacaagggaggctgggtgttaatgatcataggctaggaacctcacagcaagtaatttataagcaagggccacatgtcggattgtgtaggccaacagttcaaatgttatgctcaagtactttcaatgctgtctcatcacgcttgcgcggcatagagcatctacgtaaagttaatttcagtagggaagaatatatgacaaagatgagctattggttcaaaccaaactggcgtgatatactgagggactaccaaaatgaggtagttatgccgagtgtttcagcatcactggaatgggctatcaacaaagggcacaaagttgagctgatacgcgatatggctgaagcagtcttgaattacgaacgcgccacagaatatacaaatatacaagcacatttcaaagtggagaatcttatgaaggaaaacgtagatgagctagaacaccaacttgggcgtatcattgtttggaacaatcaaaatgtcaacatgatactctgcccaattgttaatgaatgtaaggctcgatttaagaacctgttcaatgacaatctgctaacgtacacggatggcatggatatggtgtcactaaacaagcatctcagtaaaaattcacgctcaaagtatatgattgaactagatctcagcaaacaagacaggcagacagataaacaaataatcgattttgaacagtggttactaacagagctaggacttgatggcagggttgtacattatatgaatggtatactggatgggtttagcctaaaaacaccagataatgtgacaggtttcatgccaacaatgcacttgtctggtggcgctatgacgtcactagggaatgagatgcgtaacttgttactcttatctgacatatgcaaaggcaaagctgtgaaccatgtgtacacactgggtgatgatagcctgatactcacggacgatgatttcgacggtaaatatgtagcaatagttgcagccaataaccacaatgttaaatgcactttcaccacgtcagaagattcaggagtcttccttcaactcattgtgatgtgggtcaacggtaggtacgtagccgtacacaacttcatgaggctaaaggataagttagcatattcaccatataacgcagatagtgacgagttcaagtcgaagacagcatcgtacctattaatgattggaaaccattatttaactagcaagcgactccttgagctgggattcaatggcactgtcccgctagggacaactatggaagacaggctagaggcaaatgcgttacataacaattgtgatgtggcagacattctaaatattatacatgatatcgtagtggtttcatatggtaaacatgaaagtaagatcacgattactggtgtgggtgtgctaagttatcgccatctcaagagcggtatacatatgactaaaggccggcagagtgacacatctttattagcatcgttccaatcagcagtgcaacaagagttggacagtaactaagccaaccgatatacggataacaaacagaagagagtcgaaagtagataactttttttaac

SEQ ID NO: 919 - DNA, 11815 bp, Setosphaeria turcica endornavirus 1
  source 1..11815: mol_type = other DNA
atatatatatataccaaagaccaacatgaccaccacctacaccaccgacaacaccatcacgacccaccaccaagcaatgaagacacacacacacacaaacatcattgctggaggaacgcaagcacccagcgcagcaatgattaatgggtgcaaaaataaacatggtgatgctgaactccatgacaaaactaaatcagcatttgaatatgagtaccaaatcaagcctagaggctctgtcagggcggctgacacatcacccgtgggtggcgatggaacgtgttggaagaaagcgttcagacacgcctgttcattggaaacaattgacttgatggcgtcctggaccaatgccatggttgacatacagacgttcataaccgtttacagaagactgagcatcgccttcggcaagccacagatgatggacaattttttctttatgactatgaatgactcaggagttgcccatttggtgtccgtgtatacacccagccagttcgaagaactagttgagtccaggaagctcgagggcatccggaaaagcgcaattcgtgcgtcgtcgctttacaacccccagtctggtataaacgctgacattatgtatgtcaaagaagcagccgtggaaaagcgggatgctgctggcaaacggtacaaagtcaaaactagaccacaactgaaaatgaagttgtcacgacacggcactcctacacctgaccctggtgtgtaccaggacattctacgttggaacggctacgagctagaggaagaagaatggataatgttggccatgttgaacagcaattctatgaaggatttgcgtagcatcaactcatttgatgaattacaaacgcacctcgaaatgttgagtgaactgactgaaatcagcatggaaactctgactgactcgctactcgactatgaagttggtagtacactgctggaacgattcggcataacagtctctgtagttgataacaacattgccatatcaaacagagatcgtagtgtgactgttcgtgtccctgttgaagccatgcttgaacacacaggtgctaaccgcctcgagatgtaccacatcctaaatttctgctacgctgccgatggatataccgtgattgagcctgaaaacctcctgggaggcataagcatccttgaacaaatcagtcgtgattacaatgtgccactgtcattgataaataatacacagctaggcaacacattgctggagaccatcaacaaagtagccaacattagcgtgcgacaaaatgatggcaaagccattgaagtgccagaaaccatgcccgaagaagctttcaatgaaatctcaagagattttggtagattcaacatcgtaagagtcaacaatgggaaccatccccacccgttccaccacgcatcgcgtcgcgccgtcactaagatgattgtctctcgttacccaagaagtgatttactctatgacctaggcggtgacttcaactaccacatatcgaaggacaactttcatgtgcacagcgttttcaagacagacaacccaaccgatgaggcgcgttatattaacttgagcaccaaagaggtgaagtcaataaacaaccgtctcgcctcactggcagatcgccaaggcagccagagcgtggcaatagaaagtgttttgaacaccattaaatccaaggacaatgtcatgtggtgcaacaacagcgctggccactgtaaccatgcgccatccaacaagttaagttttggaatgagtgttgacacattgtttcacatcaagccagaagagttgatcaaattttacctacacaacaatgttgtgatgtccacacacgccatgacagtgccaaaggattacaaaatcaaagcgaaaggcaatctcaaatatgatgagggagtttggaccgtcagcgatgggaatctagatattgtgttcgccggtgatagcacagtttacagccaagaagttgaagtgcttgacacatacatgtttcaaccgttgattgccacaaacagacatgttatgtacacgcgaatccaaggctacaaaggggcgcatcttattctggaacatttcatgcttgaacgatcaattgtagacaatcttattttcaagcacgccaagtggataaattacaactatgacgttgttgctgtcagaatcccgaaaattttacttgacaagccaactagtctgcttgacagagaaccacttgatttcgaaactgaacaaattaacatcagattctatgaacgactgttgaataggatgatgcaaccatacagttgggagtcattgaaatcatatgcagcaagcaacgtgggccggagttacatgaccagtgctggtattgaacaggtgtggaaaatgaataacaaatccgtcatggcccattgcattgtagcgtactgggcaatgaataggcaggtggaatcaatgatgcctttggtgcatcgagctgaagagcgggcgagacccactgggttcttccaacaactgtggaaggtgttaaagaacatactggtcgacattggtaacgagttcgacccaacaacgataagtgaagttcaaaacttcttttcggaaaatgcaacagacgatctgcaacttgtgcaactgttttcaacactcaattcccagattgaatcactcaatgttgccaaccaactgtcagcgagtcataacatcattgatagtgtcttgaccaccttgccaattgatgttgaagttaattggactgacattgatacatggcgtgaaaaccatgacgattccaaccgcaaaacagttgtcgacctggttgtaaccagaggtgaaatgccaacactgaagacaacatgttcggcccaccaccaatgcccacacaaccacttcaagccgcatggccacatcacgttttcccctagtgtgatgccgcttgggctatgtgcatgctgtaaaattgacagcaacgtatttcctgatggcacatgtttgttgtgcactgggcacgaacaatgctctggttacaagaccacatgcaagcacacccataaactactaaacgaagaatgttgtggaagacctgtgtgcacatgtgtcctaaaaaacacctgtgagtgctgtggaaaaaaatcaaaagatttgtattgccgcctgtgcaagcctgatccaagcacgcgaccaaaaaaaactactgttagccgagcgaagtttgatgacgaacaaatggttgatcacagaaaccaaggcaactttgatgatgcaccgctgtttgacatggacggctccaacattttagacgaagagagcgatggagctgtctcgatcacgtgccagcaagaaccacagcatgttgataagcccaccacagaagatgacactgtcaagaacgcaactgatgcaatcagcaaagttgatgttgtgacacaagatttaagccgccaagatactcaacctgacggtggcagtggaaaccagcatgatggtgacaaaactcactattcgccaccaccacaacatgaagatgaaacccctaccaaggttgacccagagacaagcgctacagctgataaacagccgacgcctgcaatagggaaaacatcgccaggcgatgtcagtaacacaaaactcgggcaaccatcaatgacaaccgccacggagccgaccaccaaactgcatgaagatattgacaggggtgaatcaattttgaacactatacgtgaggtcactggagagacttctactacttacacactgcatgaagcaatgtctgtcggagtgcgcagaccgacttttgcccataaactggagtcaggattttctagctttaaattaccaaattacagatacaagcgcgtcaaccatgttgacgtgacaataacgtcaatcggaacgtccctagatgatggcacgtgtggtgctagctccctgagtcaaatatcaaacacgcctgttgacgcagttaaagagtggctaaagtcagcggtaggttctgcggagtggtcaagtgaaactgatctagcgtcttttgccatagcgagtagtatgaacgtggtgatatgcacaagcgatgccgcccatttatacatgaacaacacctcaggaatagctcacgcaataacaaccacggaaccacttgatggcaaccaacactgggtaccatgtacgttggaagtgtcactgtactacagcagtttcgtgacacaagaactggccacttattataagctgcttaggcaccttgaaaccggcggtcatgctgaacaagattggaacatggtcacgaactataagttaaggttgtcagatgctgcagccgcttacacactcagaggccaatcatgggataccatactaaaattattccacacgagccaagtgactgatgatggagttgtgcacaagtctgaattctactcaagcacaaatatcagcgattacataatcaaacggccctctggcttgagcatgattatagcaccaacaggattcgggaaaaccacgcaactgcacacgctgcacaaagattcaactaagttgctgatactaacaccaacaagagccaacgttaaaagttatgtgcagctaatgcaatcaaaaaaaatcactgtcgcaggcagggcagaaagcacatggttccccgacgacagcgcaataaaaaaccccggcaaagtgcgaatcatcgtgatgacagtcaacgcagctttctcagctttatgtggtgaactaccaaacgccaattacctgaggctgattgctggtcgcaaaatatattttgatgaattccatatggttacaccggaatatttcacattatgtagtcgactaggcaatttagtgtctggcgtgatgacggctacaccgtatggagcaatgtttgatgtcacaacacgccacccaataactagccgctggcaaagtgatgaagctatgaccttgttgcttgagtcatactacgaagatggcgtacacgatggtgaattgttggttgtgaaatccaaacaacttgcataccacactgcttcaataagtgacaaaccatgcgctagcatcacgtctgagacagtaggacagctaaatttgtcaaactgccacaaagcggtggctaccaattgtgtaaccaatggtgtcacgatgccccacatcaaaacagtgatagattcaggagaacggatcatattaaacatgaaaccccacatcaattacgacagcagacgtgttcatttcttcgatgtcgtcacagtaagatactcagtgaatgaaatgattcaatcacggggtagagctggccgcacccaacctggccacttcattggaccagtgcctagtgatgacaaccaagtgagtgtgcaagatcagttattgatgagtttgatggttggtgttgaatgttccaattattgccatgcactctttgattacatatctgacaagactatatctcatgccaacgatttcatagctgtgaacaaagacagcactgacacaaatgtgttgtacgatgtagaaaatgccagatcatgggttgaaacagcgaaactggtgttaacgcaaaagaaactaggtaaagtacccgtctttgtggatgagtcactcacaactcagttttattacgatcagatggtcaggttgcttgaaaatgagggcacattgtctaacgttggagttttgaagacccaacgaaagcggcccacgccagttgccccagcaatgaacctggaattgataaaacgacacataacgcagaactgtggaaacagaatcaacgaaagtcagttgcgaaacaatgacaagaacatgttcatcatcaacatgaaaacgaaaccaatctcatggactgacgacacagccgggaaaaatttagctgacactgtcattgagatactaatcaatgattatctaactggactgaataccatgatagtcatgtacaagaagatgttgagattggaaaacatggatggtgcatcacaaggcagtcaacttactacaatggatgcttcaaagtggaagaaaaaaacactgttttcattcaagcctaacgacaaccaaccagtgttaattgttgacaagaccactaaagcggccactataatgacttacgggatgatgtcaaacatcagtgatggcacagcaatcataacaacaaacagagacttgtcacacatgctcgtgtcaataacacgggtgccagcgtcagtgactgtggctcggctcaaactagttatgtctcgctcccaactaataaccggcccgccaggatctggaaagacttacaaagcaataaacgattgcaagccagataagtttgtgtccaaacaatcgttaatgttggtgaaatatggctgggaaacccccaacactgtgcttgaatgctctaagttgggtatagatgagatcgcaatgttcaacgtctacgaattgttggtgatggctcaattagccgatgaatttgtcatgactggagacgtcaatcaaaaagtaatagatgacgacggtttgctaacagcacgaaacatggattcgtcgaagctatttgacatgctcaacctggcaaagaaaactgtgttgactcgaacgtggaggttcggtcatgacactttgaacctgctgaccaagataggacacaattaccaggctaacgacccagccaagagcgagatcatagcgagtcgcaacatacacgggaaatttggagacaagctgcggcaagccgtacatgaagccagccccaccctaatcgtttgcccgacaaatgacgtactgttatggttgaggcgtgaaggtatacatggcacagcagcaaccactacgagcagatctcaaggttttgagtcggaacgtgtgatgtatttgatgttagggcagcccaattcaacttacacacagtcagaactgtacgtggccttcacacgtcacacgaaagaactttacatcataactgacaacacttcacaagctttgttgcagtccaagggcatcagctacccagatttcacacattgggatgagtatgatccatccagggctggatgcgttaacattagcaaatggcgatcaggtctgctcggacaaattgagggcgcactgttaatgataccatcgaccattgacgatacaattgaaaaatggcgaagcgaatcaaatgaaacacatgaacgcggactagatccgtattacttcacggaaggccaggttaatgattacacttatgcactgtcatctatcgcgagcttcactaacgggacagtgtatgaaaggaataacgtcactgccagtgacctattgttggtggacacattgctagtccagctgagattgtccaggaggtccaacctgcaaccacatcaattatacaccagaatcaagcaaaagcaattaaagctaccaagcaacttgatgtttgaaatcaagtgtgaaaaaccaaatggcgggatttattacaaaagatacgtcatctctgagaacaacatgcgctacgttggcaccagtaaacactgcttcactggtaaaggcaacatctgctatacgtcatatgacacactcacatacacgcttggtgtcgctaaggatcgtgtacacttaaaggaaaggctggtaactttactggatgccatcaaagcttcatgtgtggcattgtacgacctgttatgtgaatactttgggttcaaatcgcatggagtctcgccaacagtgttggccgccagcatgatcgagagttcaaattacatgccacgagcatggttggatgcttcatcgttggcgatggcttgtgatggtcataagggcttgtatggcacatggcacaccaaggtcgaatcatttgtgacagctggaatgaacggcgctgaagcatacgaagtaatcaggcaagcggctgccactcaagggaaatttttgccgtcagcgccagtggacatgcatgaattgcatttaaatgctagagtggtaccatactccaaagcatcaaagttggactatttcctgaacgctgaaggcaaaccagtgcgtttagtcaacatgactctgagagaagcatactcagctctcaaagcaaacacttacgacccgtcaaattaccgctcgggctacgctgatgtgcgtgacataattatattgaggatggtaaacatgataaatgatgcgtccaacatccgtgaacaagtgagcctgctcgttgatgaggtgttactggtagttgatgagaaatttaaagacaggtgcgagatagttgacagtgatagattcggcacacggataggaaaatccatgcgtgccgtgatgattcacaagttattacgaaccgcaagaggatctaccctatacgcggttgatgaaaatgcgttcatagagagccaagtagatgaaagtcaagacaacgaagtcgatgaacgggcaggtggaatcaacgtaaaaatcaccgatttgttactcataattgactctataaaacaatgggtatgtgagtcggtgcttaaatggtgtgagtgggctgccgatgaagaggatggcaaatcagcagcctcttctggggaaacaatgttccacgacacgcaggaaataattgacagcgcgggtgatcgcaaaagagggatcgacttgttccaatgttgccaggggaatgtgaacatagggaaaggcacaaatgataaaatgcatgaaaacagcaatctggtgaactatgtagaactgatgctgaagtgtgacaattgtcctgaacgcaacaaaattgcagccctgactagactatttgaggttgaaggttgtgatgttaaatccaatctgaacttctcatcattcaagcccacatccggtatgttcaaaacagtgacggtcaatgaagagattaaacaagtgatagttaaagttgtgggattgccggaagtcaaaatgcaccagcttgccaacatgatagtcattgttgttgacaaagtggcattattggcagtcaagagcggtgaccattacactttgtactggtccgatcacaatgtgatgaccaatgagactttaatagaaaaagctatgaaagtgttgggtagcgtagcgggagggtccaatgatgtgatgaaattgttgagacgcagtgtcatagcgctcatcaagtatataagaatacgcaaggacatctttgtttggacgacaaaagccgcgctgggtgtatgccacacaatgacgctacactacaacaggtcagcgaaaagttgttatttcagcttgttgaatgataagtatttccaacgcaccctgaagttgaacagtcgaaataagttatggttgcaaggcaatgcacttgtctactcacgccggtcatcagccactgtgcttgattgccacaccatgatgttcggcgtctcagggccagacggtgtcactctccatctgtacgctggccgtgaggagaggttaaaagtgtttagtgagcatgtgcagcatgcgctaggcacagacaagaggttttacaacgctgggaagacagcagatggtttgaggaggttaggcatcaacattcaagccaacttgaacacaattgacaaagattcatggctggcaattgtgaaacaagcagcgcaaacgaaccctctagccaacctagccaacatttccaccgaaaacagtcacaaaagctacgaaaagatcatggatgatatcattgaacataagaggttgacagccatatccgagcaggccccaacaatattagctaccaagatggccatctgcattccctccggccacggaaagacaaccactgtgcaacgaattaaacgagaattaccacacatgaacgtatgggacatagacgacatactgacgacacccaacgttatacggatgtgggaatacaacgctgccttgctggaatacaaatccgcattcatgtcgtttgatgagacacatgagaagccatacttaatgttgtgccaccacccatcagttgtgcccaaaaatgttaaaaccctaataataataaacgacaaagctaacgtgcccgcagagcgaatatggtcatctcaaaacgtggagtcacttgtcaaacacagtggcgcgagcatttcacgagtcaacggttatgatgagctgtacaaatgcgtggtgaaatactatgcctccgggtgtgataaccagatcacaatgacagacaatggtgaaattgttgatgcaattgatgactttggtggttatagttttttccaaaacaacactggccccgacaccctcatgtttgcgcctgccgatggcaacatctcggtgcctaactttgcagaatcactagggtatcaaagagtctacaaaaccggaagacacgttggtgtgtcaagaccgacgatacaaaaactcaccacaagcacattcaatgcgataagtacacgcttacacggaatacaaaaattgagaactgaacatataacgtctgatgagtatttcaatgctctgtcaactctgttcaagggaggctgggaaaatcaaatggaagaattcagaaatgaaccaatcagcctgtcttatgatgattccttgaaatggcttatcaacaaaggtcacaaaattgaactcttatcaaacatggccgaaaacactacaataggtgaactgtcaactgatccaacgagagcaacagcacactttaaagttgagaacttactgaaagaagaggttaatgacatgttagaccaaaaaggaagggttattgtgtggaacaatcaaaacatcaacatgtttttgtgcccaatgatcaatgaatgcaagagacggctaaagatgttgctgaatgataaactagtcacatatgccgatggcatgacaatgacagacatcaataacaagttatccacaataaagaaaacaaagtacttagtcgaactagacttatctaagcaagacagacaaaccgacaggccaatattgaactttgagtataagttgctagcccgcttgggtcttgatggcgaaatagtcgcttacttacaacaactagatgaaggtttcacatacactacacccgaaaaaatcaaatcacgccggcctccaatcagatggactggaggagccatgacgtcgctaggcaacgaaatacgcaatttgttactgatagctgatttgataccagacaaaaacatagaacatatatggactttgggtgatgactcactaataatgaccaacactgaatttgatgagcaccaaacacagctgatctccacgcaacggcacaacgtcgtgtgcacattttcacagtctgaaaaagctgggctttttttacaactgattgtgtgctggatagatgacacatacatagccacacacaactttgatcgtttgcgtgaaaaattgacgtattcaccatatcctgtgtggagtgagtcatggaagtcaaaatatgccagtttcctgatgatgattggtgacacgccagatgtcagataccagctaatgcgccttgggtacaagagcttgccacctcttggcaccagttttgagcagcgattgtttgccaacgcaacgtatcacaatattgaaccagaagacattttactgataatcaatgatattatcgcatcatcgtccacggaatccactgaattgatactaccattgacaatgattgccccgcgcaacaaactactatcaggggaaataccactctatgaatatcaagaagtaaaagttaacacagcctcacaaataaaccagatacttgaggcagtgtcaggcaattattactaatgcacaacgcagttacagcgcgttaggggcggcaccaaggttcgcagggggcaatccctagcgctaacccacaagggtacgccatccacaggcaaccgcctgagtttttgtgtgtgt

SEQ ID NO: 920 - DNA, 11146 bp, Setosphaeria turcica endornavirus 2
  source 1..11146: mol_type = other DNA
atatatatataaaataccagcctgccaatctagctactagcaaccaacttacaaaacaccactccactaaactaccaagctaccaaacaatgtctcaatcacacacaacaacatcaatgccagcagttgagtctcctgctccattgattaaatcagagactcaaactaactttaagctcggcggcaccatgaaaccgcggagtgacgccatgcttggaggtgatggtgactgttggcgccagactttcgttggccgtaatgggtttgttagtaacagctcccttatgtactggtcggattacatggttgattttcacacttttggccagtgctataaacaagtggtggagtcaactaacatggaagagctatgggaatactactttgtgttcaccgtggattcatctggattgatgcatcaaattgagtttttggacgaatatgaggttgaagagttcattactagccacccacttaaagctaaagcggccaaatacttagtcagcgctcgtgacatctacagtaaagaaactaatgtgcatgtcgatttctttgagtatatatccgtccacgttagaggagagatcactaaagaaaagttaccgttcgatgttcttgtgtgggatggccccgagctgaccttagatgaatggatcctcttagcttgctacaatgaggatcctaagtgtatgaacgtgtatggagatacccagctaggagcagtcagcgtcttagagcaaataagtaaagattacaacattcctatgtctatgctccaaaacagccagttgggtaaacagctagttgataccgtgaacaaggtagccgctgcaacagttagtcaaagcgacaatagagttatagaagtcccagcaactattagcgatactgcgttcaatgaaatatctaatgaatttggtagatttaaagttgcaagggtcaatactggtagccacccacacccttaccaccatgcgtcacgcagagcagtgacgaagcttattgttagccagtaccccagaagtgatttgttatacgacgtcggtggtgatttcaattaccatattaaccaaaataacttccatgtgcacagcatttttaaaactggtaatccaactgatgcagctaggtacactaacttgacgaaaaaggcggtgaaggccgttacacaaaggcagtcacaaatgatcaacaaacaattgtctcgggacacagccgtggaatacgtcttgggcagtgtgctatcgactgacaacatgctatggtgtaataatgcagttcaagattgtaagcatatgtctaagaataaagcaacctttgccatgagtgtggatacgttgatgcacgtggagccagaagatctgttgtcgttttacatgtcgaataacgtgctagcagccacccatgcacttacgatacctaaggatttcgccttgtcagatagtggtaagctgaagtatgatgaaggagtgtggagcaaagaagacggaaatcttaatttagtgtttgcgggtgatagtacggtctattcccagaggattgagctagttgagcgctacttgtacgaaccaatactgctagcagataacctcttcatgtactcaagggtgcaaggttataaggctgcacacctaattatagaacactatatgttgccccgccacgtgttagaggaccagctgacgaaacatgcactatgggttaactatgattacgatcaactggtagtcagtatgccgaaaatcttattagacagacctactacgctactaggaaaggaagccatgactatggtacctgtcactctgaatgttaagttctatgagagattactgaatcgcatgatgcaaccctacacgtgggaggctttaaaagcgtatgcggctagttgcgtcgggcgatctttcgtatcttcaagtggtgttgaacaaatatggaatttgaacaacagggaggtaataaaccattgtgtcatagcttattggagtatgaaccgtcaagtagaagcactaaagcctctaataacgcgggccgaggagagagcccaacctacagggttctttcagcagatttggcaggtattgaaagtagttctcacagacattggaaacgagtttgatcccacgaacttgaaagaagtacaagaattagtcgagaacaattctaccgatgatttgcagcttgtccctatgtttacaaatattgccagacaagtagaaagtatctgtgtggctagccaactactgcggagtcataactgcatgaacgtcataggtaaatatgtgccgctggttagagaaggtgagtggtgcacagttgacagctggcgtgaggaacatgagtctagtgataggcgcactgttaatgaattagttattagtgacacgacaagcaaagtgagaaaagaagaatgtaagaatgatacgtgcccacacaatcactcgaagtcgcataggcatctggcatatgaggcttctgttatgccggttggggaatgcagttgttgcggtcaattaagcaatctattcaatgacaatttctgcatactttgcgccgggcatgaaatatgtgctggtcacaaagctacctgcaagcataatcataagcttatgcatgaagaatgttgcggcatggtccattgtaactgtaagcacgaatacaaatgtgagtgctgtggattgccgtcattgtcagtatactgccgtctatgcaagccaaacccaacccgggcgatggacaactctgcaatgtttaactttgcagaggataatgcaccagaggacttgaggcgtgacgcttacccagcgcataagcacatgggcatctcactaccacaagtaggcagactggataatgactttgacatcccagaagggagcaaggaacagtatgcggttacgcaggatggacccggcattacgaaaccaaaaactgaaccccttggttactacccaagtacagctgcccatacgataaggacgtgggcagtgttgcaattaaacatacccgaagccttagctaaaccaaagggaggccatattattgcacctattcttgaaaatatccgtgaggtcactgatcaacctatgtatgaatacaaccacaacgaacaaatgttactcggggtccgtgcacctagatttagctctagcgtaggtaagggcttcgggcctattgtgttgccaccgtataagtatgaccgttccaaccatgtggatgtgatcatcaactcactgggtgaatccgatgatgatggtacgtgcggagcgtcatctttacaccaggttactggtacgcccatagctaccattaaggagtggctgctagcttcggttggaacagaccagtggaactctgatgccgacctagccgcgtttgctgcagccacgcgcactaatttagtagtatgtacgaaagaaagagcgatgctatattgcaacaatcatagtgatgtatcctatgctataactactacagaaggctttgatggagcacaacattgggtaccatgtagcctaaaaatcaccatgttatacagcaatatagtcactagacagtatcagcagtacctatcacttatacggtacttggacacgcagggatcaaattttgaagattggagggcaatggctacaaccaacgtaccattatcagagattgctaatgcttataatttaagtaagagtgattggtcagatatcttacaaattttcaagggaggtgtgatagatggtaacggtgttacacatgtctccagccccttcacctcgttgcacataaaggactatgtagtgcgccagccatggggactaaaccaaatcttcgcacctgcaggctttgggaagtcaaccggacttataagtatgttcaatagcaggaagttgttagcgatggtcgtgccagctagatcaaatgtagctaggttggttcaaacaattaatgctagtggccatgtaactgtgggccgagctaacgcgcagtggtacccaagtgaccgcagtctaaagaaaccgacagatgtcaaaatgctcatatttacagttgactcattacacgccgccttgtgttcaaccgcaccggtcatgtcctatgttcaacttctcgcgggcagagacatttatatagacgaggctcattgtgtgacgcgtaaacttgtagaactatgtcattttttgggtgatagaattagagggttcgtgactgccactcccttagatggcatatcagacatccatagcaggcatactataacgaccaactgggtgacacctgaagcggctaattatctgatagaagatattatggaggaaggagtatcagagcacaccttggtagttttgccgacaaaatcaatggtccgtgaggcatcgaagaatagtgcaggagcgtgcgtatctttaacgtcagacacgttgccagaagttaacctgcaacacttgacacgagcagcagccactaacactgttatcagtggggcaacttttcccaaaattaaacgcgtgatagatagtggcaaacgtgtcatgctcaatatgctgccaactcctcgtgtctccaaatcggggactagtgtgtattttgatatagttaaatatgactacacgatgcaggaagcgctgcagtcgcgcggaagggtaggccgcacgcagcctggcgtattcgtggggccgctgcccactggcgtagcaacactatccacccaagatgcgctatgtttatcactgtcagtcggcataccatgctcgcccgagtgcaaccgcttatgggagggcataaccgtggaggcagtcgacacagtgcgggcgcaaatgccatacgtcttgccagagaatgaagatcagctcagccatgaggaggcctcaagggacatgtggttagctgtggcggatgacatacttagttttaaatcagcagggcggcagccagtgtttgctaattcatctgcgactctgttagatgcttataggtacatgctcagttatacgcagcagccaggcgatattatgaactacgggtcgtttaagacgttacatagagcaagcattgtaatgcccagcttggacacccgagtttactacgcaatacttaaaacgaggggacaacttgatgtagctaagaaaatacttgatattaaacaaagtgggtatgtagacagtctacaaacaaccatgcctgtatcatgggcggaggatgcagcggacataaacatacgtgatgtagtagaagaggtactgctgaatgagattattagcgtgattaacattttgatcacaaactacagagcagtacaacaacggcgtgtcggatttggttcacgcaatggggttcaagtggtcaaatatgaccaaaaacgtcataaggaggggaaactattttcttttaagtttggcacaaagcaaccagttgttatttttaccgatgacctatcgtccggcacgctgactgaagcggtacatcttaacaatgtggtagatggcacgacagtatctacggtcaataggaacgtctcgtatttgtttgattctttagcttcaatcccagaaattgtttctacgagcaggttgcgagagttggtgcgcaaatctacagtagtgagtggcccgcctggatcaggaaaaacccgccttatgatggatgagttgcggcctgatgtaatagtcagcaaacaatcaacaatgattagtaagtggtcttggcttccccccaacgccgtcaatgagaaatacaaatctattggaatagatgaatttggtatgtttacagtattagacttattaatgttgtcagacaagactgacaagttttactttagtggtgattttggccaaaagaaatctgatgagacgtctcttgagaccgctcgcaacctgggaagcgacatactccggaagttactattgactgcgcataacatagaattaaaggtaacgcggagatacggaatcaccacgttgaacctattgagcaaactgggccataactacaaaccatatgatgaaggaaagactgaagtcatagccgggcgcaaactgtatacacgatcggcagatttatttcgtaaagcattcagggatgcttctccaactttggttataacacctacaaatgatacactaatgtggctgcaagatcagcccatcaagggagtagaattcttgacgacaacccgtagtcaaggcacagaagcagagagggtcatgtacgtgatggtaggttgtgaccctagtgtatatgacactgaggagttgtatgtagcattcacaagacataccagagaactttatatattaactgatatcgatggccaacgagtgttagactcgctcaacatcaagttgagcccctatgaaaattgggatactactcaaatatacaatgccggcctcgtcaacacgggcctcatcgcctcgaccatattatcagcagtagtaggctgctcaatgggggtcgcctatagccgtatggcgtcatatgcaagctcttcccgcctgagtggtatcaaaggcactggagatttcacagggccgaacttcacttttgggctctccgctgcagtaacacaacacatgtatggaactataaagatgctagagcctgcgcgagtagaggactcagcaggctatgaatctatgatggccgctgctgcaacatatgatggggctaagtatgatatgcatggattcatcacctacttgctagccaacactcatcatgtagtgcctgacaacttaatatttcaagtagcacggccaacgcgcgccaacatggttgagtatgatatatacggtatcaatgaatgctgcccagtttacctaggtacaaacaacaagggagtagatgcaaatcagctaataatagtagatgacatttacgagtatgttgacttgagtgcggaccatagcgtctccatactgtccagattgtctgaattgctaggagctataaaagccaagtcagcgatattttatgcctatatacatgccatattagtgggaggcaacacaaccctggaaccaagcatgctagcaaagaaaattgtatcagaagagagctacttgccacggctatggatggatgcatcagcattagctatggtagttgacggagtggtcggcgtctatggtaaacacgtccagcttgcgtctagttacaggagcgcagggtacgatggcctcggagtttacaatttgatagtcaaagaggcaaccaaacaaggacaattcctgcccgcatatccagcagatctagttgagttgcatctaaatgccaaagtacaaccttatggcacttcagccactatgtttaggtcggcatcaggtgaacccgttgctacttcaactttaacactgcgagaagcattccacgcaatagagggaaacgaacatcacccagatgctgtgagagcaggtggttgtgagttaaggcacaacattatcgaaagcttagtggccatagtgaaaatggaaggggacatcagcctcttagttgacaaacttttagaaactagcctagtcatgatgcagacccgagtggaagcttccacagctatcacagataaagatagactggggaaaaagattggaaagatgatgaaagcttacatttatagcttagcaacaaagcatgcaggtgcgtttgactctaaaacggagaattacaccatatatgacatatcggatgatcctacttcagacgatgaccttagtaggtatggtggtatggatctcccgagtgtgctctctagtttaagattaatcaaggattgtctcaaaagctggatagtagattacctgctagccagctgtgaatgggcagcagatgaagaagacaaacgagatgactgcagcaatgccagtacagtattttatgatgcacccatgcctgaaggtgtaccggcagtgcggccggaatcaatcatatcattattcccgtgctgcaatcccaggatgtctcctgctcctgcggacacagacaaattacacgagaacagccgtctggtagagtatataaatatggtgcttaagtgtaaacaatgcagccaagaccacaaattgcagtgtgcgcggcgaaatttcgacgtgttagggactacagtgaactcaaaggtcaagttcaatgatttgaaagagtcaagggggatgtttagtgtagtgacacgtaatgatgagctacgcatgtgcaccataaaaatcacaggcataccgcaagtagacatacatgaactaggcccatattacatcattatagtggatgcagtagcgtgcatgttggagccaatcccgggcgggtacaaactgttatggagtgaccacaacctgatgaccaaccagaagatgttatccaccgcgatgaggttgatcaacaatattgcagggggtcggtctgatctggtcaagctactcaagcgaatgctaaaagaattgactaggtacatattaatgaagaaagatgtgatcgtctggaccactaaagcagccactggggtgtgccatacccaagtgcttagatacaagatgagcgccaaagctgcttatttcgcattactaaatgacaggtgcatacaacaattgctaagattaaataacaataaccgctgctggctgcaaggttcaacagtactgttatcaaggcggtcaaaagcaaacttgttagattgtcataccacgatgataggccacgaggatgataagggttacatgaatttcactctctatgcgggccgggagtcaagattgctaacatttaaagcaacagtagagcatgcgctgggtaggccgggtgatttggccaggtcgggtgaagacagcctaaatattttgcgtagagttggtataaacatatctaaactagatgatatcgatgctttagcttggttggatatagtcatgcaagccacgcgaaataacccgttgtccgcattaaccgagctatcgagtgacaatggttatagaagcatatcagagtacttaaaagagaggcagacacacgacgccttagtggctctgcagtcggtcacaagttatcaaattcaaaaaaaaatagcaatatgtataccttccgggcacgggaagacaaccacaaaacaagccctacaaagagagtttccgaacttgaaatgctatgatattgatgatatcgtgcctactgcctcagtggtaaggatggcaacttacagtggggctttggaggtgtacaaggaggcattcctccagtttgagcttgaacacaccacggaatgttatctcatgttgtgccatgatccttatgtagtacctggccacatagataccacaattgtaataaatctaggagcaaaagtgcctaaggagcgtgtctggtctgatactaacgtagctgcccttaaatctcacaaatataataatgtctctacgatcaaagtaaagaatcaccgggcactaaaggacctatgtatcaaactagcattaaatggcggtaaaccaaatataactctatgtgatggtagcgaattaatcgatatggttgatgacatcggcgggtacagcttttctatgaacaccacaggtccagattccatccttaggttgcccggggatggcaaattaaatgtcccatcactgccagagggcttggggtaccaacgatactacaaaacaggtccccatgtagggttgtctcggccaactatccataagatcgctactagcacatttaatgctgttagcacgaggttacacggtatcgtgaaattaagaacagaagatttcacagatgatgagtatttagctaaactatcaactatgttcgtaaaggattggcaagaccgtctgcgacagttcagcgaggagccaataggcttatcttatgatgacatgatacaatggttggtaaataagggccataaagtagagttactgcatggaatgattgatgatactaaatatatggacggtgcgattgacccacaacgcgcacaagcgcacttcaaagttgagaatttgctaaaagaagaagtaaatgatataatggatcaaacgggtaggattatagtatggaataaccagaatgttaacatgtacctgtgcccaatgataaatgagtgtaaaaaaagattaattacgctactaaacgaagacttggtgtcttatgctgatgggatgacaatggtcgatataaatgacaaactatcgcggataccgaggtcaaaatatttggtagagcttgatctatcaaaacaggacaggcagaccgatagagctatattagattttgagtggaacttattggctttattgggcttagatggtagggtagttcactacttaagaaaagtaggcgatggtttcaagtaccgcacaccggagggaatcacagccactaggccagcgttacactggtcaggggggccgatgacatcgttaggtaatgaaatcagaaacctgttacttttagctgatctagttgtaaataaagatattaaacatatattaacattaggcgacgactcactaatatttagtgatacagagtttgacagtgcacaggtaagtcttatagcggcgcagaggcataatgtagggtgcacgttcagccagtcatatgataccggtttgttcttgcaactgatcataggatgggtgggtgacaagtatgtggcaagccacaatttcttcaggctaagggaaaagatggcatactcgagctatcctagctggagcgctagctggaaagctaagtatgccagttttctgatgatgataggtgactctgatgctgtacgcgcgagactttctaagatgggttacaccgctatgccggctttaggctcggacattagttcaagaatacaactaaatgcccgacataataagacaacagaagaccacgtgctttcagttgtatctgatataattaatttggcatttgcagactgtgaagaaatcaagctaccgttaactatggtgttaccacgtaataagttgactcacggtgaggtcatattgcgagaatataaggaggttaccattgacatagtagaccgtcttaatgccgttatggaacagatgatctagacatgcataagtcacgcgtggggccatcttaaatgagggttagtggggaaggtgaaaccccttcccctatcccatcatagtttttgtgtgtgtgt

SEQ ID NO: 921 - DNA, 4083 bp, Soybean leaf-associated endornavirus 1
  source 1..4083: mol_type = other DNA
gcatctcttcaatacggatacagtaacgatcatagcgatctcctctggtacctactggtacgtcaagatccgattggtcatgaacatcgtaaggtgctgctcttcgcgaatcccagcatacccctggttggggcaaagtggagaaaatggaggaaaaagaaccaacaggaaaacttgctgaaatatcaacattacctgaggatttggaagaaaagcctgcagtggtgtgtgaggaatcaaatgaaatgggagactatgtaattgaccaaagtctaggtaaagaagaagataaagacattagggatcatgatgtggacgtaactagttcaaagcacatagtaccaggtgttgaaactaaccctgaacacgtaagcttaatgtataaaattgaatatgtagtggacaacattgtcagacaacgccccctctcagacgatggcaacttaaagtttatcagagagtcaggacattttgtcactgacactcctactaatataaactacacgttgaacgaggcacacaaagatggctctggctgtggattgaattctattatgacaaatttgctaagatatggacgccagctaaataaggacaaaatgatagagttaactggtcgtgtgactgctcacacagtgtctgatattgccatgtgttgcatgctcaaccgtgcgaatcttttgatggtatccaaatccaactctacacactggtacatatttgataaatcatggataacggttcaaattctacaaatggttgtaaagggggtcggacatgctgaaccggcagaattggactacgcagaacttagcaatctgtggaaaagcaagcgcaagtttgatgatgttatcaatgttaagaagattgtagttagccctacttgttcacgcataggtatgcctgtaatggcgaattcttacattacaaccaattgtttagaccacatccatttaaagaactacgatcaaattattagtaggcaatgtgtacaattgcgatcagacggtggtcgcttaaaattggaagataagtggggtgaattgctgtatagattaaccaacaagtcaataagtcactggaatgcaagagtgtccctgctcaacgtgagtaaggtcatatcaaggcatcgcaacccaatcaaagttatacacggagtgaagtaccaaaatggtgtggtgttaaacgaaaaacacagtgacaccatacgaggagggactttgatactcataataggtatgtatggggctgtcacaacaattgcatgtcctatcaaagagggaatttggctccctcttgaatgcaataggctagaaccattgtttttcctaagtttggggacgggaatatacgctgaaagagttatggaaaagaaagtaattttaaaaaccgaaaaagaggtgaggacgtttttaaataatgcgtccctcaacaggtgtcatgcttttggcatgttcacggatgtgacatcaacccaatcagccgaagccactcacctaatagtatcacagtttgacgacagacctcatcacatgtacaacgagcgtgacatattaactaagtattcggatgaccacataatatacgttggtacagatctaactagtgatgctataacttggatacgtacctcaggcaaacaccacagacgcagtttgataagtgggcggatggcaatagaagttcaaacacgagatgagcttttgcaagcgatactcaacgttttgccaccaagctggcagcgtgaaattgttgtgaccggtttagacggaggcgcatcaaccatcaactatgtggggttccataatgaaagtcatatgacagctggtgcatggacaggattctcagatattttaggcaagatgttgcaaaatacggagggttcaaatgataatgttgaaattaaatcagtaaattgggaaggcacaaaaaccgttaacaaggttgtggaacatctaacaagtctgcagttgaccgcctcctctgacttgacctggaatcttgttgctgggaagatgaatgattcaagatacgtcataactgttgtggactctccatctgttgtaatagaaaggctcaaaaacctacccaaattcaaaactgttagtccgatgctggcgatggcagatggtagtgtgttggtggtgccgtgtgggctaatactggagttggaccatgttaccggaggtcagagttattttcacgataacaccaaacatgatcacaatcccggaaatgacgcacaacaggaagagactggaaaagtgagagagcattgggacatgaaagatcagaccagcaaatctgctggacaaatcatgggtgcgcacgactggtggaatataaacaaatcaaaaactacagacacaaatcaacaattacagcaattggaatcactccaaaacatagaaggtttaggcgatttggaaattttgccactgcaaaactttaatatgcaggtaaatgagggtagttattgggactctaaaatttattttgaatacaaagaggatggtcaaaccctcacatcttgtgatatgaagttagacgaggacattacatcagaggtaatagaattttggttagaggacgatttgactgaccataatgtaatatatggaccaagagctacaatgacaatgtctcacgacggtacttacggtgctgttaaatcagttaaaaagactacactagttaggtatcccatttattcaagaccagtcatgacaaagatggccaatcaggaaataaacgcagtgacaggacgtattggttctgtaactgaagttcgaaagttttcgatcgatccaaagattgaaggccgacaatttgcagagacatacttcaagtctgattggggtgccatggtgcaccattaccggcaaaatccattaactttcgattctgagaaaacattagcatggatcagcactagatctgacagtttaaaaatagctaaagagttacaagaaatgcttgatgaaggtttagtggttcacggattagacagggtgaatgtccatctaaagttagaatcactgttgaaagatgagccaattacatcttacagggaacagcaagcccgaacaattgtgtggcaatcaaaggccatttgtgctatatttagtcccatatttatagaagcaaagaagagattcaaaactatactacatgaaaagttcatatactccgacggtttaacaccatctcaaattaatgacattttggccactagaccagcgccaaaattcttcttagaagatgatttaaccaagcaagatagacaaacagatcaacaattgttggattgtgagtttgagatatataggtacctaggtgtttcagaaatggtattatcttcatggaggtcggttcacaacaagtggaggtttaaaggtaaaacagtcaaaggtctgtttgatgcgcaacgtttaacaggtcaggtgactaccgctcttggaaacgtcattgtgaatttgttagtgcacaggagactggttcaagtcaatcaatccagtatacaaaccatgttggtgctgggtgatgacaatttgttattcatgagcaaattcatcgatgcaaaggagcttaggaggaccatagctgactattataacatgcagtctaaggcctttaactatgaaaaccacggaacgttttgttctttggtggcctacagatcaatcaatggtgtagcccaactaggtccagattacgttcgtctacgccgtaggtttgaggttaccaatggagtgtccgaagtgacggacgtcaacctagaaatgcggtcgatgagttattgcacgatgttgggagacatacccgaggctagacaaattgtacaagataaacagtggggtctgacgttaccaaattggtacgcacaggatatgcttttaccagccttatgtaacaaatataacatgtcattagagttggtgatagctaatctacaacagttgttaaacatgatccgcacacccaaagtataccaccactccgtagatgtgttggtcgaaaatcgttaatacccatggcactcccatgggctgaatttattcaggtttcccccccccccccaca

SEQ ID NO: 922 - DNA, 3349 bp, Staurastrum sebaldi endornavirus
  source 1..3349: mol_type = other DNA
ctaatgaatgatgtagtagaatttttcacattttgtaataacagaaaacatttaataattgtaatccaacaatcaaatgtacaaaaacatgcttgtctaggtgcaataaagaaattgcataatgaagtagtttatacaaaacaaatcaaagaagtgtctattagcaatctattatcaatattagattgtaaggtaaatagtttagaagaattgtcaaatgttaacaattggaaaaggttatttggaaaatcttggcatgataatctagtggctagaataaattcaagaaatgtagaaatcgtaaatcaaagaagatcagaaaatacatatacaataagagcttggtgtgatgacgtgatatcaaatgcaatggttaatgaaagtaatgtgagcccaagagtctgtgttattttaacagataatgtgtggaaagtaggtttgtatttaattcaagaaaatcttatggtaataactagtggtgcatttactagaaatgtgatcactgtaatggatgtaggtatcagaatgccgatcaagcctgtaccgaaaaagcaaattatgacattaacagataatttaaaattgagttatgtgttgaacactgaatcgttaacttacatgttgctcaaaactagtataacgtatagagttatgagtccaacagtggaagcagtaaataaactttatgtgtgttgttatgataatagaagtcatcattggggttcatataaagattattttaaactagctgacgaagtcataataagtgaacacgtaaagactgaatcaatacttaaagttcttgaagaaacatatgataaacctacaagaaaagttttgcacaattgcgaattgatgaacgcaatagagtgtcataacatagcagtcatgagccatcttgaacaaacgttaatatctaaaaatattaattatcacaaaacaggtgatactatcaaatcatatcaagaaattgataaatatttagaaacagacaatttgcatcagactgggccagcgtggttccataagaaagcaagtaaagaatgtgtaataacaactggtgatttgacgcgattggatccgacaaattcaggaataattgcacaaataattaaacctaaagatcttgtggagtgtagattaaaaccatttgaaatgcaccaacaacaaagttatttaaatacaggattggtcacaggaacagtaaatggaaagaaatgtgtaagttcaatttctagtggttatgtgttcacaataccatcagttggaggtaaagttacgcaacaatcaatgttaatgttagagcaacaacaatacaatatggatagagtagtgtggagagatgtaaaagatagaaatacaaaagattggtggcaattgcaaaaagtacaaaacaaagactttgtggtagaaccaatgcaagatgtacaagcatttacaatgttggtgatagaagataacaattttgatataattggtgagacagaaatgactgacaacatgcttaaagatacagaagttagttctttgaaaatagaaccatacatagcgccgtacactcaaaattttactgcagatgatttagaaccactgtatgatatgccagatctagctaccaggaacttgtgggacaaccctgacttaactgactggttaactatgtatgcaccagaaaatgcatgtaaaatacgtagtaaagaactaccacaaagaataattaagagttataaaacgactctaactaaatatcctataagagctagaccggtgttgactaaaatggtgtttgaagaaggtcgatcaatagttggtcggctaaaatcagtgcaagtaataaggaagcagactcctaatccaagagatttgttaaatgaatttgtagatgtgtattttacagctggtagtaaattgactgcggcaaaatggaggcaagatccattaacattcaatggacatgacgtcgcagcatggatagaagctgcaaaaggaggaccaaaagtgttaactgaagcaatcgaaatgttaagtggtgaaatattatgtaaaccattaaatgacgtcaacatacatttaaaattagagtcattgttaaaagaaggtaaagaagcaatacacaattggaggcaacaacaggcaagaatcatagtatggcaaagaaaagcagtgacagctttgtatgcaagaatgtttaatgaaataaaatcaagattaaaacagtgtttgaaacctaaatttgaatatgttgatggtttgcgtcctgatgaaatatcttcaaaagctaggttgttgaaaaatgtcaaaggtttctttgagaatgatctaactaaacaagatagacaaactgatgatccaataatagaagttgaaatgtgtatatatgcatggctaggactaagtccaatagtgttatcaagctggtattatatgcacaaaacttggagattcaaatctacacattacaggggttatggtgaaagtatgaggttgactggccaagctacaactgcattgggtaatgccataactaacatgcaagtgcattgtagatttgtaaaagaaaattataataatattggtttaatgttctttttaggtgatgacatgattggtctgatgactgaagtgccggatataaaaggtttaagaggatacatagcatcaagattcaatatgcaatcaaaagataattttaacaaaaactttggtggattttgtagtatgatagcatacaaaacgcaccagggtacttgtgaatttggaccagatatagtcaggttaaaattcagatatgaagtgacaaatggagtacatttaagtacacaggataatttactaatgagaacagcttcttatttgtgcatgttgggtaaaaatccgcatactgatttaataatcaaaaagttaaatctaccaataaagcctgtacattggtatagtgagagtgaatgtattactgcagcaagctataaatatgacatgacaccgcaacaagtagaaggttatagagatgttttacttaaaatgatggaaaatcaagaacaaactacacatgaatttagaatgttcactgccagttctaggtggtaattcaacgagagaccgagtggccaaaagagggataccctatagtgaaagtgaatgtattactgcagcaagctataaatatgacatgacaccgcaacaagtagaaggttatagagatgttttacttaaaatgatggaaaatcaagaacaaactacacatgaatttagaatgttcactgccagttctaggtggtaattcaacgagagaccgagtggccaaaagagggataccctatagtgaaagtgaatgtattactgcagcaag

SEQ ID NO: 923 - DNA, 4880 bp, Volvox aureus endorna-like virus
  source 1..4880: mol_type = other DNA
atgattttccaccctctaggtggtgaacccgagactcttctacaatggtgcattagaggcacacatttaaaatcgcctgatgctaaattgttgaaacaagtaactgaagaatttcagtccatgttgcaagatatgatagccaacgtggaacctgtaatagatgaaacctttgatctaatagtggaaacaccattcacaggagttggcatccacttgtcagagaggtataaaattcgttatgtggaaagtactgcattcctatggcaccccgagcattggcctgattccaaagaatacaagatcatatcctccagtgttgtcaattgtatgatgtggtatatgaagcaaccaatactagatgcttggagaatatctatgggaatgaaaccacttggcctattgcgaatgccatatgccacgaccactttatacacatttgacgaatcattgcagccagttaaacatgattgtagtgtatatgctgtaggttatagtgcgtctagagtgaccagaaatcatggtagtgttccaaaagaattagaggattatgatttagcacactcgtttttaataggtttcggatccatgaatacacaaatgtgtgcgcagagaattattgcaatagttagagctttgaataactcccctaaattaagacaatattttgacaataatgcaattataataattatatttgacataactaaagttagtggcattgtactcaaagaactacgagacacaattgacaaaccatatgtcaagatttttaaatatatgcaatatgggtccattttgcctcacgtaccatatatgatacaccacggaggcagtggtgccacccacactgctctgcattgtggttgttatagtattatatggcctttctttggtgatcagtatgactggggaacgactcttgagagagaaaaattggggctcgaaataaaacccaatggggatctaaatcctatgatggattctattgaagccaatatgaaaacagtgaactctacggaaatagaaattgcgtatactaacaacatttctttcaatactttaccagttgtgtaccaatggttaaaaaaacatgttttgcgtgatggagcagtggaagggtgcaatgtgttgctcaaaatgataccaccagaatgcctaccagtaactggagatcaagctcaagaaaaagctaaagaattgtggggaaaccacatgatactagcatcgccattttatgtagcaaaacagatgtttgataacatgttccgtaatccaacagattacactaaaacggtagatattcatccgatatttggtcccacatttgttgatcctatatcaaatttacctttcaattttccaacagagttgggcatatatactatacgtgctccttactcagaagatgatgtggaatacaacccagaaactcagacatcatgtgtttatgcagtgttgcaagattttgccaattccaacggtattgtcttacgattacaagatgtacaaaagctagtagggatgggctcatgggttagagaatcttccataataccaacttgttgggcattgggtatagacattattattcataaaaatggggaatttaaattccacaatttccaaaattcaaggaatccggttttaatcggtatagaaaataggggtgatgttttacatgcagtcaggttaagtcataacatattgtataaactacacaactggatcaaaagcaacgtgggcacatcaatgcaacaactatcaaccataattaggccaagtatggaaaaaatttcagattcaataataggacccatgaatgacatgcataaaaccattgtgccattaaaagtgcaaaacttcactcaatttatgtgtagattggtcaccagaaaactagaagataaagatttggaaacggtaaaaactttgaatttgggtgttagcttgagagacattcaaactaagttagaattcaaaaatataaatcacacgattagaaaatccagaagagcgttgatatacacgccactaattactaggactaatggttggtttgcagaagaaagtccaggtcaattttatcgcatgtatctagttttaacaacgaccggagcagttccatgcttgttagtgccactgacaggtaatagtggatttttgtggagcttcacagcatgcccgtacccacttagtttgaatataattttaccaacacccatatgtatgagatccttaactcaacctacaccaccaaagccaataataattgccccagataaattatttaaaaaaataacagctttaaccaatgactgtgcaaggtactattatgacaaataccatacaaacattaaagttaaagatgaaacgtgtgatgaattatatattgctacctatgataatagggttcaccatcaatatgatgatggtgaatttctcaaagcgtggatagggaaaaacaaacctataaaatggtcaggcaaaatacccactaaagaaaacattgaaacaatgatgagtagaaatactctttatagattaacttatgataatgaagttgtgccggtagtagaatgcggtgacgaaatatctgcagcaatgttgtatcaatcttgtattgcagataaagcatacaaaccaaatgcaaacatcgtaaccctaaaaatgcaagaaatcatagctgacccattagaggttagtgaatacatagagagacatttcgaacaactagacccagtaaatggtaaatttaaatttggttcaatatacgatggcccggacactgtggtcggaaagcaatcagaagttcaagatagacttttcatgaatgaccctcatggtagaaactttttcgtactacttgggttgaactccgaaacagaatacacatataaagtcaggcctttaacttccacagaaattctacaatttccaagaactgcaggatatgctctattagactattttactgcaactgggacttatgtgactaggaataaaactgcatggataagattaggaccttgtgaagttagtgtagtgttggcagcaggtggcagcagggaagataccccattctggtatagggatgatactgtgtccaatgaagctctaaagcgaagcagatggtggggcaatatgctcccagactctaaaacaaaaattgacattgaaggtaattggaagaaaatagagcacagaaactttggagtggatgcaatggagttgatcaaattacatgacgttggagaagggcatattgcccacacatatggcctacccaatattaaatcagagctaatgatgatagaagggtactcggatgcttctgtgaactcagtagcagatatcacagctcagcgagatgatgtcacagtgcagactatgcatttttgggaccacacggatttactcgagtggaacacaaaagtgatgccgctaaacccaaaattcaagataaaacataaatcgttcataaatggaattggggaacaaacaagatacaccatccaacaatacccagattgtgctagacaactaataattaaagttgcaaatgcagaactaaacaccacagctaagagattaggttcgtcattagtgctgcggaaacaccccactgaaccagatgtagaagttagaagagtggcaaaagcgttttttaaacgtgactggcaagatatatcaaacaaattcaaacaaaaccctataacatacaatgatgatgatataaaactgtggttgagagaaagacctgattgcattaaaattgcagacgaattgcagcagttcttagaagagggttttcaaaccaatcctctaaatagagtgaaattacatatgaaaatggaatctttgcttaaagacgaacctaacaatcacccatacactcaggatcctagattgattgtgtggcaacagaaagccatagcagctatttacagcccaatatttttgaaagctaaagaacgtctaaagcaaatcttggcacatcatgtcatttatgctgatggattaactccaatagagttaggacgtagaattagaatggtacacaacaatgtgaggttctttgaagacgatttaagtaaacaagatagacaaactgacagggatatcatagacgttgagatgaagctatatgaaatcctaggcatagcaccacacgtgatatcagcttggcgggaagttcatgaaaagtggagatatcgtgggaaaacaataacaggcaattgggatcaacttagactgtcaggacaggcaactacagcaataggtaatttccttacgagcctaattatacatagtagaatcactgcaagcaacgaagagaacattattctcattttaggattaggcgacgatattttgatgcttgttataggttacatggacattactcaacatgtacaaataactagggacttttataatatggaagctaaaccattcttcaatgatcatcatggttccttctgcagcatgattgtttataaaacagatagtggttactgtgaaataggaccggatgtcgtgagattgcgacgtagatatgaagtgccaaattcagcagctaaacctacggatgaatcattgtccacaagagccatgtcatactgtatgatgcttggcgcaacaccagaggttctagatttggttactaagaaacattggccaatagctccagaaccatggtatgatatgcagaacaatcaaaatgctctagcaagaaagtatggcatgagtttaccacagatacaaaacgagtacaaatgccttcttgacatgatggataatccccagataactagcagacaatacaccttcttcacagaagggaattaaattacatttacactggtacaagcccccccccc

SEQ ID NO: 924 - DNA, 12 bp, Agaricus bisporus alphaendornavirus 1
  source 1..12: mol_type = other DNA
cccttaaacaaa

SEQ ID NO: 925 - DNA, 147 bp, Alphaendornavirus sp.
  source 1..147: mol_type = other DNA
aaaaaatcaaggccttacccgaaatacaatagaagtcgggatggacgcagatggctaatcaagcataattataaaaacgatgctgccaaccacggaacatgggtcaaacaagcatatggttacggacaaccaacgagaagtcaaagg

SEQ ID NO: 926 - DNA, 458 bp, Basella alba alphaendornavirus 1
  source 1..458: mol_type = other DNA
ggaatatggctaatcggcttattctaatcaaacgcaaaagacttatgacacagaccggacctgaacgaggtgataaaacacctcgttcaggttcaaaacgtagaagattcattcctccgattagaaatacaactacgtctaagcacgatagagatggtatcaagatcggttttagaccacgagaaaatcggcaaatgaaagtacaagttgggtggtttaaattaccaagaacagtaacattcaagaacaacggcaacccgtttgttacctcatttcgtaaattgtttagaagtaacaaagataaattatttaatggtgggaagaacctaagtacagtaccagccagaagtagtgaaatgacagaaatgtttatgttcatgtccacgctagagggccaattgtcaatccaagatctagatccaaaaataatcaataagtctatatacatgatagaggta

SEQ ID NO: 927 - DNA, 19 bp, Bell pepper alphaendornavirus
  source 1..19: mol_type = other DNA
gtaaaacaaacaaggtttt

SEQ ID NO: 928 - DNA, 220 bp, Cucumis melo alphaendornavirus; identical to SEQ ID NO: 801
  source 1..220: mol_type = other DNA

SEQ ID NO: 929 - DNA, 73 bp, Dicrocoelium alphaendornavirus
  source 1..73: mol_type = other DNA
catctctgctagctattgtttgctttaggatgtgccatatacctwccccctttatacaaatttacgtttgaaa

SEQ ID NO: 930 - DNA, 12 bp, Erysiphe cichoracearum alphaendornavirus
  source 1..12: mol_type = other DNA
tgaattgaagca

SEQ ID NO: 931 - DNA, 11 bp, Grapevine endophyte alphaendornavirus
  source 1..11: mol_type = other DNA
gaattgaagcg

SEQ ID NO: 932 - DNA, 20 bp, Helianthus annuus alphaendornavirus
  source 1..20: mol_type = other DNA
acctattgactaatagggac

SEQ ID NO: 933 - DNA, 10 bp, Helicobasidium mompa alphaendornavirus 1
  source 1..10: mol_type = other DNA
gactgtcgca

SEQ ID NO: 934 - DNA, 206 bp, Hordeum vulgare alphaendornavirus
  source 1..206: mol_type = other DNA
gtcaaccaaccatgtacaaccgaacagtacatgagacaggcaattcgtcaccaaaacaaaaagaggtcgagtggcttaaagccactcgacctctaaaaagagacgtgaataaacgatggaaggcaaagctgggaaaaccaaaattgcgacaaaaaccattaagattgaagcgtctcaaagggcaagtggtgaaccgatccaacaac

SEQ ID NO: 935 - DNA, 19 bp, Hot pepper alphaendornavirus
  source 1..19: mol_type = other DNA
gtaaaacaactaaggtttt

SEQ ID NO: 936 - DNA, 111 bp, Lagenaria siceraria alphaendornavirus
  source 1..111: mol_type = other DNA
gtaatggcgttctccattactcgaattaatccatcttatagtctgcaagtaaacggggagagacctccattttggaggtctttcctcaaaaaaataaaatataaggagcaa

SEQ ID NO: 937 - DNA, 107 bp, Lily alphaendornavirus
  source 1..107: mol_type = other DNA
tgccaaatactgcaattcccaagataaatggtataaaatgtaatggcttctcacatttaattaaggtgctcccagaactacgttcaggagcaccattaaaaaataag

SEQ ID NO: 938 - DNA, 166 bp, Oryza sativa alphaendornavirus
  source 1..166: mol_type = other DNA
tgaaatgtcttgtacgaccatttcaaatttatgtaaattgaacgcagcaacaacagggggggggcggagacgcccccccccttttaaaaataaaaatgatcaaatcaagtacgatcttggtttgatcaaatcaaaaacccctgttataaaagggtttttgaaaaga

SEQ ID NO: 939 - DNA, 246 bp, Persea americana alphaendornavirus 1
  source 1..246: mol_type = other DNA
gtaatgatggccaacctcgttactaatctactcaaaatatgtaagaaacgtttcaggagggggcctcgaaagaggccccctttaacttataaaaagacgagatcggtaggaagaaatcagtatatagatacaccagacaggctgactgcaattgaacaatgcatgagtgctggctgggttaaactgccacgatgttgtacagtagtacagaaccaaaatccatttgtgacttctttaggcaaattg

SEQ ID NO: 940 - DNA, 169 bp, Phaseolus vulgaris alphaendornavirus 1
  source 1..169: mol_type = other DNA
attggattaatatattggctgtggtaacctaatttaagtactttgttaactactttgcgtctagcatctccgtatgtaatggctccaaagtttattacatgtcttaactcaaataaccaggcaaaactaacgggacctcgaaagaggtcccaaattttaaaatctagta

SEQ ID NO: 941 - DNA, 19 bp, Phaseolus vulgaris alphaendornavirus 2
  source 1..19: mol_type = other DNA
ataatttgattgtcgtcca

SEQ ID NO: 942 - DNA, 344 bp, Phaseolus vulgaris alphaendornavirus 3
  source 1..344: mol_type = other DNA
ggggaaatatggcaaatttgcttaattccaaacttaatttttcttcaacaaatatgtttaaacatgcaaaaaaggtactcttagaccttgagtcgggagtaccaagagaaagaaaattaatgaaaggaggtgacaaactgataatagacgcgtctaagagcccagtcacgattgggctggcgcgtcaaatgcttaaaaacaagaaaagaaagggaggaatattaactagtaaggttcctgtcttcaagccttccgagaggaaggagatactgaaagcagtaaccgatatgaacatcattacggtcgatggttgcaaagttatacctctcaccccgtcaataggt

SEQ ID NO: 943 - DNA, 65 bp, Phytophthora cactorum alphaendornavirus 1
  source 1..65: mol_type = other DNA
gccgggtatccggtgacctcccagtcgcattaaatcacgaacagattcgcgcgttaaagagcaaa

SEQ ID NO: 944 - DNA, 95 bp, Phytophthora cactorum alphaendornavirus 2
  source 1..95: mol_type = other DNA
aaataaataggaataacatttccatcttccagtacggttatgatggatgtggtattcctaaacttaccaaaaaacaatgcgagtttaaagactcc

SEQ ID NO: 945 - DNA, 76 bp, Phytophthora cactorum alphaendornavirus 3
  source 1..76: mol_type = other DNA
acacagccgcccccacgggggcggcaataaatattataaaataaacagaaacaatgtacaaattttccaatccgga

SEQ ID NO: 946 - DNA, 11 bp, Plant associated alphaendornavirus 1
  source 1..11: mol_type = other DNA
aacctactatc

SEQ ID NO: 947 - DNA, 22 bp, Pterostylis alphaendornavirus
  source 1..22: mol_type = other DNA
acttacaaccaccacacccccc

SEQ ID NO: 948 - DNA, 27 bp, Pumpkin alphaendornavirus
  source 1..27: mol_type = other DNA
ccgcacaccaacagtgctatcattgta

SEQ ID NO: 949 - DNA, 16 bp, Rhizoctonia cerealis alphaendornavirus 1
  source 1..16: mol_type = other DNA
actatttaaattagtc

SEQ ID NO: 950 - DNA, 74 bp, Rhizoctonia solani alphaendornavirus 1
  source 1..74: mol_type = other DNA
cccgaatttcccccggatccgactaaaagtatttagtcgtatttactttctcttaacaacaattaaatcaaagt

SEQ ID NO: 951 - DNA, 35 bp, Rhizoctonia solani alphaendornavirus 2
  source 1..35: mol_type = other DNA
cgccgagctaccaattttaaaaccgatacgtgaaa

SEQ ID NO: 952 - DNA, 23 bp, Triticeae associated alphaendornavirus
  source 1..23: mol_type = other DNA
gacaatattaaaagcacgcaaca

SEQ ID NO: 953 - DNA, 49 bp, Tvarminne alphaendornavirus
  source 1..49: mol_type = other DNA
gtgtttggggggatggtaaacacgtaatatttatatctggtggtttgtt

SEQ ID NO: 954 - DNA, 41 bp, Vicia faba alphaendornavirus
  source 1..41: mol_type = other DNA
agccaaataagttggcctagacaaactagaaagcaaagcaa

SEQ ID NO: 955 - DNA, 223 bp, Winged bean alphaendornavirus 1
  source 1..223: mol_type = other DNA
gacatttttaaaaatgcctaaggtctgcagcttgtacaaagcagtacacagcaaactgcaaccaatgggcggttcacgcccacacacacttcgccaagggagaagccttactcccttgtcgaagcaagagaaacacaagactagctattcactgaggaagatctttagaaatagccaagttaaaataaaattaggcgaaaacaaacaaatcgtaccatgcacc

SEQ ID NO: 956 - DNA, 149 bp, Yerba mate alphaendornavirus
  source 1..149: mol_type = other DNA
ttacaattcctaacaaaattaaacaagcaattgtaagagggggcactcgaaagggtgcctcctcatttaaactaaaaccaaagatcaatgattatgcggtggctagatctcttggaagcaagaatagccactgcaaaaatagactcaac

SEQ ID NO: 957 - DNA, 52 bp, Alternaria brassicicola betaendornavirus 1
  source 1..52: mol_type = other DNA
gaattataaaacgaatcaaatactatcaattttaaaaaacaacacaaacaaa

SEQ ID NO: 958 - DNA, 79 bp, Betaendornavirus sp.
  source 1..79: mol_type = other DNA
taatgggttgtgaaaccactctatgatgagagtggaacaaataaaatttaaaaatttaaagtctgaaatataaccagcc

SEQ ID NO: 959 - DNA, 52 bp, Botrytis cinerea betaendornavirus 1
  source 1..52: mol_type = other DNA
tataattaactactacctacaatcaatctatcactaaccacaccaatcaacc

SEQ ID NO: 960 - DNA, 23 bp, Gremmeniella abietina betaendornavirus 1
  source 1..23: mol_type = other DNA
atataacaattcacaactacacc

SEQ ID NO: 961 - DNA, 82 bp, Rosellinia necatrix betaendornavirus 1
  source 1..82: mol_type = other DNA
gaataattataacgaaatcccataaataaatcaaaagaccaataccatcacaattcaaaacctaaacaatatattcataaat

SEQ ID NO: 962 - DNA, 501 bp, Sclerotinia minor betaendornavirus 1
  source 1..501: mol_type = other DNA
tatatatatattacaaataccattaccaccatgtctaactacaccaaaaccaacaccagcaccatgaaccaaccaccacgaaacaaaataacaaacattattgattctgttgctctcgaggctagcaacagaatcatgactctcgaaaaagcctcggaaaagaaaagaaaacaacaaacaaaatcacaagatgttgacgatcttgatgacaacaattataacagcaaatctttaacccacactggtagccaagtggcactaccacaacttaaccatggtagcgccgctgacaacagcgttaaccacaaccgctacaaaggaccatttgcaactttagtcagcgatgttcaaatgccgcccaaacatgctgaacgtagtgtggtgactgacttcgctgactaaagttgcaaatgccgcccaaacatgctgaacgtagtgtggtgactgacttcgctgaatgacaagagtgacttcaatgaagcacccaccaccttcacagag

SEQ ID NO: 963 - DNA, 25 bp, Sclerotinia sclerotiorum betaendornavirus 1
  source 1..25: mol_type = other DNA
atataaataagttaatacaatcact

SEQ ID NO: 964 - DNA, 140 bp, Sclerotinia sclerotiorum betaendornavirus 1
  source 1..140: mol_type = other DNA
gtgtgcgtatgaatggaagtctatgggcaattaaccctcactaaagaattcgatcgatcatgatgcaacggggcaattaaccctcactaaagaattcgatcgatcatgatgcaatgcatataagttaaatcacaatcacc

SEQ ID NO: 965 - DNA, 29 bp, Sclerotinia sclerotiorum betaendornavirus 1
  source 1..29: mol_type = other DNA
tacaagacccaagttaatatacaatcaaa

SEQ ID NO: 966 - DNA, 42 bp, Tuber aestivum betaendornavirus
  source 1..42: mol_type = other DNA
tttgccacaggcattacgctaactggggaattaagccctgct

SEQ ID NO: 967 - DNA, 16 bp, Arthrocladiella mougeotii alphaendornavirus
  source 1..16: mol_type = other DNA
tgaaatgactgtcacg

SEQ ID NO: 968 - DNA, 10 bp, Botrytis cinerea endornavirus 2
  source 1..10: mol_type = other DNA
cattactacc

SEQ ID NO: 969 - DNA, 12 bp, Botrytis cinerea endornavirus 3
  source 1..12: mol_type = other DNA
accactacaacc

SEQ ID NO: 970 - DNA, 49 bp, Botrytis cinerea endornavirus 4
  source 1..49: mol_type = other DNA
accattactaccatgccccgctacgtcaacagcaacaataccagtaacc

SEQ ID NO: 971 - DNA, 19 bp, Botrytis endornavirus 1
  source 1..19: mol_type = other DNA
agctttaatcaaactgata

SEQ ID NO: 972 - DNA, 30 bp, Bremia lactucae associated endornavirus 1
  source 1..30: mol_type = other DNA
aaatctgttaaacacaaaaatggttgtcac

SEQ ID NO: 973 - DNA, 226 bp, Capsicum frutescens endornavirus 1
  source 1..226: mol_type = other DNA
tcaaataaaataaaaaggtatgactactaaactaagtagacctttttctttaagtttactgggcggctctcgcctcccaaaaactcaaactcttcacgggttcactggcaacagtgtacccgtgaagaaaattacaaagaaaaatgattgctctgccagaaaggcgtttcggcagtgcaaattcaaatttaagataaacaaaacaaaaaccatttgccctgcagtg

SEQ ID NO: 974 - DNA, 11 bp, Carteria obtusa associated endorna-like virus
  source 1..11: mol_type = other DNA
tcctaaccaac

SEQ ID NO: 975 - DNA, 278 bp, Ceratobasidium endornavirus 1
  source 1..278: mol_type = other DNA
tgaatcaggaaataacaccaacccactcattcttcaacgaagaattaaacacacacacacacacacaaaccgcaccagtgaattctggtgcggttacgcgtgtagcgggtttactaaatggtaacttgactacacgcgatggatccttttcccttacgggcactggatccacaaaacaaattactcaatttaacgagcacggaccttctattaataaaggtaaaggctccttacaaattggtaatgcacttgttgctaattcgacaagttccacatct

SEQ ID NO: 976 - DNA, 22 bp, Ceratobasidium endornavirus 2
  source 1..22: mol_type = other DNA
cgaccaaccgaataactgaaaa

SEQ ID NO: 977 - DNA, 184 bp, Ceratobasidium endornavirus A
  source 1..184: mol_type = other DNA
ggtggtggcatcctcatcatcatcagaatcatcattctcataatcagaaccaatcaagaccagcgacgttgcaactccatcatcttccaacggcgtggtcactttcgaccctacgataatcaactcatcgtcaattaaagttggaggtgactccgattgctggaagaaacttttctacttcgat

SEQ ID NO: 978 - DNA, 13 bp, Ceratobasidium endornavirus B
  source 1..13: mol_type = other DNA
ttacgtcaagaaa

SEQ ID NO: 979 - DNA, 265 bp, Ceratobasidium endornavirus C
  source 1..265: mol_type = other DNA
cgtgcgtacagttagcaggccactgggggggcgtacagttagcaggcaagttagtgtggcccgcgtttaactgatactccaatcagctaatccaccaatgagtgcactcgctcaccccgtacaacacacaacacacacacaacgcactcgattggcaaagaaagaccaatcgggtgcaaaacctcattattcctggagcatcagcgggaaaaagaggaacgcactgatgcacgcattaaatggaaacagaaatgttttcaaagca

SEQ ID NO: 980 - DNA, 262 bp, Ceratobasidium endornavirus D
  source 1..262: mol_type = other DNA
gggcacttgctggaaggcgatattagacgcttgcgaggagcccgacactgcaacttacgatctcaccacatatgacgttccccagaaaggttggctcaatgatgatgatggcaacgaagtaccgtattatgatgaccttggcggtgccccttgttaccctcgtaatgagctcgtgcctattgacatgtattacctcgacaggagcatgccgattaaggagcttatctctgagatatgggacgttttggtgggcctctcagac

SEQ ID NO: 981 - DNA, 271 bp, Ceratobasidium endornavirus G
  source 1..271: mol_type = other DNA
aaattatattaaagaagatggcaatataggtgataaaccacacaacagtcctgttatatacaagcattgtatcaaagtgttgcagggcaaattcaaggacaacaaagtgactgtgcaacataatactgtgctgatcgagcgtaacaagccacctatgatatatatggaggatggaatccaatatctaaccaagaaaatgtaccggcaccatgaaatagacagatgcactggtagaactgaaaaactacaaatgttcctctgtaggtgtggc

SEQ ID NO: 982 - DNA, 27 bp, Chalara endornavirus CeEV1
  source 1..27: mol_type = other DNA
gtaccgagatgcaagcacaagaaccat

SEQ ID NO: 983 - DNA, 33 bp, chieh-qua endornavirus
  source 1..33: mol_type = other DNA
atctttcgttcgtggcaaataccacaatttgta

SEQ ID NO: 984 - DNA, 252 bp, Cluster bean endornavirus 1
  source 1..252: mol_type = other DNA
ataaagacccgcagcccaatggttttatcagccacgtcgacgacaatctgttcaaatacatgcacccttcaacttaggtgtgtgcgaaagcacacacctaagttatataaaaatgaatatcagaagaaggatcaaaccatgaagaagatggtaaaaaggtgtgacgtcaaagatgagaccaaggtaaaattacatgatgatcttgagacttattttaacacaagcaagcaaataaccaggaatgggatgaaa

SEQ ID NO: 985 - DNA, 96 bp, Cucumber endornavirus 1
  source 1..96: mol_type = other DNA
gctcccattacgtgtcgtattccaagtactctgtatacagtttcgagggagagacctcctttttggaggtctctccttaagaaactaaaattaaag

SEQ ID NO: 986 - DNA, 29 bp, Diplodia seriata endornavirus 1
  source 1..29: mol_type = other DNA
ccagcaccatcaccacgaattcaacaacc

SEQ ID NO: 987 - DNA, 72 bp, Fagopyrum esculentum endornavirus 1
  source 1..72: mol_type = other DNA
gacacacaacaaatattaaaaatgtcaagtaaaccattgaccaaactgaacctagacggttgtttaaaaatc

SEQ ID NO: 988 - DNA, 156 bp, Fagopyrum esculentum endornavirus 2
  source 1..156: mol_type = other DNA
aacttaccaatcttaagacataaacacccaacttctcgatctcttacactttctgaggtgaacccctttcacgccgcctggtgccggcccgcaccggacggcgtgaaaacaaaccaaaagagggcagtcctgcgcaagacgacactgcggcacgcc

SEQ ID NO: 989 - DNA, 130 bp, Geranium carolinianum endornavirus
  source 1..130: mol_type = other DNA
tatggcaaattcggttaattccctcattagttacaattcagctaatttattcaactatatcaacaaggtgctcttagaactagagtcgggagtgccaagagagaaaaaaatattagaaaaaggaagcaaa

SEQ ID NO: 990 - DNA, 48 bp, Grapevine-associated endornavirus 1
  source 1..48: mol_type = other DNA
atagtgactaagagagtcacagtgaattcaaaggttctacaaaccata

SEQ ID NO: 991 - DNA, 330 bp, Hydrocotyle umbellata endornavirus
  source 1..330: mol_type = other DNA
ccaatggccaattcccaaccaatatccaaatacttaacacaacaacagagagggggggggaaacccccccaaagaacccaaaatcaaattaaaagagttagtaatttgaagcgtaaacggtgcgctgcactgcaagacgatgtagatatcaatttatgttacgtacatcaaattattgacaagaagagtgggacaaaattagcaaccaaattccccagattatcacaaaaagagataaccggtaaatcaagtgaaggttggataaagcctccaaaaaatgctgttgttagaaggaatgcaaacaagttcataacttcaatcccaaaatta

SEQ ID NO: 992 - DNA, 174 bp, Hygrophorus penarioides endornavirus 1
  source 1..174: mol_type = other DNA
agcatatccgccgatatgtccatctacaacacccacccactttccaacaagaaagaaaaacaaaaacacaataacacacctgtaagcccggcgacagtgtgtgttaacccccaaacaacgccgggcgctaagccacgggaaatttcaaggcactcacccgtgctagcagccaga

SEQ ID NO: 993 - DNA, 11 bp, Hymenoscyphus fraxineus endornavirus 1
  source 1..11: mol_type = other DNA
atataagaata

SEQ ID NO: 994 - DNA, 111 bp, Lagenaria siceraria endornavirus-Hubei
  source 1..111: mol_type = other DNA
gtaatggcgttctccattactcgaattacaccatcttatagtctgcaagttaacggggagagacctccattttggaggtctctcctcaaaaaattaaaatataaggagcaa

SEQ ID NO: 995 - DNA, 18 bp, Lonicera maackii endornavirus
  source 1..18: mol_type = other DNA
agttggccttatttaaac

SEQ ID NO: 996 - DNA, 58 bp, Macrophomina phaseolina endornavirus 1
  source 1..58: mol_type = other DNA
tctcacaggcttctacagaaacagactcactcccactgccacaccaacgctagccaca

SEQ ID NO: 997 - DNA, 58 bp, Macrophomina phaseolina endornavirus 2
  source 1..58: mol_type = other DNA
cattgaccgccccagccgacccctgcaacacccacggccaacagcaatcaccaccaca

SEQ ID NO: 998 - DNA, 33 bp, Morchella importuna endornavirus 1
  source 1..33: mol_type = other DNA
tgctcttccgatctcacacaacaaaacaacacc

SEQ ID NO: 999 - DNA, 475 bp, Morchella importuna endornavirus 2
  source 1..475: mol_type = other DNA
gtcgtcaacaccaacacctaccaactcacaccaaccaaccaaactacataccaccattgattacaaatctttgtccgagaacagcccctcggacaaagattaccaaaacaacccccataaattgggggccaagggctgcgactcgctagaagtcgtaaattcatctagcacaataactgaatggattcattccaagcggaacgacaaatccattcaaagatacaaatcacgcggatttacgacatgggatgctgttcacagtacgccgttcggaatatccgttgagaaagaaactgagttagctgagaaatttctcaatgaattagcaacacgcagctcagaattgaaacaatgttacaacgaacaagtggtgtgggaagaagatgaaaaacctgaaccagaaggtccggaatttgaagacctgcagccgctgaccgttggagccgccacacactgctggttgaacataccattc

SEQ ID NO: 1000 - DNA, 21 bp, Morchella importuna endornavirus 3
  source 1..21: mol_type = other DNA
cgatctgacccttccaacaaa

SEQ ID NO: 1001 - DNA, 50 bp, Phomopsis vexans endornavirus 2
  source 1..50: mol_type = other DNA
ctcattttgggtcattacaatcacaccacacaacaaacaaccaacacacg

SEQ ID NO: 1002 - DNA, 379 bp, Phytophthora endornavirus 2
  source 1..379: mol_type = other DNA
gtgataatccgtcacattaatatgtttgctaagtttactcaacagagatcgagtaaaactaggggcacccatatccccaatgggtgcccggaaattattaacgacaaagtattaaaagacatgcgtgaaaagttccacctgaaggtcaagacaggcggtaatctcgtacacaagtacaagactgaatttaagcgcaggcgaaagaaagaaggggtcaataatactatagtacccatttgtgagggaatgaagaaaaccattctggatcaaatgcagtacgtagaaatgtacctagatgacatgaaccccaaggaggtcattgcctacgagtatcatatcaaaaacaataaaggtggctgagtacatagccggagcaagg

SEQ ID NO: 1003 - DNA, 180 bp, Phytophthora endornavirus 3
  source 1..180: mol_type = other DNA
actagcaacaaaacaatactacaaagcaaaagaattctcaggggaggccgccggaccggagtggacggcctcccagttgctttaaatcacgagcagattcgcaatctgcaatcaagattgaacttgaaagtaactagacgctttaagagattgaaaaatatcagtaaaacgctcaagtta

SEQ ID NO: 1004 - DNA, 61 bp, Rhizoctonia solani endornavirus
  source 1..61: mol_type = other DNA
gactaaaaatgactatttagtcgcaaacactcaccacatccctaacccctctcaacacaat

SEQ ID NO: 1005 - DNA, 13 bp, Rhizoctonia solani endornavirus - RS002
  source 1..13: mol_type = other DNA
caacccaaactct

SEQ ID NO: 1006 - DNA, 18 bp, Rhizoctonia solani endornavirus 4
  source 1..18: mol_type = other DNA
caacgaaatacttgaaaa

SEQ ID NO: 1007 - DNA, 250 bp, Rhizoctonia solani endornavirus 5
  source 1..250: mol_type = other DNA
ctttccctacacgagtttagtcgcttactctaccaatccttattccacaacctacacaactgataattcgcaaaacacaaacaatgacgggttacaaaacccgttacacaaatgtctggattcgcccgttgccaacatttgtttagttaatcacgggcagtgtagaatatttgattctacacaaacaaagaggattcacaaaattaaatgtgaagactcacaaaaacggttgtcattaacgcgacagccc

SEQ ID NO: 1008 - DNA, 25 bp, Rhizoctonia solani endornavirus 6
  source 1..25: mol_type = other DNA
aacctaaatcaccaaatcttccaac

SEQ ID NO: 1009 - DNA, 23 bp, Rhizoctonia solani endornavirus 7
  source 1..23: mol_type = other DNA
tgaccaacttaaactaccaaaca

SEQ ID NO: 1010 - DNA, 64 bp, Rhizopus microsporus endornavirus 1
  source 1..64: mol_type = other DNA
tgcgctaagaattgcttggttctcattttgctgtttaaaagtaagaaagttcagcagtataacc

SEQ ID NO: 1011 - DNA, 13 bp, Rhizopus microsporus endornavirus 2
  source 1..13: mol_type = other DNA
gaataacagtcca

SEQ ID NO: 1012 - DNA, 13 bp, Sanya endornavirus 1
  source 1..13: mol_type = other DNA
ctgcggatttgtt

SEQ ID NO: 1013 - DNA, 31 bp, Sclerotinia sclerotiorum endornavirus 11
  source 1..31: mol_type = other DNA
atataaatttactcactacacaaccgccaac

SEQ ID NO: 1014 - DNA, 14 bp, Sclerotinia sclerotiorum endornavirus 1-WX
  source 1..14: mol_type = other DNA
aaatcacaatcacc

SEQ ID NO: 1015 - DNA, 25 bp, Setosphaeria turcica endornavirus 1
  source 1..25: mol_type = other DNA
atatatatatataccaaagaccaac

SEQ ID NO: 1016 - DNA, 89 bp, Setosphaeria turcica endornavirus 2
  source 1..89: mol_type = other DNA
atatatatataaaataccagcctgccaatctagctactagcaaccaacttacaaaacaccactccactaaactaccaagctaccaaaca

SEQ ID NO: 1017 - DNA, 146 bp, Soybean leaf-associated endornavirus 1
  source 1..146: mol_type = other DNA
gcatctcttcaatacggatacagtaacgatcatagcgatctcctctggtacctactggtacgtcaagatccgattggtcatgaacatcgtaaggtgctgctcttcgcgaatcccagcatacccctggttggggcaaagtggagaaa

SEQ ID NO: 1018 - DNA, 64 bp, Agaricus bisporus alphaendornavirus 1
  source 1..64: mol_type = other DNA
actgattattgcgtattgagtgaaaacgtttgtttcactcaacgcgcaattagtgtgtgtgtgt

SEQ ID NO: 1019 - DNA, 29 bp, Alphaendornavirus sp.
  source 1..29: mol_type = other DNA
aggtctgacacgaggaacctcatgggttc

SEQ ID NO: 1020 - DNA, 42 bp, Basella alba alphaendornavirus 1
  source 1..42: mol_type = other DNA
cgttttgatagaggttataaacccctaccgggcccccccccc

SEQ ID NO: 1021 - DNA, 735 bp, Beijing alphaendornavirus 3
  source 1..735: mol_type = other DNA
ccaattcgcttttcaaaattacggaaacatgtactgtctcatcgacaatacatggtacatccaaccaggtgaatatgacagtgaacatttccacccagactttgaagtgtggccaagtcttaagagattgaagccaaaagggtttggaaaaatttcagtggtagatagaattacagtgtgtacagaatcgattgctagcgtgtccaggattacatttaaaaatttgttatctaatgatgtaggtcgattggttaacaaatacgggcaacttttaaccaacattatacctgggtacacatattactacacgtacaccaactggagaaatgaaaattgtgttcaacagttaagttacacagaagcgaaactgctctttgatcatttgggttctgaattcccttgtgggaaatcaaaaggtcttaaatttacaaaggtgccactggatggatggttggccagctacccgaaatatgaatatgctaaccaaaatgaaatagtaaaatcagggcacaacacagaatttaatatactgagacaagaggggactgcatccaaaaacactacgaactggtgtcttaatgatgattggaacacgatcacagcaaattgtagtaatatatataccgctctaccaatgtatcgcagtaatcctggtataccacactattggactaagtcaatggattcaaatcacataatgataccctgtggttatagagtgcatttcaatgacac

SEQ ID NO: 1022 - DNA, 98 bp, Beijing sediment alphaendornavirus 2
  source 1..98: mol_type = other DNA
gcaaaattgatacaacatggaaagacggtgatgaattgtactttgaaaaacgagtaataaaaagagattttttggctttgagtcaaacagaaagaggc

SEQ ID NO: 1023 - DNA, 40 bp, Bell pepper alphaendornavirus
  source 1..40: mol_type = other DNA
agccaggttaacaacaaaatttgagttttcggggagggag

SEQ ID NO: 1024 - DNA, 38 bp, Cucumis melo alphaendornavirus
  source 1..38: mol_type = other DNA
tttcttaaggagaggaaaaatcctctctcccccccccc

SEQ ID NO: 1025 - DNA, 36 bp, Erysiphe cichoracearum alphaendornavirus
  source 1..36: mol_type = other DNA
ataatttaatttcattgtggggtccgatctataagc

SEQ ID NO: 1026 - DNA, 59 bp, Grapevine endophyte alphaendornavirus
  source 1..59: mol_type = other DNA
ctctcacacaactcacaaacaacttaatttaatttcattgcgggatccgatctataagc

SEQ ID NO: 1027 - DNA, 39 bp, Helianthus annuus alphaendornavirus
  source 1..39: mol_type = other DNA
gactgcaagtagagaattggagagggatttccccccccc

SEQ ID NO: 1028 - DNA, 482 bp, Helicobasidium mompa alphaendornavirus 1
  source 1..482: mol_type = other DNA
caccagttgccccatgggcgggcagggacattccctgtccaatgctcactttacaccatgcccataccgggaaatggccattaataatgactttgaaagatagcatgaggttgcacttcacgcaacggggatgtgtggtggacccaaatggtgacttgtatgaagctggtagcgtactggtacaactaaacgaaaaggcaccactgacgacaatggaaaaacggtcaacatctggtggtagccatgtgaacgcggtttcaaatcactataccacagcaaatgcgcgcatcgcagtacagagccacttggatacgagcaactgggcacaaggtgtgaccactagggatgtaattagcggcactgatgctcatggtctgtcattaaccatgtgtcaggactatgctctgaatgatgatgagctacaacaaatcaaggacatcgaagcagacctcaataaactggatctatatggcgcagtatcg

SEQ ID NO: 1029 - DNA, 45 bp, Hordeum vulgare alphaendornavirus
  source 1..45: mol_type = other DNA
tgctcctacccacgttttggtgacgaacaagattgcccccccccc

SEQ ID NO: 1030 - DNA, 55 bp, Hot pepper alphaendornavirus
  source 1..55: mol_type = other DNA
aaggtactaaccaaaattagtttgagttttcgggaggggagggcccccccccccc

SEQ ID NO: 1031 - DNA, 29 bp, Jiangsu alphaendornavirus 1
  source 1..29: mol_type = other DNA
tttaatacaatttgacaatattcttttat

SEQ ID NO: 1032 - DNA, 52 bp, Lagenaria siceraria alphaendornavirus
  source 1..52: mol_type = other DNA
tggaaaataaataattttttgaggaaggtgttttaaaacccccccccccccc

SEQ ID NO: 1033 - DNA, 632 bp, Lily alphaendornavirus
  source 1..632: mol_type = other DNA
tcatcttattttaattgaacgagcccaatacccggaacgttggaatagccattcctcgtcaagacacatatgccatgcctatgtggcttcacgaagactggtcgttccactttctgtcacctgtaatcgctacgcaagcgccattaatgtgaaccgtggctaattatcagactgctgcgtcatctgtaagtagccattcttcaattactggccgcattgcagtacgagaaacaagcttgacagaaagctggaaacggcaaagtgacgttgagtcactttgtcgcgttacagccgaccagttacgggcatacttattgaacgagcccaatacccggaacgttggaatagccattcctcgtcaagacacatatgccatgcctatgtggcttcacgaagactggtcgttccactttctgtcacctgtaatcgctacgcaagcgccattaatgtgaaccgtggctaattatcagactgctgcgtcatctgtaagtagccattcttcaattactggccgcattgcagtacgagaaacaagcttgacagaaagctggaaacggcaaagtgacgttgagtcactttgtcgcgttacagccgaccagttacgggcatacttattcagtgttataacaggc

SEQ ID NO: 1034 - DNA, 48 bp, Oryza rufipogon alphaendornavirus
  source 1..48: mol_type = other DNA
acatgattaattatttttaaaagggcggggatccctccccaaccccgg

SEQ ID NO: 1035 - DNA, 67 bp, Oryza sativa alphaendornavirus
  source 1..67: mol_type = other DNA
atattataactaactctgttttgtcaatttatttttaaaaggatggggcacccctcccaaaccccgg

SEQ ID NO: 1036 - DNA, 31 bp, Persea americana alphaendornavirus 1
  source 1..31: mol_type = other DNA
ttacgaagttaaagaggcccccccccccccc

SEQ ID NO: 1037 - DNA, 39 bp, Phaseolus leptostachyus alphaendornavirus
  source 1..39: mol_type = other DNA
atgagtaggaatgaactctaatgtttctggccccccccc

SEQ ID NO: 1038 - DNA, 43 bp, Phaseolus vulgaris alphaendornavirus 1
  source 1..43: mol_type = other DNA
caatgatgcgataacatgaacccgaacggttcccccccccccc

SEQ ID NO: 1039 - DNA, 35 bp, Phaseolus vulgaris alphaendornavirus 2
  source 1..35: mol_type = other DNA
cttgaattttcggggggtgggggcccccccccccc

SEQ ID NO: 1040 - DNA, 62 bp, Phaseolus vulgaris alphaendornavirus 3
  source 1..62: mol_type = other DNA
ctaatcgatgcactccaaattaaagtacaccaagaaatcaactttctcgccccccccccccc

SEQ ID NO: 1041 - DNA, 37 bp, Phytophthora alphaendornavirus 1
  source 1..37: mol_type = other DNA
gaaaggatataacataatacaagcaacgccccccccc

SEQ ID NO: 1042 - DNA, 63 bp, Phytophthora heveae alphaendornavirus 1
  source 1..63: mol_type = other DNA
gaacctcatagaactttctgaagttgaaattttaattttttgttgccaggcatctatatgagc

SEQ ID NO: 1043 - DNA, 13 bp, Plant associated alphaendornavirus 1
  source 1..13: mol_type = other DNA
agatgagtgtggg

SEQ ID NO: 1044 - DNA, 32 bp, Pterostylis alphaendornavirus
  source 1..32: mol_type = other DNA
gaagggaggagcaggtgaggggcccccccccc

SEQ ID NO: 1045 - DNA, 35 bp, Pumpkin alphaendornavirus
  source 1..35: mol_type = other DNA
tttcttaaggagaggaaaaatcctctctccccccc

SEQ ID NO: 1046 - DNA, 226 bp, Rhizoctonia cerealis alphaendornavirus 1
  source 1..226: mol_type = other DNA
gggtggcccatttggaccgaaccttggtacaacagtggtttggcatctcaggcaatggccgtaaagcatggtttatccatccaccaagttaacgggatgcttagacatctaatcgaaatgatggccagtccaacattatacactcaatcatgggatgtttgggtaccagtgaagtagcggggctctgcgaggagcgtgaggggcaacagcaccctcttggcccagt

SEQ ID NO: 1047 - DNA, 50 bp, Rhizoctonia solani alphaendornavirus 1
  source 1..50: mol_type = other DNA
agttcagtacggggcattgcccccccccggatcccggagaggatccccgg

SEQ ID NO: 1048 - DNA, 26 bp, Rhizoctonia solani alphaendornavirus 2
  source 1..26: mol_type = other DNA
atagtgtgtgtgtgcccccccccctg

SEQ ID NO: 1049 - DNA, 52 bp, Sichuan alphaendornavirus 22
  source 1..52: mol_type = other DNA
actaacaattgcaatccaaaccatttgtaaagaaaaggaaattggaaattca

SEQ ID NO: 1050 - DNA, 70 bp, Tomato associated alphaendornavirus 1
  source 1..70: mol_type = other DNA
cgggttgtctagtcatacaatttaatttcattgcgggagcaaatcgtgagcatgtcggtgcgttgtcttt

SEQ ID NO: 1051 - DNA, 29 bp, Triticeae associated alphaendornavirus
  source 1..29: mol_type = other DNA
agattgaatgaggaaggcaaagccccccc

SEQ ID NO: 1052 - DNA, 37 bp, Tvarminne alphaendornavirus
  source 1..37: mol_type = other DNA
tctggtgttgaatggcttcctggcgcgggccaggaag

SEQ ID NO: 1053 - DNA, 116 bp, Vicia faba alphaendornavirus
  source 1..116: mol_type = other DNA
catggttcaatggataaaaagatagttagttgttgcccccaatcatgaattggaggcaaacacaaggcagaattatcgtgtggcaaccaaaagaactgtgagcccataccatcggg

SEQ ID NO: 1054 - DNA, 42 bp, Winged bean alphaendornavirus 1
  source 1..42: mol_type = other DNA
gtgtttctcaagtgtgtgtgtggggtaaggaccccccccccc

SEQ ID NO: 1055 - DNA, 62 bp, Yerba mate alphaendornavirus
  source 1..62: mol_type = other DNA
atcggaacataaaggagattcaagaaaatttagtttaaatgaggagatttcaatgaaacggc

SEQ ID NO: 1056 - DNA, 35 bp, Alternaria brassicicola betaendornavirus 1
  source 1..35: mol_type = other DNA
atgttgttgatgttggaggagggggcccccccccc

SEQ ID NO: 1057 - DNA, 80 bp, Betaendornavirus sp.
  source 1..80: mol_type = other DNA
agtgcacacaactagttaatgggttgtgaaaccactctatgatgagagtgggacaaataaaatttaaaaatttaaagtca

SEQ ID NO: 1058 - DNA, 141 bp, Botrytis cinerea betaendornavirus 1
  source 1..141: mol_type = other DNA
catagtgcattaatcaataccagcgacatgcaaatgtgaaatcaactgatacatacatgcacttttcaaatagaatgtggctaaatatatctatagataagctaccattaaacgttgttgtttgatatatgtggccccccc

SEQ ID NO: 1059 - DNA, 62 bp, Gremmeniella abietina betaendornavirus 1
  source 1..62: mol_type = other DNA
tcggagtcattgcaaaataattattgttttaaaatttaatgtttataatgttcatggccccc

SEQ ID NO: 1060 - DNA, 110 bp, Rosellinia necatrix betaendornavirus 1
  source 1..110: mol_type = other DNA
gttttgcggaaatgttgaagggacgcaaataatgagggatggctaaatagccatcactgattagtagcaacctaacaaatccacaagttaagcttgttttcccccccccc

SEQ ID NO: 1061 - DNA, 62 bp, Sclerotinia minor betaendornavirus 1
  source 1..62: mol_type = other DNA
gtcgttaaatgtgaggccaataactagaagagagtcaaaggtagataaccttttttaacccc

SEQ ID NO: 1062 - DNA, 108 bp, Sclerotinia sclerotiorum betaendornavirus 1
  source 1..108: mol_type = other DNA
ggtaacactactttgtaagtgttacccgaatacaagtaagcacctatttttatttacaactgaacaccaaacaacaaccaactatgtgtattcgttctgtgccccccc

SEQ ID NO: 1063 - DNA, 154 bp, Sclerotinia sclerotiorum betaendornavirus 1
  source 1..154: mol_type = other DNA
ggtaatattgcaatgcaatattacccataaccaaataactatttagactacgaatagttgaatatacaacagcaagtaattatgtgtatttgttctgtgccccccctgcattgcatcatgatcgatcgaattctttagtgagggttaattgccc

SEQ ID NO: 1064 - DNA, 111 bp, Sclerotinia sclerotiorum betaendornavirus 1
  source 1..111: mol_type = other DNA
ggtaatactacttagagtattaccctcaatcaaataaatatttgagctgtaatagccgaaatgcacaacagcaacaaattatgtgtatttgttctgtgccccccccacagt

SEQ ID NO: 1065 - DNA, 64 bp, Tuber aestivum betaendornavirus
  source 1..64: mol_type = other DNA
cgacaaggaaattatacaccaatgattagccatttagtgaatgggtaaggggcccccccccccc

SEQ ID NO: 1066 - DNA, 23 bp, Almopos endorna-like virus 1
  source 1..23: mol_type = other DNA
ttaatttttccggaggtgatccc

SEQ ID NO: 1067 - DNA, 18 bp, Althepos endorna-like virus 1
  source 1..18: mol_type = other DNA
gtcggggttggtggggtg

SEQ ID NO: 1068 - DNA, 51 bp, Arthrocladiella mougeotii alphaendornavirus
  source 1..51: mol_type = other DNA
tacaagtacaattgacacaatttaatttcattgcggggtcaaatcgtaagc

SEQ ID NO: 1069 - DNA, 69 bp, Bolbocoleon piliferum endorna-like virus
  source 1..69: mol_type = other DNA
ctattacacatggaattttgatactcatatatgcccaactcacgaaagttgtgaataaaccattcttct

SEQ ID NO: 1070 - DNA, 65 bp, Botrytis cinerea endornavirus 2
  source 1..65: mol_type = other DNA
gtcaaacagtacgcaggtagcaagcataagagagtcgaaggtagataaccttttttaaccccccc

SEQ ID NO: 1071 - DNA, 64 bp, Botrytis cinerea endornavirus 3
  source 1..64: mol_type = other DNA
gttacctagtatacgggcagcaggctgaagagagtcgaaggtagataaccttttttaacccccc

SEQ ID NO: 1072 - DNA, 75 bp, Botrytis cinerea endornavirus 4
  source 1..75: mol_type = other DNA
atgtatactgactacaactgagaagtgttatgcgagcaaagagtgtcagggcaaatagccttattaacccccccc

SEQ ID NO: 1073 - DNA, 25 bp, Brachiomonas submarina endorna-like virus
  source 1..25: mol_type = other DNA
tttgcacagggaacacagaccccaa

SEQ ID NO: 1074 - DNA, 45 bp, Bremia lactucae associated endornavirus 1
  source 1..45: mol_type = other DNA
gtataattttaattataagcctcaaaagaatagcgacgccccccc

SEQ ID NO: 1075 - DNA, 77 bp, Brown algae endornavirus 1
  source 1..77: mol_type = other DNA
caaccaaacattggctcatcacctacatcggcacacgttgcaggtgtgagtacaattcagttccgcccccccccccc

SEQ ID NO: 1076 - DNA, 62 bp, Brown algae endornavirus 2
  source 1..62: mol_type = other DNA
tctgccaatcggccaagttgattatatttaatcaacttggaaaatagatgtgtgtgtgtggc

SEQ ID NO: 1077 - DNA, 44 bp, Capsicum frutescens endornavirus 1
  source 1..44: mol_type = other DNA
taataaatagtttgagtttttgggaggggagggccccccccccc

SEQ ID NO: 1078 - DNA, 37 bp, Carteria obtusa associated endorna-like virus
  source 1..37: mol_type = other DNA
tttaagtccgcgggggggagcaacaagcgatcagccc

SEQ ID NO: 1079 - DNA, 59 bp, Ceratobasidium endornavirus 1
  source 1..59: mol_type = other DNA
gcgactccgtatgagagatcgtgggacccctttacgggaccctcaagtgtcgtgtgtgc

SEQ ID NO: 1080 - DNA, 30 bp, Ceratobasidium endornavirus 2
  source 1..30: mol_type = other DNA
ttcacggcgaggtacttaaggtgtgtgtgg

SEQ ID NO: 1081 - DNA, 116 bp, Ceratobasidium endornavirus A
  source 1..116: mol_type = other DNA
aggaaacaattaaggaatattggggttggtgtgtgcgtgggatagttcgtgagtacggctttgttgatgctcttgatgatttccggcatttcgctcacacgcagcttaatgttgtt

SEQ ID NO: 1082 - DNA, 24 bp, Ceratobasidium endornavirus B
  source 1..24: mol_type = other DNA
aggttgtaaaataaagtaaagaag

SEQ ID NO: 1083 - DNA, 70 bp, Ceratobasidium endornavirus C
  source 1..70: mol_type = other DNA
attacgtgacaaaaagccgggtaagacccagcaaagagatgtgtgggccgcttgccccagcttccctacc

SEQ ID NO: 1084 - DNA, 64 bp, Ceratobasidium endornavirus D
  source 1..64: mol_type = other DNA
gttttcgcggagaatggtggcgggcccccccgcgccacctgctaactgtacggccctcttcgct

SEQ ID NO: 1085 - DNA, 48 bp, Ceratobasidium endornavirus F
  source 1..48: mol_type = other DNA
atgcaatcagccaatgcttgcgcaatcaaaaatgacctagttgtaggt

SEQ ID NO: 1086 - DNA, 37 bp, Ceratobasidium endornavirus G
  source 1..37: mol_type = other DNA
atgcaacccttagatgggcgtgcgggatgaagtatat

SEQ ID NO: 1087 - DNA, 38 bp, Ceratobasidium endornavirus H
  source 1..38: mol_type = other DNA
ttatcgcaggtaagcagggggggccccccccccctcag

SEQ ID NO: 1088 - DNA, 41 bp, chieh-qua endornavirus
  source 1..41: mol_type = other DNA
tttcttaagaagtgcagggttataacaccctgacaccccgc

SEQ ID NO: 1089 - DNA, 19 bp, Cluster bean endornavirus 1
  source 1..19: mol_type = other DNA
gaagaagggtgcccccccc

SEQ ID NO: 1090 - DNA, 39 bp, Cucumber endornavirus 1
  source 1..39: mol_type = other DNA
tttcttaagaagggttattaaaacccccctccccccccc

SEQ ID NO: 1091 - DNA, 139 bp, Diplodia seriata endornavirus 1
  source 1..139: mol_type = other DNA
agcccatatcagttcacacaatgtgggtcgtgtgagaattagcatcatcaaaatatgagaaaatggtgtaaggcacaatcccgagatgatgccaacccaacataacacccaaggagtgtgttgaagtcaaatcgctggc

SEQ ID NO: 1092 - DNA, 32 bp, Fagopyrum esculentum endornavirus 1
  source 1..32: mol_type = other DNA
agagagtgtggagcggagggcccccccccccc

SEQ ID NO: 1093 - DNA, 25 bp, Fagopyrum esculentum endornavirus 2
  source 1..25: mol_type = other DNA
gtattgaaggggttcaccccccccc

SEQ ID NO: 1094 - DNA, 47 bp, Geranium carolinianum endornavirus
  source 1..47: mol_type = other DNA
caggactggaaaataatccgattgcaaaatttctctcgccccccccc

SEQ ID NO: 1095 - DNA, 38 bp, Hydrocotyle umbellata endornavirus
  source 1..38: mol_type = other DNA
tgacagtcaccccccccagaacctctcgcccccccccc

SEQ ID NO: 1096 - DNA, 42 bp, Hygrophorus penarioides endornavirus 1
  source 1..42: mol_type = other DNA
accattagaataacaggccacccgggggtgtggccccccccc

SEQ ID NO: 1097 - DNA, 32 bp, Hymenoscyphus fraxineus endornavirus 1
  source 1..32: mol_type = other DNA
aagtgtgtggaggggtggtgtgggcccccccc

SEQ ID NO: 1098 - DNA, 64 bp, Krauss' spikemoss associated endorna-like virus
  source 1..64: mol_type = other DNA
attaatatcgctgggtgaaagcccyatcaacaagctataccggactggtatgacatctacccag

SEQ ID NO: 1099 - DNA, 53 bp, Lagenaria siceraria endornavirus-Hubei
  source 1..53: mol_type = other DNA
tggaaggaaggataattttttgaggaaggtgtatagaacaccccccccccccc

SEQ ID NO: 1100 - DNA, 66 bp, Lonicera maackii endornavirus
  source 1..66: mol_type = other DNA
ccgtagcagcgcaatagattgcatggcctcgactgcaaacgatcaaatgtgtgtggtgtgcccccc

SEQ ID NO: 1101 - DNA, 86 bp, Macrophomina phaseolina endornavirus 1
  source 1..86: mol_type = other DNA
acgggtgaccatggaaagcgtgcgcaggagagtgaagaggggccctttggggcccggccagggtttgtttgtgtgtgagatcggaa

SEQ ID NO: 1102 - DNA, 66 bp, Macrophomina phaseolina endornavirus 2
  source 1..66: mol_type = other DNA
caggtgtgagcagcgaccgtggaacggggatggctagggggatcgcagggtttgtttgtgtgagcg

SEQ ID NO: 1103 - DNA, 122 bp, Morchella importuna endornavirus 1
  source 1..122: mol_type = other DNA
attgccgacaaatttggagctaaaaacattcctgtcaaaaaccgttccatccacaaaccacttagttaacgagtgagcagttgattgtggaggcccagttgggttccatataaggcaagcaa

SEQ ID NO: 1104 - DNA, 48 bp, Morchella importuna endornavirus 2
  source 1..48: mol_type = other DNA
gtgggagcacgcaaagcttatgtggaggttatgtaatcgatgtgtggc

SEQ ID NO: 1105 - DNA, 70 bp, Morchella importuna endornavirus 3
  source 1..70: mol_type = other DNA
ttgagcaccaacctcataatggatggcaggacaaaacaaaattgaaattgtattatatcgttatttgtgg

SEQ ID NO: 1106 - DNA, 68 bp, Ophiostoma bicolor endornavirus 1
  source 1..68: mol_type = other DNA
agtagcacccaagtgagattgtctagttgtgtggcccccatgatcgatcgaattctttagtgagggtc

SEQ ID NO: 1107 - DNA, 30 bp, Phomopsis vexans endornavirus 1
  source 1..30: mol_type = other DNA
tgtgagtgggccgaaggccacaccccgagc

SEQ ID NO: 1108 - DNA, 178 bp, Phomopsis vexans endornavirus 2
  source 1..178: mol_type = other DNA
gatgcagatacacaaggagccacgggcctcaccatgtagcagtaacgcgactatggttgcctcactgaatgaaatcaagtgccctttatgggaaaaactcgccacaaaactaaagtgctagcattaatatcttaatcctagcacgttgttgaaagtttgtgttgtggatggccccccc

SEQ ID NO: 1109 - DNA, 46 bp, Phytophthora endornavirus 2
  source 1..46: mol_type = other DNA
tctcatagcactcctatgagccttcttatgaagggtttcccccccc

SEQ ID NO: 1110 - DNA, 37 bp, Phytophthora endornavirus 3
  source 1..37: mol_type = other DNA
atagttatagtaccgatggaaacaagcaacccccccc

SEQ ID NO: 1111 - DNA, 47 bp, Rhizoctonia solani endornavirus
  source 1..47: mol_type = other DNA
aggacgagggagggttccccccccccccccggatcccgggaattcgg

SEQ ID NO: 1112 - DNA, 48 bp, Rhizoctonia solani endornavirus 1
  source 1..48: mol_type = other DNA
aggaaaattaaaggaaaaaccatagggagtctagaagagtgtgtgtgt

SEQ ID NO: 1113 - DNA, 37 bp, Rhizoctonia solani endornavirus 4
  source 1..37: mol_type = other DNA
aaaccccggagcaataaaacgtgtgtgtgtgtgtggg

SEQ ID NO: 1114 - DNA, 74 bp, Rhizoctonia solani endornavirus 5
  source 1..74: mol_type = other DNA
gtaacgggagggaaaagtaacccctcattgtttgtgttttgcgaattatcagttgtgtaggttgtggaataagg

SEQ ID NO: 1115 - DNA, 14 bp, Rhizoctonia solani endornavirus 6
  source 1..14: mol_type = other DNA
ttatttctttcccc

SEQ ID NO: 1116 - DNA, 28 bp, Rhizoctonia solani endornavirus 7
  source 1..28: mol_type = other DNA
tcaacgtagtttattgtgtgtgtgtgtg

SEQ ID NO: 1117 - DNA, 46 bp, Rhizopus microsporus endornavirus 1
  source 1..46: mol_type = other DNA
gttgaagagtctcgtcgcagaggttagttgttgtggttctgcgacc

SEQ ID NO: 1118 - DNA, 18 bp, Rhizopus microsporus endornavirus 2
  source 1..18: mol_type = other DNA
ggtgataattcggggggg

SEQ ID NO: 1119 - DNA, 88 bp, Sclerotinia sclerotiorum endornavirus 11
  source 1..88: mol_type = other DNA
tagggatatgtaatatgaacccctgttgatacatgagttagttgagtataataatgtcatactatgctatgcatagtatgttactact

SEQ ID NO: 1120 - DNA, 106 bp, Sclerotinia sclerotiorum endornavirus 1-WX
  source 1..106: mol_type = other DNA
ggtaatattgcaatgcaatattacccataaccaaataactatttagactacaaatagttgaatatacaacagcaagtaattatgtgtatttgttctgtgcccccca

SEQ ID NO: 1121 - DNA, 106 bp, Sclerotinia sclerotiorum endornavirus 2-A
  source 1..106: mol_type = other DNA
ggtaatactactcagagtactacccttaatcaagtaaatactcaagccatgaatagccaaaatgcacaacagcaacaaattatgtgtatttattctgtgccccccc

SEQ ID NO: 1122 - DNA, 74 bp, Sclerotinia sclerotiorum endornavirus 3
  source 1..74: mol_type = other DNA
gccaaccaatatgcggataacaaacagaagagagtcgaaggtagataaccttttttaaccccccactatatttt

SEQ ID NO: 1123 - DNA, 142 bp, Sclerotinia sclerotiorum endornavirus 8
  source 1..142: mol_type = other DNA
tgcaaatactataactaatgtcagcaaaatgcgatacccacacttgcatgtttgaacatatgcaacccattatgaatacaaccagatatatctataaacaaactaccatttagcgttgttgtttggtatatgtggccccccc

SEQ ID NO: 1124 - DNA, 59 bp, Sclerotinia sclerotiorum endornavirus 9
  source 1..59: mol_type = other DNA
gccaaccgatatacggataacaaacagaagagagtcgaaagtagataactttttttaac

SEQ ID NO: 1125 - DNA, 117 bp, Setosphaeria turcica endornavirus 1
  source 1..117: mol_type = other DNA
tgcacaacgcagttacagcgcgttaggggcggcaccaaggttcgcagggggcaatccctagcgctaacccacaagggtacgccatccacaggcaaccgcctgagtttttgtgtgtgt

SEQ ID NO: 1126 - DNA, 95 bp, Setosphaeria turcica endornavirus 2
  source 1..95: mol_type = other DNA
acatgcataagtcacgcgtggggccatcttaaatgagggttagtggggaaggtgaaaccccttcccctatcccatcatagtttttgtgtgtgtgt

SEQ ID NO: 1127 - DNA, 55 bp, Soybean leaf-associated endornavirus 1
  source 1..55: mol_type = other DNA
tacccatggcactcccatgggctgaatttattcaggtttcccccccccccccaca

SEQ ID NO: 1128 - DNA, 262 bp, Staurastrum sebaldi endornavirus
  source 1..262: mol_type = other DNA
ttcaacgagagaccgagtggccaaaagagggataccctatagtgaaagtgaatgtattactgcagcaagctataaatatgacatgacaccgcaacaagtagaaggttatagagatgttttacttaaaatgatggaaaatcaagaacaaactacacatgaatttagaatgttcactgccagttctaggtggtaattcaacgagagaccgagtggccaaaagagggataccctatagtgaaagtgaatgtattactgcagcaag

SEQ ID NO: 1129 - DNA, 32 bp, Volvox aureus endorna-like virus
  source 1..32: mol_type = other DNA
attacatttacactggtacaagcccccccccc

SEQ ID NO: 1130 - DNA, 12654 bp, Agaricus bisporus alphaendornavirus 1
  source 1..12654: mol_type = other DNA
atgaactcattagctaaagtagaaacatatcacacacacacacgagggggtggtgtcccctccaaaatacgttgttacaccagtttcaaaaaaacgctaacagccatacaacgtaacaaacactgtcttggacttcaaatcgatgaagattttccaaagacagtaaaaatgtccgatcctgttgatgaatatgccgacagaattaaattaatagttggcgcaacaggagtcacggaagtcaaacataaatactctcacatggttggaggggctgtttacttcaaggaagccatgaaaattagtggtcttaccagagaagagttactctcagaaatcctccaaacggtgagatcgaaattcgtttgtctatttgaatgtcacaaacaagatgatcccattaacatggtgatggaactcggcaatgaaattttaaacaatttgccagaagatgatgatgaaaatattgattcgttatgtgaaacaatttcagacttatatctaggtgaatacaatagttacgattatgaggaagaagaacatgaacattgtgaggatgaaatggagttgttagatgatatctacaacgacgtggcagcttactttgaagtgtcagatatgtatgatacaccatttacacccgaacaatgtttagaactcctaaaacaattcgatgaaccaatcacttcaagtgttgacattttaaaattgcatctaaatgttaagcacttaccaaaacttgttaacgtggcttattgtgccaattgtgaaatggaagcaatcctaggtcataaccacaaaaatgtcctcactaattgcatttgtttaaattgttataaagagttgacaattaaaccattaggtaaaatcggatccacggtgcctgatccaatgagtctgacagaatatttagacaatggtaatagcattagtggtgcctttgagaatattgctcaagagcacgatttgagagtggttgtgcaagcattatctaggctcaacgccaaattaataactttacacgaaccgatagataacttgaccaaatcataccttaagaaactagcaccagaactagtgtttgcacgaggtaaaggtagtcttgttggtaacacattactagacaatctaacaattggtttaacagcaaatctacacaactctggtgaaaccacgttactcatcagtgaacaccctccaccatcaccagcatatattaattggaacagatggcccgacagcaatcaaaattacggatttagaaacactgtggtgtcaattgaccgtatagtagctggtttcaaactacttagtcaactagaagtcgactgttctgtcgtgttttgtttgccgactggcatagctggtgtcacagattatgatacaaccactaacatacgttttgataggtcaaacaattcttgtttaatgacacatgatatgagaacagaagtacactatattaattccacacataaaatgttgttattcaatgctaacataatgagcattaatgataaattgtttgtcattagtagacaaacttatgatagtatatgtgtcgtcacggtacgtagagttgtgactttcaaagattggacaatttacaatccagatttgcgaaacacgtttactatccctacgattacctacaacagcgctcttggtttagtcggagcaccgatcgtcgtgatcaaaactgtcaaattacacaaagaattgttgactactttaattacacgaaacttgaccggcaatgtgagtgccaaagaactcgcggagtacggattgggcttcgctcattcaaagtacaacttattcgacaaatcattcagtcattatgacgtgagtgctcaaatgatcatggatcacgttttcatatccgtactattgtgcacaagagctaccaacaaaagacgcgcgttactgaattctgccacacctgatttaacaggtatattgaacttaattggttacaattcactcggctacctcgcagccactattaaaaagatgttagacaaaaattctactataactgcactcaacgactttttcacaaacaataacagtgttttaacagaatatgctaatgatccagtttgggacgaaattgagagttggacacacactgctactaacgaaaacattcaactaatcacgcattacgaaacgccccttggttgctgccacactgatatacacaacgacagttgtggttgttgtggtttgggaaattccacttttaggtgcacccactgcgctaatacaccagcacaattaattgagactctgaatatagtagttgaagaaaaaatagaaccgtcagagcaagtgaagacacgtaatgaaaaaatatttgattacaatggcataccagcaaggaaggcagtgttgccttgcgtcgaactatcagacggttcacatgaacacacttgtgtggtttgcaacaatcgttataaacacacacacaatcatgagagtagtatgcatccacttttcgttggcgattgtccatggtgtgaaccagaattaacaacaaaaaacaaaggagaaaaaattgattatttagactcaaacaataacattaacaaaccagttaaaaccgacgcaaatgttcctaacaagcctataacacctggacccgccaaactactcaatgacgttccagaaaaaacagagcgtacaccagaatcaacagtacctgaaacaccgtggggaaactcaaatagactaagtgttttatactcacaattaagtcaagcaaccagtgtacatttcgctgagctgatttacagcaaaggagcacggttcgtgaacctttacacaatcactaatgaaaaacaaagtttaatattgtactgcccatttgggactcacgttgtgactccacaaagtttcgttgtcaaagacacaatgcccgtagcaaattcaggtttagatacttgtgcctatgacgcattaaatttcttttatcaaaatagatcaactattgaagattttaaagctgtaagcaaaactgataacttttggagtaacgatgaaattatctctgttgctgaacttaagaaattgaacgttgtggttttgtcaaagcaaagtggaataatccacaaagcaactaatagtgacgaatttgcagttattgttcacaatgatttcttagataaaccaggcgcacactggacaccagccaaagtgtcacaaatttcaaattgtactataacgccagtttggaccttgaatgcagacttggaacagtataacaagatgtcaaacatgaaatataagaaacattacgatttagtgaaactagatattgaacaattgctaaccgtaaacctagaaatagttaaaatttcaacaaacactttagaactacttcgtcacgcaaaacctaacattgttgttgatgttaagcatggtcacgaattccttcaaacaacaagtttgagtcaagatagtatggaattagaaacagttgaaataccagtcaaattttcagctttgatgaatttgttgaacgattcgagtaagactgttcttgaacatgataaattaacaagacattacaatgtcgcattaactaatactatcgacgaattgtacgaggccgagatcactgaagctatcagaatattcttaaaatgcaaattcggtgccaatattacaaattatcataaaatgagggtaattaaaagatttgatgatttgatagaattagaaaatttagatttaccaaaacttaaagtgggagacatcatccatttaagtcaccagtcgaacatgatagcggtaccgattttaaaaactcgtcacaatacattagtagtaaaaataactggtgtgcgagttggtgttcaacttttgtttggaattacaaaggaatccgctggaagtatgatcaggcgaattttcggtttgttaagggttcccaaattaagcaacaaactttttgaacaattaagtaatacagaatgtgtcctagctgttccgggagcagggaaaacatacgaaatattaaatagttataacgcaggagattgtatcatcgctatgacttcccacaataaatcaagcatttatcggagagctaaagaaatgaagaaaattgtaaacgttaaatctttagagaaattcttgagtgaggggaagaaatacaagactgtgtacttggatgagtgtactttagttaaaccatttgacggagtgttggttctcacattgtgcgacaaaatgtatgcgtatggtgacaacaatcaaattccattcgtcgatatgtcgcagtcagctgggactagggaagttaaaaatattactgacgttgtcaaacccgaaaagattgagaccaaattattatctagaagatttggaccttcattagtttctgagttgtccccgttaatccccggaattatgtgtcatccatctgttgaacatgacactgacattagatttgcaaactatgagaaaaattctatacaagtgactgcagaaatagaaaataacgtcaggaactttaaacctaatgtagtgttagtatttttccaagcgaagaaagcattttggttgaagaggttacatccgattgttgttgaaaccgttcacagttaccaaggtaacgaggccgataatgttgtggttattcaagaaccaaatgaaagcacattcggcatttgtgcagataaaaagtatgtgatctcagccgcatccagagcggttaaacacttgttttggatatcgatcgggatgtaccaacacaacaaaggattaagttcaagagtctacacattatccccacagcgtggtggtggtatacataaaacattcaatgccatattagacaacataacaggcgtagaaatggtgtccaatacaggaacaatgattgatgctgacaaatttaatgcatctaaatcagcgtatgaagataaatacggtgtaaaagtttctttagcaaataactctgatggtcaatccctagaagttcgtaaagttgggatactaatggtgagatttgacatagtaaatggtgtggccaccacttcatatgacagattgaatatggtcacgtcaaaagatctgtctgatctaaacgaactgttgaaacccgcggtcattcaatgcgataaattcgacacgaaatttaacaccactattgattcacaacaagccgatataataacattcaatatgcaacttagtgccttgcattcggcttgtgcaagcacacaagttacattttataacgattctactgaggtaagcatcatttgtaggacgactcataacaaatttagaatttcattatctttaaatgacgattattgccttaaggtacaacccatgattattggaagaaattttgaaactcatgtgcataatgttctcactactcttggttatcaagatggtagtgaagaatatccgtttagccctgcggaaccaattaaaactacggtaattaatcacacttttaatcaaatcatgaattatttaaaaactgtagtgccggacataattgaacaaaaaatgagtgacagcaaaaaatttttaaataagatttgtgaactaacaaaagagaatgaaatggtactgcttcataatcacgaaacaggttgttatgtagtcaagactccaataaattataagtgtgtgactcccaagtgtacatacaacacaaatgcatacaatgcgttaatgattttcttgaacgccactagttttaagactagtgcaatgactattttgcgtttacttacgaagtcactcattggatctcgtactgataatggaatagaaggactgatgcttccatggcactaccacaagacgcacgcaactaaagctttcaaacattacatcgacaagagtgctttattatatatgactagtaaaattggtgaaaaaagaacaatctacgtgacagaacaaaacagagacaaaatcatgaatatggtacgagatgcaggtatagatgttaatgtgaacatacatcgtttctgcccatcgttgcccttgggtgttgaaattgttggtgttttaatggtcttaagtctagataagtctaagcaagacagaaaaatcaaaatctacggaccacacgcaggtgttctagccgcaaatgggttcttaaatttacaaaaagttagagattatcatgaattatctacttatgagttgcatgccgtcgatgatcgaatgttgagttcagtaaaaaacagtgttagcgaggcattaaagaaaaagcagtttgataacacgaacactgaaaaagatgacgcttttatcaaagcgttggaaacacctaatgagattaattatgccgcactttatggttatgattacaatctgataacgaattctaatttgttaacagacttatcagagtttgaaaccgtcaagttaataacagatttagattcgattgagcagtgtactgaaggctcaccgaccttcgttgacaatccaatgtggcaatttactttcaaaatacctaaaattttgaatgccctaatacaaacaggcgctgacgaaaacaaactactcagttatgattccacgtttgtggggttgggtgctgtagtgggtgacattgaacaaggtgttagtaaacaactatacagtcaactggcaggatttgtgctacgtgatcaaataacactaacagtaccacgcttgaatagtagtatgattgatggggaagtaaacgttaccagccaagagatcactgtgtcacgtaaattgttccgcgattgcgggttgagattgttaagagaaaatcacgatatcgacagtttactaaaacacgttcgcacaaaacaacatgctacttattactcagatagtggtagctacagacaatataaagagacacccggagcagctatggatttgtgtctagctgtttacctgagatataacaataaatttactgagctgttcgatacaattaaatggctacaacctgaaacagtcaaacaagaaggtatatttgagttgttgttagataacttaggtagtagcgctaaagaaatggtgttgaacgttgttagcaaactctcaggtattgctggtatgaatttaccacaaaaagactttattaaaacgatatggaaagttgtgagaaatatggctttccatcaggaagacatgttcactgaaacgatgagtgtgatgaatgtagaagagagaatatctactagacgcctattaatgcggggaaccaagcagattctaatgactagtggggcggcgagcattgatgaaggggcaaataaagtgaccttacaatccaagtatctccataaattgttcagcaatatgtcaacgctgatgcaatccgttagtgcaagacatgaccctgtcactttaatgaaagacttcaccaaaccaaagagtatatgctgtatttgcattggttcttttggtgacataaccaaccatctccaagtagcaaacatggctgtccatgaaggtgttaaagtttcattaatctttccagacagctatttggatcaggtgaggagtattgcagactcgaaagttaccctagtgccacaaagattcagtgtagacaatcacatcaaactattgaatgagttaaggactgacaaccttgaggttttaatgacggcatacaccgaagagaaaggagcattactttataatgattttgattacaagattttgaaaccagacttggttgttggaacttgtttgactgtacagggaccaataatcgccaaaaagttcaatgcaaactaccttgaattgaatgcattaccttggaatttagtaagagccgaaaataaaagattcgactcacttaaaaatgtattatatcggggttacagagcaatgcaactagaaaccatcataaagcaatacgccattgccggtttgcagaaccccacacctcaagacataataagtgaaaattacacaagtgtaaatgtaatagatccaatctttggtttagtggctgagaaagaaaaccactcggtagttgggtttttaccatttaaatacacaaattcaaagacaattttaacaaccaaaacatgtgtattaacattaggttctatgaaaaccaaacagcatgcaaacaaactaatatcagtagctaaaaaactgttgagttttggtgaacatgttacgattgttgaaggaggtgtcaaatttaacaaagaatttatagaccggtcagataaattacaaattgtaagcaatgtggattatacctcacaattagttcactgtaaattaatgttacatcactgcggctcaggaacaacacacaccgccatgttagcaggattaccacaaattttgttgccagttgattttgatcaacctcaatgggcgggagcgcttaataagaaagggtacggagtgtatgctgatgaactgttgaacatggaattagatgatttcacccattggttcaacgtcacgttagagaaaaccaagaatgactcaaataaaatgattcggcataccgctacaaacatagcacatgccttgaaattaacagataatgcaatcactgatagtgttacattgacaacagacattacaattgaggaagaagcaataattagagacaacatacataaatgtaacctccataaatgtaaacctttagagacgatgagtgttttgattaatacatgttgtggtgaacgtaaaagacactgtgtcattggtgagacagaagagtgttacataatagtgaattcaacacattaccctgatcacagaattgggtggaacagaaaacaacatattgctatacaacccatcatgcccattccagtactgcgtggtcattacgaaatagccactttgggttatcatgctcatggaatgtgtgaagcaaatagtgaatcacctcctaacttttatataaaacctaatcaagtatctgaatttaacaaatcgatagattggattgatttagttagattacacaatgggagatggtcaaaccgaggagtgttcggaatcgaaccaaggacaggtatttgcaattgttgtcacagatcaatgtggttattaagatcacaaaatgaaaagttgtgcacatcctgtcatatacaaatcaattggcctcaattcactttcacagactccgtatccaccaccaaaaccgataattttaaagccaaatctagagcaggacacattatttttgagctttcgaagttacaagaatctcacgtgttattagatcctaaagggaatagcaattgcgttcccaactgtttacgtgctgttgcaaagtatagtacaaaggtgtccagcacgatcaataatgcatttattgattttgaaattggtgagttcaccagtatagagaaaattattcaaatttgtcgattcatgagagtggacatacaagttgaccatccaaatgtaaaaactgggggcagattgttgcacaatttagagtttgataagactccaaaactgaggctgttaataacgggtgaaagagaacagcactgcacattaaccgccgctatcaaaatacctgctgcacagaaatcaataactttaatagaaaccgaaaacccatgcgatgacatgaattcattgataactactgacttgattgacaatgcagacatggatttcaatcaaattttaaaaacaaaccttaaaaccttcaggtcaacaaagtacacagacgttatagcaaaaacaacagatggtaaattgaacatttatggtagaaggaatttgttggtggaagcaaatattgtattcagaaagttcaaatctcatgaaatgtactttggtgaattaccggagtcatttaacagatttgaggacagaatactttgtgtcccgactagaaccggtaatgttattgggttagtcacaagattaaacaacacggaaaaacaactaattgttttgactggacaaagacctttacctgtggtaaattatgtgatcgacgcaagtgtatcaattaccaaggtcaaaaaacacaaaaaacttattaaaaatgatactgttacagtgggcgcgttcaatgaaaaaagtagacgcgaattgtctaccatttacccagggatcagtgtgaatagaaactgccagaaagtagtgattagtagtctagacactagaaatcatcacttgtatagtgagtggaatgaaatgcacactttgttaaatagaaacacaatgggtgaaacactcattgaattgtacggcaaactggatggtgcaacagtgccaacactggtcgattcaaacttaacacaaagtatatgtgaacaattttctagaacgacaagggaccaaattttcagatttggttgggaccaaaaacctactgttgaaacttggacccgtgataaaccaactggcttgttccttgaagagcaaggtttcacatcgccagaaaacgagaggtatgtattagattacgagcagtttaaagatataagtgagttgaatgatacagaaaccatgaacaagttaataagttgcgatttgatcggatacatttcactcaagaattgtgtgaaatatttcgaaatcattaaatcgactgaggatattgtcgcatttacgggtgtggataaaaatgaattaaatcgtgaattgattgattatgatgaggctagcttaacagtgacttgtgggccgatctggaaaggcggattgcccgagataacgacgatggattctcttaacaggactgtctttgtgagaccagaagatattaaggagtcgaacggtgaattgacgctagtttggttcaggtctaattgtttaattttgacaacctttgtatggaaaaagaaagtaagaggtggttcttatggtcaaaaacaggatctcgaggatagaaaacaaaatattgacagtgacaacaacaaactttattggtttaatgaggagattgaagaaagattagaacaccgcggtgccgaatcctggatagacaaaggatcaaaaccaaaaaacactcaattaccagctttagctgccaatgaagttgaactcgatgccttatgtagtgtttttaatgatggaatgaggggttacgacgggaaaacgtttgttgcttctgaacctgctaataaaaagtttttaatgtttactgaaccagacacgccaaactttgtttgccatgaaacgggagaaggaccagaaataggaacggaagtgatggatataattgacgatgttgacttggccgatcacgtcacaagactagctccgaaaactggaataattaagtcacacgaagttccaggtaggattgtcactaacactaagacaactatggttaaatatccagagatgtctaaacctgttataacgaaaggggtctaccaaacattcaatgctgtttcatcaagactgcatagtgtcgtgaaatatcgcaaacataaaatggatgttgtgtctgagtttgacagatgtgctaattgttattttgtgcctaattatcaacatgtattggatgaatttaagaatgatcccataacctacaatgttaacaacatagtagattgggtgaataggagaaaaaacagttctgtcgtagctgccgaattgattgaactgatgcaaactggttggtttaatcatccaatcaacagcgtgaaagtgcacagtaaacttgaatcattgttgaaagaagatgaaattggttatcaatatggacaacaaaaaatacgcattatcgtgcaccaaacatatgcgatttgtgcgatatttgcagatatatttttgcaagcaaaagaaagatttaaacaactcctgggtgaaaaatgcgtgtatgccgacggcttcacacttgaagaattggcagccagaatgagattaatcaaatcagacaaaccattatgggtatttgagcgtgacttcacaaaacaagacagacaaacagacgaagatttaataaattttgaaatgtacgtttacaaacaacttggagttcatgacgacgtaataagtttttggcgcaagacacatgagaattggttctacaaaggtactgacttgagtgggtcgttaagttggatgcgtctcactggacaatgtacaacggcattaggaaatgctataactaatatggttgtgaatagcagaacttatcaagaatatgaacaaaacattaaaattatgctgttgctgggtgatgataattcaatgatcagtgactgtgaaataaatgttcacaatagtagaaaaattagtagggattattacaacatggagtcaaaagatttttgtaaaaaacacactggcatatttttgagaatgatattacaccaacaacaagacggcagtatgtctgtctgtcctgactttttacgtttacgaagaagatatgaagttactaacggagtgcacaaaatgggtgacgaagaacttaaactacgtggtttaagttatttgtacatgttgggtcgtaacaaagttactgaagaagcagtgacatctttgggttataacgacgaattattgccgacgtattacaattttgaagaagcagttatggctgtggcaactaacaatggtatgacgaatgatgcagcaagaaatgagtttaatctattgattgatatgatcaaagcaaacaagtcttacgatgtagactatgtggttaccagtagtcaaattcgttaa

SEQ ID NO: 1131 - DNA, 10431 bp, Alphaendornavirus fimbriatae-1; identical to SEQ ID NO: 792
  source 1..10431: mol_type = other DNA

SEQ ID NO: 1132 - DNA, 5328 bp, Alphaendornavirus fimbriatae-2
  source 1..5328: mol_type = other DNA
atggcgcgcgctcacgcaaatgtgtggacaacagcgttcctggccagcgctaacggcgctgtaggcctgggcatgcggactgcagttacagtgtcaaactggctgctcaaatccatcgagagagtcattcccagtgagttccactccaccctgtcttccctagattccatgaacttaactgccatcaacagggggcaggagagcgccgtgtgggacgagcttgatgtgtggctgtccaccaagaaagtacaattgagcaagggcttcaaccatcagctgagcctgagtgattgtaaccaccacaagaccaagggatgcaaccaacccaagaccggcgaaacctgtagctgttgtcaaatggacaccgccgaccaatcgggcagatgcaagtgctgctatcctaaacgaccttcatgcacgcacaaacctgacaacgtcaactttgacggtgaaatggtctgctactgctgtggactaccattcattgagacatgcaaagcttgccctccactggtttcagagggtgtgaaggaagatgtgagcgtaagcaaccaaggtgaactcgtcgccaaatctcacccgaacattggcggcaacctgtccactggttggcctgacccacggggtggcaagcaacacaaccacaagtgtaagacttgcggaaatgtagtcacacacgagcatcagttcacaactttatcacatgtgcatccaagctccatgtgcccagtgtgctacccgaacgaccgagctgagacccaccatgtaactgcatcatccgagccaacacctagagagtacgcagcagcggaaaggaaagaggagaagcgagtagcagagacaagtgctgacaagaggaagagggaagcgttagtgaaagctaatgccatattcagcccatcagaaaacctagtattatttggcaaggacaagtgtcctccagatgtgctatcaagcgcgtcctctgacaaatggtcgatctaccttaactacacccccacgggcgagactgggtgcaccagcaaccacttcctgttgaacggatttgatgctgaagtgcaaccaggcgatcaatgcgggttccacgctttgaacacgtgcaccaagggaatgatcaagctgagcgacttcaacaaagtgttgcaaaggaccggtccttacacagaccgacagctgataagaatggcggcatactaccacatcaacattctaatcttcggagatgtcttctcaatggtggttacaaactccccgggagaaccccattacacaattcagcacattaagaacaaagagtttccggaggggcattggcgaccatgccaactgtccttgaaggacaggtggactgacaaactgacaaccagcccaatgttctccatctctgaactagacagcctgtgcagtgagatcatgggcgctaacacgcactattccacaaacctaatggatgaggccacgctgttaaagtgtgccacacacataaagcactgtgaggatctgatgcaaagcaaagttacagcacaactcccgcaggtatacgaatcagactcagattggtggatcacgaattctaaatatgacaacatggcaacgggagagatcaagattgccgtcccagggtgggccaagagcgccattgagccgttaaccaagaccggaagagagatggctgaccatttgagcatggctgccaaggtgaacgtttccccggagggcctcacagacgtggacagcctgttacacaacgccatcaccatggcttgccatgacataatgagagtgagactactcgcggagctggaggtgtcagaacaactgaaggccagctttaagattcatgagttgtccaccagaaaactaagcactggcctgctggcgatcaatttgtccgggactaagttgaagccaatggatgaagtgtacattaaagaattaggagccgtgttgagcatccgagtcaagtacctgaaggacgttccctactgtgtcacccccatcaagaactctgttggcaccggcaacattaaggtgttggtgccaaactccagcgccgggagcgcgtggagaacgattaaggcagctctgacatgcaacatcaaccaaggaaagttcaacgatgttcttcgcagcatggaagggacgtcagcagtgttcggctggggaaagtccacgcgcatagcgcaagaagccgataacgacacaacggtagttgcaatgacgagaggcgctgtggaagttctcaaggacaagctactcaagttaaacaaacaaccaactgttgtcaaagccggcaccagagtgatgtccgcagagtcggcatctcaatctaaagtcatgacaaaaaccctcatcatagacgaagcctcgaagctgacaactgaccaattgttattgatgttgagcgacaaagtcaagactgtgaagctgtatggcgattacttgcagatcggggccagagacatgagccagactccaggaaccagggtggtctccagctgcctggagatctgtcaacaagttgacgtacggaagcacacgcacagagtcggccaaccattggcgggggagctggccaaaataccacaactaattgatttaacttgcgatgaggacaaagtcaccaagttcggaacgaccacgactgccacctacgatagcaacatgagccggttcttggtggagcagtaccagatagacacagtcctgacccattaccaagaaggagctgcgatgctgaagagagatctccaagataaaattgatgacgggagcctccgggtcagcaccatcgactccttccaaggtcaagaatcgaacaacgtcatggtcgtcgcaatgccgacggtaagaggcacccgtggcctaattgatgacttcgaattcaacatcagtgccgcctccagaggaaagtcgtaccttcattggtggtccatcaactgccaccaagaaagcaccagcttgcatctacgcatcatgggatcgacaattggctctgggttgcctggggcgtatccagatgaagaggccattagattgatggaagttgacgggttcacagaggacgggcagcccttcatggtcgggaaggaagtaagagactcgctagaggactccattcacaaccaagccagcaggtacgggtgcaaggcagacatcagctcggaccaggaccatttcagggtcgaaatcagaaagaagattggattcatgaacaccgtcatggcgacgtaccagtggactttcaatacagccagttctgttatgagtgttagccccttcgctccgatcagcagcgaacaggccgacaagctccagtcaaccttggactcgcaattgaagtgcatgtccgctccctcctcgcatgtggatcacaaagtcaaatcgaccaagtgttgccatgcagaatcagcaacagagaaacatgcggaatacctgtttgccaatcccttgagcagctggaagctgcgcaacctggcttacatctgccaacaattccaggccgctggcacaaagctggtcctatacactgagaagggccatgccgtcaccatctcatcaggagggggttgttctacatgtggtgccttgagtttcagaaacgaggcacggtcggctaatcatgaaaatatcctcagattaccagagaatgggcaacagaggaatgaccatcagccttatgaggatgcgatagcgaacagttgtctactaatggtaggacacttcagaggaccaacaacagaagtgatggtcagcgactctgtagatcatctgctcgactccaagcggctgatggtcatgaacctaatggaaagaggcctcaccctgacaggacaagtggtcaacagctcactgaagcgtgagaacaacaccaaccttgaaaatagatacatcgatgcgaacaccaagcacattgaaaaagggaaacaactcatcagacaggccttagccgcgaacaacatcgacccttggtatgttgacgagttcgtgttgaccaacaagcccgtagggcacatgtcctgcgaccacttgccgtgggtgtaccaagctaagactggcaacctttccattgcgtacaatggaaaacgggcgagtgacttcaacccagcgccatggcaaagcttgattctagagtcgatcatagagaagttgaacactaacacagtaatgggagagttctccaagttcttagcatctatggtggacaatagaaaggtgggggcgagaattgcgggcttattggaaccagtgtcagcgcacaaggacgcaggggacgagatctatagggccttgcaaaactttgctgcaaaatcagaaatgctcaaactcaagcacaccccaccgcctatattcatgaccaaaaaggggatggaaattattggtgacacaataaactccttgcacccgaagctggccgtccaggagcataacatgacacatggccaagacgctttgggtcaagccagagagacgctggcggcggcagcgagaagaagggacaggaacgcggtcaacgtaatcacccagaggccaactgtgtactttgttaattcgtggtttaacagcaccctcatcagccctgaagagacctcgtatcataaacactggtttgatcaggatctaggcatttgctacaacgtgttatctaacattaccagcagggtatcaagcaagtcagagcaaggcgagctgaggccaataatacaaagagccgtccaggcgtacaaatctccgaccatgcacccggtcatttctgagcaaatcagtcacatggtcacggacatgaatgacacatggagtatcatgactcccagtgaaatagcagatcacatcaaggcaagcaacggggagtacgtcctgggctggtacggtttcaatcccgaagctagcagacagaaagtgaatgttcctggaagagggtgggccacggtccaagccacgacaggtcaagacataccaacgataatgctagacacgtaccttaaccacatggaaaccggagttactattaaagtgccgggaactaaggaccgcataatgatagagaaacagtgcagtttggcgggagtgcatcttgtcaagatccacctcaatcaaagtttaaccaatttctaccacgttgacaacaacgaaatagggacgtctaccgttacggttgacatccccactatcaactccaatctgatcagggggatcacaaacaaggttccttactttcgaagaagacaaccaagatggacaagaagttgctcgaagcaaggatcatgcgccgagcacgaacagattgtcaatttgacgacttgttggagtacggaagatcccaaatga

SEQ ID NO: 1133 - DNA, 5790 bp, Alphaendornavirus fimbriatae-3; identical to SEQ ID NO: 794
  source 1..5790: mol_type = other DNA

SEQ ID NO: 1134 - DNA, 18603 bp, Alphaendornavirus sp.
  source 1..18603: mol_type = other DNA
ttgagagccgctataatgaatgcctctactattgaagagcagatcaccctggagaggaaactaaccagaacaaagacggcctacaaaagaatgatgaagaagaaagacaaagaccaatcagaaaagataagtgagatggacattattacaaacttcaaagaagccatcgaaacagcgaaggctaacatggcggcagcggaaatgcgcaaacaacgagaagaacagttgaggctactcgatctcagtgacaactctgcagacttggtggtgccagcggggacgtgctgggactgtataccgtttatcgatttcaacttggcaacatcaagcgcatcaaacacacaaatgagcgccatgacgaaggccggccgcgtaaacataccaaagggcccgataggcattgacaagctcttggccatagtcgaatattacaaagaacaagttgaatccggcgctattgacataccagactttgctactgaccccgaggacatgtacgcaatagatacatctggtgcagtgtggcacctgtacagagatggatacaacaactacacggacttggtagaatatgatgaagacggagaggaaatcaaaatggaagaggacgatggaacacaaacaatgaaaggcctgagcacagtgcccttcttggaattgcacgctgaattactgaagaagaagaaagagaaagaagacagagacaagaaattctctgaagtgaacgtagggggtgacaaagactgctggaagacattgttcatgatagatgaggaatgcgattacactaggaccctagaagaagtgacaatgcttctagacgaagccctaaaagcgagacaacaaggagcaaacgtggacaggtcaatcacaaaggacccagagacaggcctgtgttacatatgcttcgaagaagagtgcgattgtgacgaacctgaggagtacgatccagatggtgacgcaaaaggattcatgatcggcataagctggacaaggaccggaaacttgcacatcgaaggttaccgatacatgtcctcagctcaaccactactgaatagtgtggcattttacgacctgaagaaagctatgatggaaaacgatgagaaattcttcaaggccataacaggttggaagaaggacttcagaatagagagtacaattgaggtcggtgccaaagacggagatctacgagtcaattccatcgcggcggcattcaacattggagacgttccagaaacaaacacatggaaagctctgatcgattcacacgatttgcgagccgctgcgctggcattagcaaagatcgaccacgcagtttatcatttacccggagtattgcaaaatgtagaaatcgaaaagatggtggacgctaataaaggaggatggcttatcggagccaacttggtgtgcgacaacacattaggaccatgctttagcacaacttgtctgcctgaagtcgctggaatgcatatggcacgacaaatgttcaaaggcaaaggtgcctgcatctataacagtccagattggttggattgcaacgaatacttacccgtattgagaaagggcaaggacgcattagcattctttacacgagtgagcctaaacaacgcaaacatcacaaagctggcgaaggaccacaaaaatatagtgatggttgtgccgaacgtgcacaacgagatgcccgcgcacttcacgaatgagagcggaacgtttgacgtcagaaggcaaaacggcaacgtagttgtcgtgagaaccgatatgaccgaagtgatctcacacaaccaatcattattgtccgctgttaacacgtgcgaatatgtggtagtaggccaaaagatgttccaagtgacaatattcggaaaaactgaacacgacacggtattgatgctaaatcaaattaacatagacgataccatgttggagaacgtgtttaagtttgattacaacagtagcgtccgagaattcaacattctgatgccattactagacagcctgacatataatgttttcccagtgtttaaaatgcggaaggtggcaatagatggggacctgttacgcactatatgcgcacataacttgcaaaggggtgacctaaatttcaggaccttgttaaccaggtgcgttgggtacgcacacagaaggtatcatctgaaacacaacatcaaggccgtgacccatttaaccaatgaccaattattggaccacgcttatttggcagccgtaatggtgagaagaatgtatctcactcggcgttggttagtagatctaacagacagaccaagatgggtggaagtcgcaaccaaacacggcatgggggctgcacaactagctttacaagcaatgaaggaaggcagcagcacatacaggaatttccaggaatgggcggataagattagcacgacgtcaagaacaaacttgcacgacttcaccgaccaaacggtcatgaatgaagttgaggcatggatgtttgcaggattcgctcatgaagctagagtacacagtgtcgggaacgataaagtgaagatattgtgcgaacatcacaaacacgactgcgtgcataaaggagcgaacgcatgtgcatgttgtggcaagccaaccgacgacgcacgatgcagttgctgcatgaacgccatgtgtcaatacaaccacaagtgcggacacatatgcgatggtacgcactttggacccgagacatgtgactgctgcggccaggatagcgaacaaatcaagtgccgattctgcttgagtcctgagctgaaccctgaatatgagtatgaggatggagtgttcgcaactaaagtcaaacacgccgggggcgcagtaacacaaccgacgaatgaagtgggcaagccaagaccaatcacgacaaaagatggggtgaaagccatccaaccagtgtcacctgcgaaaaatatgggcaatggcaaacattgccatgagtgtgctaaatgtggagggtattacacacacgtacacaggttcacaagcgaattacaccccttattcgagggtgattgtccgcactgtgagggaaacacaacaagcaggaaaactgaccaggacggcaacgagacaggtcatactggcaycgcggagacaaaggtgacggaaagaaacccaaattccgatccaaccgataaggaaattgaggaaaaagaaattaaagtaacgggacaaagtgcaaacgtaatagccctcatcaacatgggatacagcctcaccgagataagcgcaatccgaggcaatgccatagcttggagtgaattaaccgattggaggcaggagggagcgttaaaactcccaatgatcccgataggaacacaaagtgtggacgtagaagttaaagacttcaaaaagatcaccgatataccagacacagagacatgtggatatgaagtgctgaattacattaacccaaatgtcaaactggcaatggcaatcgttatagcacaaaaagagagcttgttcacaaacaaggacatcatcaagattgcggagcattacggcatgaacatcgtgctcgtaagtgaaggagaaattgtgatatcaaggaatggggaccaaagttggtacgattgcatcctagcgacaacaccaggacattgggaagtcggatcatgttccatcacctggaaggcatgccctaaaatatcaaaagtagacggcgtcaagttgaatactttggagcatgtgcgcaagacagcgtcacgtacagctttaagcacagatgaggccaacttagctgctgaaatatcaatgaacgccgataactaccacgcttcagaacaaaggagattccacatcaaaggaaacttctttacaaacaacaaggaatgcaaacaccaaccttacctggggttggtagctgtgaaacacaatggactattaccaaacaacgtcgccgaattgttgaccgcagaaactccagacacatataggaaagcactagccacagagtggaagcatcacaccaaaacagaagtcggctacgagatcgacatgcgcatgctaaattatgccatgggaattagtgcgtgtcacaacttgggcaaaggtctaaacagcacggagatggttgcaaacgtgactgttccaaaccatgaagcatcggattatgtcaccttcgatcttcctccggatgccaagtggatggctggagacatggttaagttggtgtccagcaacttcgaagcgttccacaccgtaattccagttaagactggcaacagagcacaggcaaggttcaacttgccaaagactggtgcaagatacaagatgctttaccctaagagcagttacttcaataacggttatgggttggcaactttgattggaattaaggcagagatagacaacggaccgatggaagcgatagactcagaatgcacgatgggagtgcctggcagcggcaaaacgtctatcatcctagcaaaagctaaaagaggcgatctgattgtgacggccaccagtggaaacaagaacggagtgagatcgcgattgttggacagagcagctgttgacagaccggaagttttaggcccacaacagatcattgaaaaagccgcgttcgaaaggaagaagtacaacaatatattcgtggatgagtgcacaatgtttacggctgtagagtacaggacattagaactattgacgcacaaccaaaagaacatcatgctgtacggcgatgacagtcagataggcgcagtgacgatgactccgttaaatcagataggcagcgcgactgaactgcagcgctttgtcaaaccagataacatgaaaccatacatgaacaagtcgtccagaatgggcatcgaagcttgcgcaatcgcttcaaaggttacaggcaaggaaatcataagcacgaccggcagacatacagttgtaaagacatacaacgcgagtgatccgggagcaataaccgcgcaaattattaaggatgtcgaacatatagacgtcatcctttgtttcacaaggaacacacagaaagcgttagcaaaacatggcatcaaagtgttgtgtgaacgcgtgcacggtttccaaggtagagaggcaaagaaaataatcgtgctgcaggagaagccgactccaggacaagacgtgtcaaccaacccgcggtacacctacagcgcattcacacgtgcaagtgaagaggtgcattgggtcagtctagggcacaacaacaacatgtccattgaaagccgcttagggaagagaggaaaagtagagggtttcgttggcgatagtttcagagctaaggtcaaggaattcatcaaagttaaattcggcaaagacaaggttgagctgagcgcctcagaacttgcgaaaagcaaagttctagatgcaactatggcggatgatggtgagcatttagataggaaaatcaaggacaagttgcaagtgtacgcggcgaaacactacaacgctaccgtgacatatgagacggacgaaaaacagcgaacaataatcaacatatccagatacggattgctagccctgtcattactatgggacggcaaaacactcgaaacgatcacagacaaatttggtgttatggacaagaacaagaaagaagccataatgcgagctctcgatgagagagaagaagacatcgattggaaacacgtcggccaaatgtcgagctcaaggaacgattgcatgcttatcgccttaatgatagcagacaattgcagaatgcttggaacgacattcacagcttatgctgatgacaaaaagttcaccattaaaaccaccgtcacgagcattggagaacaggtagtgatcgaatgtgatgatccagagtacaactgcactatgtgcatcacagatcaagatggtgtgtatctcgcaaatgtcgatgaacagatcatcgagcacgcaatatacatggttgaagaggcaataacaacactcgtgggtaagtatgaacacccagcgaacatttgccgagcaatgaagtatcaaagaaaggtagcatcgaacaaagaaatactggctcaattgagcgcaatgctaggattatccaccatggacattagaaaccataagacaaacaaatatcacaaatcagcaaagaaagcaaacatcacaacgctgatgagatacgaaaccttgaaactcttagagtaccctgacttgagggagatgtttatagtcagagaccgcaagacagatgcagcaggatggttgactgcggaaggaaaatacatcgacagtagtgaatgggagctggctagcgcgtacgcgagtgtagttctgatcaaagcgctgaaaaagacatggtggtataaagtcatgaaattcaaggagagtatgattgataagttgaaagtgggcgcgataaatgtcacagttaaacaaatggaggaacactttgcagaggaatcaaatacagccacatacattgcgaacaggatgggcaaagtgaaggcaatgatgctgaagcgcgagccaaaaccagtcacagtggttcctggggcaagcgaagcttggagtgacttgttgacaatagctatgccacaaacaggtgtgcagttaacatccgtaccatgcatggtagacacgaacaaccacatggcaacgcaaatagcaatcaagatgctgccacaatggaagaaattaatgaacatttactgcgtggaaccagaggcaactctggaagctggccaatatgaatggaggactgtcaagccaataaatcacagggctggagctgaatacatgaagaacatgctaagactagaccgattagcccatgacattaaaaatgctaatgtggcgaatgtgtccaacgatgaagcaagaacgaaattggaagctctgatacaagctgctgaggatcatctggaaggaaaggcagaggtttgggtctccaactttcattcaaacataaaaggtgacttactagcgatgtacgatgctatgaacgtaacaagtaaagacacatacaacgacgaaatcgtacaactggtaaacggaaacaaaacatacgtcgcattacccacatgtgcatacaagaatcacatgggcaacagcgtcaccgaggtgagcaatggtatggcgaaaataatcaacaatgagtacggattagtagccactgtcccagtcaacataatggaagccatggaaaagggagtatacaagtggaaaaatgaagaatacaccatggacgtgatgggtactaacatggccgtaacgatatggaagatagcaaaaggtaagcgcgacacgctgtacagtcccatgccatatgtaactcctcaaactatggtggaagtcaaaataccagtgatcaccgacaacttggttgacactctcatcaaagcgaaaactaaagagacaagagtcttaatggtagatcgtaggttatacaggtcgctgagtttgagaatgatgcgagaaggaacgacttttgaagatttgctagtggcagcgaggacaatgctacatggtgtgatatacagcccaggcggcacagcatggaagaacaaagcgtcaacttcaatcttgatggacacagccacagcagtgtacataataataaccaagaaagttagaaacatggaggcggcattcagaatggtgagtgacagtatgagcaccgattactgggtgaggacaaaagggaacttcaaaaatatggcacaaggactgcttgcgaacgtgcagcgagtactggggatgacgctcacagagaatcaactagtggacgtactaaaagcaagtgactcgcaatctctgagatcggctgctgaatatttagacggatggagcattagggtcgatgaatacacgcgttacgtcaggcttggtgatgaagagtggagatcctcacctctagaagatgtgcccaagataaccgaatttgctcttaacaatctattgcactggaagtcactagtggcaaacgtaccggacagagagttgcgaatccaacaccctccaatgaaaatcaaaatcactaaggacaaattcaacgctatgaacgaagcaaacgtggctcagttggaactagcgatcaaaactgtgtcccaggccacgtacgcagaaccgacctggatagattgcacgcagctgagcgcaaccgactccagcatttacactatgataatggcttgcgtagctagttgccagccagtgggactaagagtacgcttgcggggctcaaaccgggactggacagtctccgggcacgaccacgactggcgcattatgatcataacttcagaccaggtggaagtgactgtcaaaaacactggagaggacgatatcgtcgtcacagacaacgacgccagtattctccatgaattcataaacgaagtgtgggaacaaaagaaggacaacatgggcatcaacttaaccgccaagtccactagtatcgtcttagatacgcttgccacggtgagacttgccaaggacaaattgcaacaggtcgcagctgtagtgttggggatggaattcgatgcctccgctcagaactacaaccagtacgaagaacagtttaacaagttcaatgcacgaaatctcttgtcatacaaaatgctgaccccacacacaatcccggagcaacccattatagttggggcctctaatagggaaggacagataggctggatcatggctggtaggttcttcaccttggatcaaagagatgaagtcgaagcggccgtaatgattagcagcgccgcttctttgagggatagctgggtgtacagactcgctgagctgataacaaacgccaaagaattcatcaacgtgaaagccatgggagcgaacctcaaaccatggagcgaccatgcagcggaagacacgcacaccagccagtacgtttcaaacaaagtgtctcaactgaaagcacgcttgcttaagtttgaacaaaaaccagttacactgacgccaaacgccaacaaagagtggaccacacttgtggagctcactatgtccacatgtggttataattggacatcccacccaaacctactggactcaaacgctgctgccgccgagcaagtggcactgcgcatgctaaccaacaccgagaatctgaaattatatagtgttaactgcgacgccaccttattatcaggaatgtacaaggccatggttctgcagcccacgaacgaagcgaacaaagccttatacagaatgacgttaccaagcctcctagcagcttgtgacaggataatgggaagcaacacggaaaaattgaccgacggcccaacaaaagaaaatctcctgtccctagtggaagcagcaacaaaccagaaagcaggcatagatgtgtggactggcaaatacaacccggacgtcgagcatgcaaacctcgtgattaacaacagcgccattgattacagttctagagacagatacaacgatgagctgttcagtatggttgacaaaaacagaaaagtcaaggtgattatcaacagaatggacacccacgacacacctcacagtaacaagtacgaagtcaggggaggaatgacgcgagtgatcaacacaacatacaataccgtaagccattacagtgtagagatgcaacaaatagctgaaactgggagaaccacctggcatggcaagcaataccgaggtgacatcgtggcaagtaacaacgctctggaaatctgggaattggaagaagggcccaggaatgagtactacagcccaattaacacccaagcgctcaacggcctccaaaaaattgaagtaccaaacatcaccaccaatgtattcgatatgctagccaagggagaagttatgaggaaaagaataatatacgtagacaagaggttgtaccggtcattagccctcagggccatgagggacgggaccacttatgaagacttactagtggcagcacgaacccaattgcatggtgtgatatacagtccgggaagtgtagtatggaaacatataactgactccagcatattgatggacacagccatggtcgcacattggaagggtaagagattgttgaagaacgccggtgaagccgtgagattaatggctgactcattatctgaaaacatcggcactgcagctatgggtagagttaaggatatcatacacggcttgtctggccatgtgaccaaactgctgggactcaacatgaactggaatcagctagctgccgtgcttacaaacagcgacgtggaaatgctcaccaggatagggaccgaaatggagaagtgggctgtccgagtggatgaatatagcagggagatagtgggtgtcaccaaatcaattagaccagacacaaaggtaacctctgcaatcaccggtttcgctgtctcaaatctgctgaacataagatccctggttacgccggtcagcagcaaggcattgcggcagtacaacccaaaacaaaggaaaatcataaagaaggagatcaaccgaataataatgctgagaggtgccttggacgctaacgtggcgtggtggttaaaggacgacaaccttgaacccaggctcaacaacttactggccaacttggccgtggggggaaaaggtactggacgcttgtcatccagcccagtcatgcaaggggccctaatagaggcgctgaacagacacgataacgaggcggtataccggatcttggacgcatctgaagggaacttagaccacgacaaacaagggcaattagagatcatcaagaaacttcaaacatacaatggcacagcgaaccaagacaacctgtcaacagctgatagcattacaaccgagcgagcagagggcctcctgggaatgcctgagttcagactgactagaaaggatgtcgcaagattggagtccgtgatgaaagacgcggatgacatggaaagccgggactactcaaccctctggtccgtgtttgaggcggtgaccaaggaacacggagtggaatttaaaaggactcatacgatgtcaaagaatttctcgaaaatgagggtatgcatagtggccacaggctcacgaggagacatcaggccaagccacaacctggccaaacaattaagcctagacggggcagaagtctcactcctatgtccaagagaaagcttgaaagagagtgaaatctacaggatcaactacgtatatgggaactacgacgttgacggtgaactacagaaatggcataagcttatggagtggacccctgagtccatcgacataataatgcgggacgatttagacaacaactggttgcgtcaactacaaaccgacaagttagagacaggttatgacctgatcattgggtctcccgtaacacccatgggcttagcattggcatatatatacaacacccattatatagacttttgcccgatgcctctaagaaacgtgcaagggaacataattgaaagagtgtatgcccgactactaagcagagaatacgtgctactacatgaaaaagcaataaataacctaactcaagaattgatcggaaagccggctgacattccggctttactaaccatgaatagaccttacgcttttgcagctgacccccagctcacagccccccaaccaggagagatattacaaagagccgtgggctactggggagggaaagctcttgacgaaacttacgacaagatagacttcctgacccctgacacacaagtggtgataacaatggggagcatgagagacgaagaggtagctcgaagattgactgcaaacatggaggcagacaatgtggtggtgttagccaaaccaggcagcccactctgcgaccacgcattggcaagagggatcaaggtgtactcaggggactacaacttgggggcgctacctccacatctcactgtggtgcatcacggtggcgcaggaaccacagcggaaatcactcgtagcaagtgctggcaagtaattgtacccgtagctttcgaccagaaagcttgggcccaaacaattgaggagagaggcctaggaaaatggatcaaagcaaacagagacatatccaaggaagatgttgccttccgaacaccaaaccccattgcaatcaagacggcggtgcccgaaatggctgcaaacttcactaagttgttggccgagaacactggagcggcatgggtgtggccagtcacaggttcaatctttgcaacaagtgacacaggcaagccttacgcttgggaccgcttgataggcaccaacgccgccactgaggccgacgctgacaaccagggaatatactatgacacggaaccgagaaagttgactgtatctttcgatcccttaggaaccgaacccggagagacaggaacatgcggggtgagagcgattaattatctgaagaaggaagggaaggataaaatcaaagcgcggctgacaaaacttgggacaacctttgacgaggtgaacagcgagggcatgacaatggaccaagttattaactactgccttgacgccgaaattaaccctgtgatttgtacggagaggtcctgtaaagccataatagctcacgcggcctggaacacaatatacctttggtggcaaaaccaagggcacatagtcgtaatagaacctatcaagactccaacaactagaatggtgattggcatgaccaacgacagatacaacgcaaaagacaagatccaatgcactttgactgggcatgatgcttacagctggcccaacaaaacttcggattcctaccatgaggacctgtgtatcgatcaagaccaactggaggaggaaatcaggagggtgttggcaaacgcaccttccagtagtggcccaggggatagagccaacctatggtccaaacaaacgaagaaaaccattcaagaccggattaaatcgaacttcgccagcgccaggaggagaacccacccatggataagagcccgcaatatcaagatatggagtaagggagtagcggtcatggaggaagtgcccgaaggcaaattagtggcattccacaacgacggcaatgactacctgctggccatcagtgtgggccgagatgaggacgggtggacgtattacataacaagtaaaggaccgcagcacggcatcagtcccagcggcataatattggacgccaacacatatctaacagctggaattgacagtagcgttgctatcgtgccgatcagggcggcaaacaatctaacaaacatattgctggaaaagggctacccgatctgtgcaaactttgacgcgaaggaggcagaacgggttttaatagggcatcatgacggtgtcccacaccattggaacaaaaacttatttaacacttacgggcccaatgacatattgttcggcttggatgaagttgccaacccagaactgtatgaccggttgaagaacaacatcgggcccttaaagtttgcagtgtggaaggacaccgtatacaggaacctggtgttacaggtacacaaatacccagagctgtacaaccaacaatgccgtgcgcgatggccaggggccgatgacacctttggggtgagttggcctgaggaccaggtatccgcagaactagaaactgagataaacaacctcacttccccggtatacaccgaacaaggctattacaagttcaacctcccgatcagcattcacaacccctacccggcgcacatgtatcatgagatgatgaacaagtggagggccgatctgtcaaccgagcaatcagagccgacatcgatgtggcatttggagccaactgttgattacagtggattgatacagataggatcatggtatttccggatcgtgcaagaaaccgacacaccagaagagaacaaagaagtgaaagaacacaccacactgcaaaccggtacgccgttttggtacacaatagacgaagccgatttggaagacgggcaagatctaccaataccgaacgactccacacaattagtgataaccaagagtaaggacgtgagcaagggccaacgcacggacaagagtcatgaggagctatggttgcaggttaggggggacgtaattcaaaacgaacactacctattcctaaaatgttcatccgtcgaagagatgttggcatggatgcaggccgactacgtgccagccgactgcgaaaacaacgtgtcatgtggcccaccaagataccaaaactccactggatgggtgtcaaacaatggtcttgtgagatataaagatggcccatggtctgattggagattggacttaagcaaggaacaatgggacgggatgatgtccgcggagccaccaactggatacgcaaacatacgagatgtccaagaagtattaggcatgacttccgaacaggtagaaatcttggttgaacaaacatcatgcgaagtattcctgttcaaacccaggataacggcttacaaccacgacacgcaattttacgccgaatcagactggttcgagggtctaaacgtgtacggcaaatgcgcacaactcaaactcgccagtaacggacacatggaatcagaaacacttgacgtgaatttcccggtaggcacaattccatataggaaggatgaaataaacgcataccgcaatgctgaaggcacactgatgcaccacctgactagcaaaatcaagttggacaggagtgacgaaataaacgttcagggcaacaagtgggagagaaccgcagaactgatccttgagcgattcctgaaaccaaaccacacacatattgttatcacggccacatcggaatggaacccggaagagcagaaaaagttaaacgagagtgaacacaaagcaaatactctgtacctaaacttgacttacgacgacacttaccaacaaggttggtgcaacgttgtcatccctaagtcagccacaaacaacgtgaagagcctgagacaggctagaacaatactattctacatacccaaatttaacccagacatcatggtcacggtggtcggggggcgcgaagatctcactgaagctgccaaaggcatagacgccgactacccaaaaactaaaggggtgttgaaacacaaaccaggcaacctaggatgtcaattgtacatgaacaattgctcgggcatgttgggcacgttgaaccacgccagccactactggaagcaggacatggacctgacatcacacatatacggaacagacgagtggctggcctcggagtgtgccgccaacttcacaacactcacacgcttacccgtagataccgtatcaagcccgcaggattgggccgcatacattcgtcaaccaacgctggcaattagaccaaagtggttatcaagtgaccaagacaagctagttgacgacataatcagacgttacggactgaagaacgaggacgatagtaaagctgcggccgtcaaaattctcaaatggggcaaaacaagcaccaccacagaacccttgtcgtgtgaacaggccactgtggacatcagtgacattacatgcgccgtagtgccgaaagtgactggggcaaatggatccaactacaacgtgaccatgggtggattggaactgaccgatagtgacaaatacttaacaataagtgcagttcctcacggaaacgacactccattatttatcatgccagggtgcaacacacaagtaatgccaggttacacgaccgtcactgtgggtatgggacaccaaaccaatcgcgaggttagagtgaacacccacgatccagtggcttgtttagctgtgattcatgccctggcagcgaccgcctacaaaaaggcgattgtacagatcgagggttactggccggagcccaccgacacgattaacagggtttcagtgatggattacccgaccatacaaccagtttacataggaaccaagctcacggcaatgatctacacaaacccgagccccaagaacttcgcaatgggcaaacacctcgtcaccacaaagttcgatgcgttcaatgagctagccgaacgtgagtacactacactacacaggtacgatgccccattaagaacgagttggccgcgcaacccatggttgcccaccaagggaggaagagtttggcacgaagccgagctgagccacacgctgggaaaagccaacatgaatgatgccaagaagatcgtcaaagttgacgagataccgaaaaacggggaagccggacacatcagcgccacggacataattaacgaattgacgtcggccatggtaacaatacccaaaggacccttgagggacaaaatgatcgcggaaatggcgatatgggacaatgtgccaccggacgcgtcatttggggcgacatccatcaacaagactgcttccgaaaaagtcattgcggcagttgcattaaccaaaaacttgaaagcgggtgaaaacatcgtctattaccacaaacccagaggagaattcttagtcatgagaaaatccaagcacatgcaatatgaacaagatgatgatcaggacattgagagtggcctctggttcaacactgaagaagtagaaacgaaaggcatagaggaggctgacaaacacggggtcaaacaaggatacgtcaaacatgccacaggcatggacgagcgaactagcaacacgtcgaagcaggaccaattaatgccatgggcaatagctgtgccggaggccgaggctagagctgcattggagggcatacccaaccggtccacatacgtactgcacagagacataatcacgccacaagaacaagctagactcgacaatgaggaggaaattccaaggttaaacgggcagctcaaggccattagcaggcgcgtggagcccggaaagattttgttgacatgggggccgaagaccacagatcaaaaacacaccatattcaggggcgctatgatgttggcatataacaagttcgacgaaccaaattcggagacacgtgacgctttacgggagggtccggaagctgatagactcattctggtgaacaccgttgaagagatgcgcgaacgcctagaaggcatgcgcagggaaatgcatgacaaagggattacagagaagactgttgtcttgcaagacctaccgttgacggaattcctcaccaaccaactacatgactacgaagttgggtcaaacgtagggtcgggcaatccgaatgccaaacacgcatacatgccgataacacaccccggcttcaccggagtgggggaatccaccactgagaaaccgcaaagagagatagtgactgatgaaataatcgccatgtacgaaaactcagatctaagtgatttggtgagaatacaagcaccactaaacagaggcgaagggaaggggttcgtgggtacagccatgccaataaacgtaatcacatcccggaaaacagcattgacagagtatccagttgcttcaagaccagtgttgacacacatggcatacagcaccgagaatgccgtattcaacgtcctgggcagccaaatcacataccgtaagagtcccctggacacaaaacacgagataaacatgttcataaagacctacggaggccccgacactagggagctactcttaaaatggaagaaagaaccgctgtcattcgacattgaacggatccaggagtggttagcaggcaggacaggcgtgcaagaaatcgacagagaattgcaacaaatattggctgaggggttattcaaccaaccgataaacaagcttaacgtgcacaacaagcttgagagtctgctgaagagcgccccgatcaccaactttgcacagcagcaagttcgcaccatagtctggcaacaaaagggttatgcagctctgttctcccacgttttcctacaagccaaggcccggctaaaagaattcctgggtccgaaattcttatatgcagacggactcacgccccaacaactctccaacaggtgtagactggagagatgcttagggtttttagaagacgatctgaccaaacaagaccgacagaccgatgaggatacaatcaactgtgaaatgagaatttacaccgaagttttgggggtgcaccaagacgtggtgcaactatggagatctgcgcatgaccattggttcttcaagggcgatggaattaaaggtcggttaaacatgatgaggcacacgggccaggccactaccgcgataggaaacgtattggttaacttgttggtgcatcgtaggatggcggaccgactgggagaatctctgaagttgatgatggtgctaggggacgacaacttgacactttccgacaaagccattgacccacgaaagttgagagttgagatacgagatctttggaacatggagtcaaaagccgaattcagcgaaaaatcaggagtgttcctgcgcatgatggcttgcaaggacactaacaaccgggtgcaattgggtcccgattatgtgcggctcaggaaccggtttgagttcaccaacgggcaacacatgataagcgacgaaaccatagaagcccgagcactttcatatgcctgtatgctaggcccgttacctagtgtcatggcagctatagacacttgttcccacaaagtggaaccagtggcttggtatgacccagtgccccaagtggaagccgtgggggattattacttcaaagaggtaccagcaacattgagggctggcatggtgcacaacgaaatcaacttattatgtaaaatgatgcgggagcgccggactcacgaatactctttcgagcactatactaccgtccagaaattgcggtaa

SEQ ID NO: 1135 - DNA, 13527 bp, Basella alba alphaendornavirus 1
  source 1..13527: mol_type = other DNA
atgggttacggggtggtcaagcctgacggagttccattctcatggtttgagggaagggttggtcactcatacatcaaaccattggcagagggcgaatccagatataacaaattttccacgtttaacccttcagaacctgtactcacattcacaatggataaagagccaaacgattgtagtgaagatttaatcaaactgttcaagaaagaaatgattaaatacggaggatttgatgaatactgcaagttgaatagtaaaaatagacctgatgcaatatctactataacaagaacctctgctggattttccatagaaccatgtggcttagtacctgtaaaacagtgtcagatatgtggaatggtcaacgtgtactctcattatgaaggacatccagccaaaatccattacagtttaggacattatgataaaaccaaagagaaagaacataatgaattactctctgaaataaataacaagggggaagtcacaagtgtgccctggaggtgctgtggatgtttctctgatttgaacatcggagtaattggagcaacttataaactagtgttagtgcttaaagttgtatggaatttttgtttcgtgacggccggagaattagataatttgttaacgatgggttttggggacatgtttccagacttagaaccaactagcaaagagaaactggtggctaatgattgtcgtatcgtgtcagagtatttctttcatctacgccggagtattgtaccatgtggctatgatgtagacagtagtgtattgtccaatttgaatgaacaggtaggagggatatacttcaagaaacagatgttatacaactccataaaaccagagttagtaacagaattgtcggtttgtaacattagtttatggaaaataatcagtgagcataatgtcgcaagtgtaggagatatgttgccacatcctggggtaagaaactatcaccaatggttttatgatgactctttatttcctttattccccatggatgtttgtgcatccagagaatattgtaatgatgataaagaatttgccatttttggatcactaggattttctagattctccttatctttcgtcttagaaaaggttaaaaagcaacgaagtgtcaattatatcgtcccgagagtacagaacagatcaactctacaagatggcaccggatcagtcaggtttgatgatgggaaagtgctgatgtatttagacgggaacccaacccctcttatatttcaagcagaaactcttgtagcgttgactgattatgatattctgattcatgatcaacattattatgtaatcaccacaattaaagatctaaacttagtttctatgaagacgattacaggaccttacagttccataacggtggtaccagaatacaaatcacactttatatcagacaagactataacattacctcttccatccttggaaagattcttaggtggttggaacaatttgtcatacaaaccacaatcctttttaattaatgccaaattattcaaatatctttgtgtacggaatctatcaggaaaagtagaacatcaaaccttaagagaatacgccgtaggattcgctctcaagagattcatggtacacaacaaagttgtggctgatttacaagtcatgtacgaagatatagacatacatattatactaagcagaatttgcatgatgatcattaggaaaaattaccaacacaatttcgaattttcagaatttttgaagaaattagcaccagtaaaaggattattaggttccatttgtaatagtatgacaaccatcgcaattcaaatctttggagagttccttagctttgcaacaggcatttccttagaacaattcgttgaattattgaaatactcgcatatctcttcatggataacaggattatgcaaagcagacttttggaatgacctgttattattggccgatgatgttactttgcaacacacaaaaatattatccattgataactctcaagttgatctatccagttattatgaaccaatatgcaagcaccatcatgactgtagccatgacgaaccgttgaaagagaacaggtgtgcatgctgtggtctgcaaataactgacgatgtattttgtgaatgttgttacccagtacaagggcaagattataaatatgataaattagtgatcccaaaaccagatgttgaaatagaaaagattgaggaggcaacagtggaaagagctagagagattctagaggaaatacttaaacaatctgacaaatttatgaaacaggatagcgtgtttcagtttggaaaagaaacacctgtaataaaaccagtagatgataaaatggcagttcagataggagaagaatcatcaagtacatcaatcgtggatgaggaacctgagcaaacagaagcatcttttccaataccaagaattatatcaatgccagaaacacgagatgcccctcttaccatcacagaaaccagagcaagatttaaagaaaaacaatccgaatcaaaagaaaaattatccgtgcctggtgtgcaatatgttaaacctgttaagggcattaaagcattggtagaaaacttaactgttgaggcgcaaatacaaggcgaggctatgtacgtaaacatgttgggtctagaattcaccaaacatgtattgtccatggtagaatatgaaaataatcggaatatagaaccagattgcagatattacatgccacacattttgtgcggagtgacaatgatcagttccatggacttttcagtggtcaaatcatggaatctcccgaatacagatgtgaatacatgtgggatggatgcttacaatttcgttacaaattctaatcatagcttatcagagttccgacaattgtgtgaaatggaagaatcattctcagattggggtttacaattgtgttgtcaaaaactagaatccaatctgataatctacagtaaaactcacataacaatcttgcgatatgatgcaactagtgattattatggatgcatagagtttttggaaccaattcccccctctagtataggacacttcaggccttgtagtctaaaaaggatggctagatcatcgatctatttgtgtgtagatgaccccaacagtatgtcagacagagaattatgtttgtccagcattagaggaaagaaagaaaggttgcactctcaaatagaggtgacccctgaggagaacctattatgtgaactaacgaggaaaataaacgtgttagacacaccgatgagtaaaattagcaacaatccaagaatgataaaaattgacaattgttggtacatcactaacaatgaagaaacccggcagaacaaccctgatgccaactttattcatgttaaagtaccaacagaattactagatatggctgacactattagagctgccttagaaggaagattcgatctcgtacatttaccagagatgatgcatagttcagaagaattaccacacaacaataccgaatgggtgaaacaggaaatatacgaaattctgcgatcttgccggcgtgtggaggaagcagctatcacattgacccaaagtgagataaaggttataggtgggatattagcccgaccatacttttctaaaactgagatagtacctgatcataaagatcattttaaacttcggttgcatgataaggtacctattcgtcttgaaggagctactagacaagtattctccataatcggattcacagagaaaggttacataataaaccatcctttaacctttcccacaagaggtaccatgatggagctcaaagagtcatggggtagtaatttaagaagattaatagggttattcaaaccgatgataagcattaaagaatttagagatattgtaagtcgagctacttgtgtacttggacccgcaggttacggaaaatcaaccatgatttccaaggaggccaaaccaggagatttgtgtgttgcaatgacatccgtttccgtaaatagtttgaaacagaaaattaaaagtaaaaatgtaatgatatacacaatagagaaagcaaaatataagcacttaagtacttctaggacattgtacgtagatgaatgtataatggtagactggaaatctgtactacaattatgtgagccaagtactactttaaaattatttggtgcaaggaaccaaataggttacttggacatgagtaaaacgccaggtgtgagatttaatcaagatctgattaaatatttacgagaagatcaaattaaagtcaccaatgttacatacagaatagggaagcctttgctggatttcttggaaccattagagaaaggatggaaaaacccaaccaataaggtgacaacatataatattactaatttagactctaatgaaattaatactctgaagaaaattgtacttataagtaagccagatgtagtgataacaatgtacaattcaaacaaaaccttgatagataaaactctgacaggattggatgttcaagttgttaccacccattctttccagggtcaagaggttaaaagatccatggtggtactcaaagcggatgtaacaggagcatggaatttgaactccgaccccaattatttgaactccgctctaaccagagcaagcgaacatgtagaaatagtcctgtttggttttccgctatcccatgtttcaagcgtggatcaattattatctagaactgcaggacaattgccagacatattgacagaaatagaacaattcgataaaaaattaatgacaaacaatgaagatgagaccttgaaaaccttgacacttagaaacatgcacaaactgagtgatgatcaaatatcaatactcaatagtctgaatataactatggagggtatcaacattaagtatttgagggataataatgcagtgatatgcaaagccagcttgtactctaaagagatagcaaaaatcataaacaatggtggttcagtaatcatagaagccaacgatttgattaaaaacaaaataatgagtaatttagacagatccatagatgcaaaatatctggacaagctaaatcttaaaaacacccatcaatttgtagaaatcatgttgtcagtcaaatctgcaaataagcttagagagctattgtggatagtggataaatttgatgatggcataatggaatgttatttaatgggtcgggagattaagttcactaaaaccaaaggttgccctttattctcaggattaaagatcgaggatgaaaacaaccaatttattataggagatgggtggtatgatctattccggcgggaaatagggtataaaatcaaagatattgatggacctgtcaatacagtaatggcttggctagatattaaaatagatggtttgatgattccggaggttgacagtattggatggctggacgtactgcaagggatgaacacaagtacccaatggcaaatgcaggaaaggttaacaaccatcagcatgtggttagtgaactctatcaccatggactccacgagaaagtgttacccgaacaataatgctaatttatctattaataataaattatctagattgataggtgcaacacctaataggaccaaacatcaatcagtcatcaagcaccaaaatttaatagttaaaaagaaacactggttgttcatcactaagttccatttagggaacggtaacgggtgtgtgatgactgtaaatcaaaaggccacagatgataaattcagagaatttgtggtggagtgtattcaagatttgaagtatgagccaaccccaacattagtagctgggttcagtctcaatgatttacatatacccaatttgaatatgcctctcacgcgacacagggtcttgggcacacaagtgaacaagatcatcatggatcagatggtagagatacaagccctcacgtccagatcaccagatgatgttattaggttgagaaagaaagacttcgatgtttacagcaaattgttaaaagataagtacaccacactgtctgtaacacaagcaaattacgacatgttaattagcaacgctgagaccatgtttgaacagctgataatcaatcaaatggttcccaatttttgtaaaccaggcactttaatagtttattgcggaaacaaccctttatgcgtggcagtcaaaaagaagtatgaattaaaactgagaatacctaagttaaatgacccttcacgcgtagaatacgatagacaattgccaggatatttgaacttatacaatgaatggatcagtaatcaaactgataagaagattaaaacatttagctgggatgaaacaacacatgccaatttaatgatagccggaaccaatttaatatcgattacagaaccagatctaaaacacctacttgatagatgtgatgaactagtaggatgggtgcctttggacatcgtggatgatagtaaaattcatcaatttgataaatccaaacgattgttgagttttaaggatagcacattctgtcggccagcccgcaataatctacacatagacatacactcttgtaaaccattattcatcgataacgaaactaacacttatgtggaaatggtagttaaaaatgagttctccggaatggctatgttaagtcttaaaaagaccgctataccatgcgacaaattagtatatagatgtatgggcaccagacaggacttacacggttatgaaacgattaaggttccttggttgaacttagatatattagatgttgttagtactaaaaaattgttaacatttaggtatttcagagtcaatagaattatgatgcgaaacatgcttctgagattaatgacgggtcaagacagcgaagactctttattagcatatgctaggaccttggaatccacacaaattatttcccaaacaagtataacctccatgtacaactctgacttgcctacgttgctcaacacagcatgggtggcactgtacatccataaagacaatttatccaaatttaaacatataataagactgatagataattctcaagatagtaagtatttaatagaaagattgaccctcttaataccatctttactaaatttgtccagtcttatgtctgatataacagagggattaatcaaaacattagtagagaaattcataacttatgtcaaatttgatactgaatggagagaagtattacagttcaacttagagttaacctggctaaaatacacaccaattagacatcataaaatatataatttaggagatgatgatacgcaaacacaaccggaccccccaagtgacgatagtgataattcagatagtcctgactcagaagactattccgacgaatctaggactgaacaggactattatagtgcagaagatgacccctatgaatcagatcaaagatccgacgagaacgaagaccttatatctaaaacgtcaaaatcagatagtatggttatggaacgtagtatggaaacagcttctattacagataacattcacacagaagagtccttatcagatacagagtcacctgcgcaagttgatagacctttggaaactatcctgtcaaatgtaagtgttcattcaaatatcaatgatagtgataccagcccttctctaacggaagtgactatagaatcacctatcagtacaaaaggagaaaagacagatagtagttcagagatattacccggtcccgagcaagcagttgtagtaggtgaaatcataaaccaagaaacacgctatcctgaagtggaggacaacacaaaaatcgaagaattagaagtcaaaaccatgacagaagaagacatgctgaaggtagtggaaactcacctaaatgtggatctatcagatagagagtacatttggaacggaattaaagattgtaaacaatttgacggtaatcaatccttaaccatgaaacatgttatagactacttgagaataacagttttaacaaaacctagcgatacaaaggctgcagcactagattttccagggatgaagagacaaccaccgctaacagtgaattccatagatggtaaatatgggtcaataccaaaaatcctatggtgttattgggaaaaagatagtgttacctatttattacacttgtgtcttaagacttggcaccattataattcggattatagaataatcgttttaacacgtaaaacaatggaaaacatggttgggaaaaccacatggaattatataagtaattttattgtgcaattcagggctgattgggtacgattatatattcttaaaacctatggtggagtctggttagatatatcctccattttcaaagattcacttaatcctattgtcaattacgcagccaatcacccaagttgcgttttccaacccagtatttggaatcgtaatgaacctaatagggctttcgagaattggctgattgtgtgcaacaatcaaaacaagttgataactaagtggtttgacattgtcgatgacatggcgaaaaatgcaggaaattgtgaagaagagattataaaatacttgattaacaaatatggcaaggttggagaacgagcatgctccacagtgtctagaatacacctattctacttcagagtttacatatgtgaaagtatcgccatgcaattaacttgtacagaagatatagcttgtatgttcaaggatgaaggaatagtatctttgtggcaatccagatcgatcagagaatgggctagattgtatgatatatacttcaaagatagcatggaccaacatcaagtggatttaccaatgtacaaattgataggagatgaaaggaaaccaatagaacgttggctggaagaaggaagagaagtatctcctgacagtattataggacaattgatacagttaactattcaaataccatatgacgtgcaatcagttaaattacagataagtactccaaagaagacggtagaggaacatttggcaatagcacattatagtggagtaaatagcattttaatgtgcataggatcagccggcgacttgttaccaattattaaattgtatgacttattagagcttaagaattataaacctattttgataacccacaaagatctgaaatcaattattggtgatagaaggttacatcctttgacaatgacgagtgatcttttaatgagagtggcaaaccaattattacatgaaaaagatcccagaggaatggcaacaggattcgatctaacaaagtcgatagtgcaagaaacttgcaattatttgtccgaatatcataaaccaatggacttgtacatttgcaacccattatttcctaatctcaaggatatacaagaacagctcaaaaataggtggataataacaaacccttttccatatggttggacagctggaagaaaccctgaacggtcttggtttgataaaatgataactattttaggagattgcagtttacaattgagtgatataataagaagacaaaatgtaaaactgaacctttcggaacctgcgtatcagttaactgtgaataagctattaacatgttcacatacattgcatagggaagatcaacctgaaataatacaaacaggaccgatgtccctttcaggttactctagtttaggagggggacatcagactttgcacaatagaaaatattgtctaattaattttagtagctgtttaaacaacgttaaaccagaagatgtgatgacagtatgtgatgtaatcatgaaatgtgggtttcacatcatatttaacgatgcaaagactagcatatctccgtttggtattttaggaaagtatttaacagctaacatgggcatgataatggttaaaaatgggttgaatatcttagattatgttgggaaaactgaattttgtatcactcatggtggcatagggacattgcatgaattaatcgttgcagggatcattccgtttatatatcccacaatagcagaccaatatgaatgggccaaccttgtgaatgaaaagaagataggcacaaaattggaccacgaatctcttgagtcagacttagagtacgggataagttctttgggtatgtttaaacagaatttgctacttgtgactagtgagttcaaaataagcatagactggttttggctaaacatacaacaaaaaggaaaaagagatgttaggatagtgagcaaaacaatgatggaaatgcaaaggcccagtttgcagttatctcacaaagttgtaacactaaacaaattttcagacgtaccaattggtatttataacataagtggaaatagtattaaaatacattatagtccaaaaagcaacggattttgtgtaaagcaatgcttagagcatatcttaggagaatcaattagaggtaataacttcataacgtcaaaccctcaagttggtgacttattgacagatgtagtagacaggagcaagattataccagggtttctcgcgttaggtttgaacatagtgaccttgcaagacaatggcataggcaagctgtacaaattataccaaggtaccgtcatagggatttacttgaaggaaaccatgtcggttttccattgtgaggtgatagatgactttgtcgttgacgaaattatacctatgaccagtccaccaaagacaactcccatgaatttggacatttttgaactacttaagaaagaaggtcattataaacttagctatgacacattgtgcaacccaccattattgtataaaaaagaaggaaacaaatcttactctaactatttatctagaatttcaatgaatggtatggcatctctacacaccagaggaagttatagcacgttagatttaacactaaatcgcgacagaaacatctactatggaagttcttacgctcaaaatagtcctttgcatacgagtctggttacctctagactgggatggtgcacttgtaactgtattattaaaaatggaacagcatatatattctctgacattgagttaccagctaaagtagtgatgataaatttgcatctgcaccctttgtcctccattccttcaaaacatttgattcataaacacaaattgattaatttgaacaaagagaccagaacattggggagtgtacaaggatcattatacagaacagacaaattacctgaattggttaatgaaaattatacggtaatagtaggacattatgataatcggtctcaccataacactgacgagttaaacatattgctgaacgctagtcatataaactttcaaacagagcaacattgcgaattaaaaatgttcatccctagttacaataattgtatggatagattatgcatacatgaaagaaaattaacttattgcacagaattaccaacagtgttctcagccaaagtaatatcagcattatctggtttggaacagattggtaatagattgatgcatagtgccccattaacttcagacatcaggaacatgctgttggcaaatttcaaagtcagcactcctagcatgttattaaagcatgaatatggaacacaattggacaatgccactgttgaagctattcgcaaattcttgacagaacctttaactgataatgtccttatcagaaacattgagcatggtttacaaactctagatatcagaagaaattatcatattagacgtgggatactggaaaaactacagctgagtcaattaaatgaaaatatatttgtttcaatccttaataacatgtacctaccatggtgcgatatgatgattattgcagaatcaataggtggcaaaaaagaaacttcttctactctagtgggacctaagatagataatgatgaaagaatgagttggaggctggacgttggttctgagtcaaccactaacaattggtggagtttaaacgtgaacacaaataccagttcaaaggttatacctccgatgactgacgtgatggctatgaatgaactttacatacatgacattgaaccagtgtatgttgacttagggaatgagcagcatcaagataaagtggaagtggactgtttcatcagtccatatacaagcatatacacaggtagtcacttagaacctttacttgattttccagatcctattgtcatggacttatggaataacacagacttaacagattggctaactctgtacagcccaataaatgagggcaaggtattctcaagagaagtaccaggtatagtgattcaaatagaaaaaattacaatgacaaaatacccaattgtaagtcgtcctgtgttaaccaaattatgttttgaagaaggcaggagtattatcggaagattgaaatctgtagctacgatacgacggaatgaacccaatccttatcatgcagttatagaattgtgtgagacctatttcaaacacgattggcgatctatggtttcaaattaccgcaacaacagaatattgatagatccaaaggatgtcgaaaattggattaaggcaaataaagattgccctaaaatagtgatagaaatgctagagactctttctggaggctttcttaataaacacatcaatgacgtaaatgttcatttaaagttagaaagtctttataaaccagatccaatcaatgtatggagacagcaacaagctaggataatagtttggcaaaggaaaagtatttgtgccatttatagttccgcttttaaggcaattaagaacaatcttaaagcatgtctcgattacaaagtggtgtatgcagacggattaagacctgacgagctgtcagcaagggccagactttgtaacaacgtggccgggttctttgaaaacgacttgactaaacaagatagacaaacagatagaccattattagaagtagaaatgatgttgtatgatattctaggactacatccgaaagtcatatcttcatggaaagaaatgcatgaagagtggagattcaaatctgaacactattggggtactggaaccagcatgaggttaactggacaagcaaccaccgcgataggaaattgtatcactaacttacaagtacaccaacaattcgtcaaagacaattgggacagtttagagttagcactatttttaggagatgacatgtgcatggtgttctctgaacaacctaacatcaaggatttgaagtataatatagctgtaaattataatatgcaatctaaagaatcctggaacgaagcatttggaaatttctgttccatgcttttatcccccttaacaaataaaagatgtgaattatgtcctgacgtggttagactaaaattccgatacgaggtaacaaatggggtacacgagatgaacgatttgaataacttgatgaggaaagcctcctatattatgatgctggggcaaactccttggaccaaggaaatcgtaaaggatttagacctaccaatacaacctgtagagtggtacagttatgaagacatgattaaaaccgtgggagctaagtatgaaatgaacgaataccaagtagaaggatatttgcacaacttgttgaacctgttaaaatctaaagaatattattcacacaagttccgcatgttcagcaataggacaggtacaaaactatactaa

SEQ ID NO: 1136 - DNA, 6045 bp, Beijing alphaendornavirus 3
  source 1..6045: mol_type = other DNA
gtggataacatggactatagcacattacaaggatggctggtttgccatggaggggctggcaccttatcagctctatggcagggcgctgcaacagcagttgtattcccaattgccttcgaccaaccatactggtgtcaatacaacagacaacatttgtatgtaggcgaggaattggaggatttagtaaatttacaacccttaacgggtccccgatactcaattaatgatactattacagccatcaatgaagtgttcgacaatttatccaaaccacttcctgctttgaaaatgatgacaccgaagggtacttttaatgcatttaaccggaaagttattgctgattacactacaatcaaggcagggcttgtttgtattaaaccttccgaaaaagtgatatatgacaacagcattgatttgagaatggacaatacttgtgttgtggactctataatgcatgcagcgggactcaaaactgtggctgataaagaagtagcacttagagatttgaccaaaaattgtgtaagcttagggcttacaaatatacataacactccacaaagttattctacaagtgtgcatttagctgcattgtttgggttcaattatgctgaaactcaccctggtgaaactacaataactgtagatataactttaccagtaaaagaatgtgtactgcttaatgtacaaggcaaccatgtaaatttacttggagtttacaacattacagacttgactttggttaaatctatcaacaggggtgaaagcaatgccgtcagatctggcctaacaatggattattgtgaacacggcaagttatctgcattaaccaaattcgacggttgcatacactcagaacatgatgacaccagcatagtaaagcaaatcatcaaacaccttgttgatggcactgtacctgagatgcatcgcatgcaaacggcatcgaggagtgtatatgtcaataaaaccagaagcaactggtccgagatgaccgggcgtattaatgccactcaattaaaatactgttatgaattcactgctagatgctacaatgaaaacagtgttccaacaagtggtgcactgatttgggtgctgacatccaacggggactattgtaagggcatactgctcaaaaacacaccaggcagctatttaatactggcattaacaactgaccccatgccttatataatcaacggtaattacacaattgctgtcaaaaaccaagggaaaaaaatgactagaggtgcaactgaggtattagatcaagtggcgctgggattgttaagtggtaaaggtttgaacttcaaattatggagaggtcgtgtagatgaacagctggccaaactagttgtaggagattacaacttcgtgccacaccattatgacagcaacaacactagatttgagggagttgttgataaactagtgaatgtggaaggcaactcaattggcaatcaattaagacctattggattaaatgcagtgtactcccgttacaacgtcaaatccagtgaaattatttggtacttcgaaataactaaggatggcgaaaatttctacaacacaacaatggtcaaagacacttttacgccaaaaataactaacggtgatcgagacacattagatctaattaatgagatttacaatgaagtggtcaaaccatcggctggacccggtctgatggaattggatgactgctttattattcagaatgatagtttaatgaccaccgacaaagacatcatacctggaaaattacgcaacaagaaggtttctttaatgcacaacgatgacatcgattggaacatagcagtgtcgttatacagagaacagcaaatgcactccggcgttaaatataaaatattacaaaaaccactgtacgagaaaattatttggtgtcacagaggtctttgggtcatagaagaaaacgttgaaaatgcagaaatggactatgtcccaagctgcatagaggaccttgcaaaagatgggttctctacaatcaaggtgatggaaaatgctgatttaacaatcaacctaagacaatttaacacagacaaatatgcaggaagcgttattcaatgtgataatgaaaatcaattaagacaatgtgtttatgaagcaatactcaatttaaaaagtgcacaacacaaaccagtcggttgcattgatgaattcggaaatatcataactagtagtagcggtgttttgattgacatcacacggaggtctttaacaatattggatgaacagcaccaaaattacataacccttaaaatacacgatttaccattagacattaagggtgaacacatttatgatgaaaaataccataatttattccataatagttatgttgtgcacaacaaaaagaaggtgtacttggtgataaagtcaattgaacgttgtatctcagccattttaacaaactccgactcgaagcttacacaggaaggggcacaatggttcaaattgacatacaatgctgagtacctgagagctaaattagaaattgatgacagcaccatggtggatgttgttagcggtcatagaagtgagttagtgggtgtggacatgagtggaaaccacaataggtggattgaaaacactagtggaaactctgactttattgagcaagccaagatagaaaatgtttaccgtgcagaggaaacaaacacctatcgcaacactgcttacggacacaacctgcatcatttacatgatccacataaatttgaagatttaaatattgaaatgcaacaatttattgaacaattagctttgtttatcgatagtttaccagctaatcagtctgtgatatgctcagctaatgttgaatgggaaaataacactgggttaataggtattaacttaacagacaaattcgtacacatgaacaattggataaccgtggtggtacccggtttaggccaaagatatagaatgttagctatgttaagattaattccatgggtgtactgtaaaaataacagattaattagggtggtaaatggccgaggtaacggctcagctaagtgcccatacagttcattaggagtaaccatgtcaaggaacgatgaattcacaagcttagttatgttgtgggatgcagtggctgatgctggcatattagggaaagagaaactcaaatatgaacaatttctagcaacaataggagatgtatatggtgccgacgaattgtttatatcgaaatgtgacgtatataaatgttgtattaattatggtgaagggaccaagaagttggattgtctcttaaatcatgaccaatctaaatgcgcttatattgtaatggaaaatggcaagccaataattcaaccgaatgctagttggttaggttacgataattacagcaatgtcttaattgacaaactggctgcagaaatgggcttaattaacgccatttatgtatgtaattatttgtattcgaaagtgttcaaattaggactaacaactccgcatacattacaatcaagatggttggagaggagaaacaattctaatgcacacggggaacttaatacaacaacacataatgatacctacaccaccgtagacaacaaaggaacattccataccctagatgaagacatggtagactctgaatgcactggacgtagaagggctcactacaacacagactgttacacaaaaccaatattctatgaagaacttaaacaactgacataccccattgtaggtgtggatggaaaagttaaactgatgaatatagcagagatcaagctaatgatgtattccaacactgatggaccgctcaaagaaactaattcgtgtttgatgccaaatagtttattgaaattggaaagttctgcaaggggtagagcctactggtttgaaggcgatgtgatgacgacagaaaatgaaataagtgacccacgagattatgatggtaaggttcaattcatttcagagaaacctttgaacatcattggagcaattgcaatgccagtaggcacagggaaaacttggttaactaaaaaatacccaaacctttttgtggaccacgacgcgatcaacaaacccagacagcatgagattgataaacttattagggaaaacaattttgaccaggtgttaagtatacacaagtcagctaaaatacctaaagggaaagtgttgttgacctggagcatgcacagtgttccagataattgtgtatatgggggtgcaatttaccgcagccataaaccacacttcgataaattgtcacctaaaaagaaggaaatggcattgttgggcgagatcggagtccgaatggaagagaaagtaattgaggtgggaaatgacttagaattggaaagtgaagccattaaattagcaagacgcattctaaacaatgaaattattgatgtgtcaagagtcagggatcataacattgaaagcttctttgatgtaacttttaaagatgctactaacttcagcgtcagtgatggggcatggtccgctggcttatacatgccacatatgccagtggaagagttagtgagcaatttggataacccgtttaatgagatcacacctatacaagttatagatttccacgaagacactgatttatttgacaacgcccgcgtgattatgccaagtagtcaagcccaaatcgcaagctatcctttacgaagctttgaaacagcaaacaaattacacacaagcaacaaaattagcttaaccaaatacccaatgataagcagacctgtattgaccaaacatgttttcggggagctgaatgctgcaagcttgcgaatggaaaatctacagtggtttgaaaaaggggaatttgatgtatcgaaagaactagatggtataattaaaaattgtttcaggtcggaagctccagagattattggaaactacaatcctatcacatacaacaccagatggacaagggaatggttagcacacagaccaggttacacagaaatagacaaagaactggaaaaaatggaagcagaaggactaaacatgcatgacttaaaccgggtgaacgtacatcagaaattggaaagcttaactaaacaaactaaaccaataaacagatacatagaacaaatagtaagaattattgtatggcaagcaaagacaatagctgcgattttcgcaccaatattcttagaagctaaacgtagattaaaagaactactcaaacaaaacataatatatgcagatggattaaggcccgatgagttaagcgagtatctgaaacagattcctgacgacgattattactatattgaagatgatggtgacaaacaagacaaacgcacaacttggaggatgttaaatgttgaaatgggtatctataagaatttcttgaaggttgatgaaaacgtagtgagcttgtggacaaaatgtcattggatgtggaagtacaaaggtcagtacttacgcggaatgagtgatggaatgagacaaacaggacaagccacaacagcaatagggaacgtgttaacgaacattacggtccattggagaatgtggcgagatctaggaaaagatcacgtgacaagtctaattttaggtgatgacaacataataatatctaaaagaccagtggacgttcaaaagcatttgcaattctcaaagaaacatttcaacatggttcaagttgttgaccaaaataaagcaggtgggaaatttttgaggatggttgtgtgtgggaatggtgattatttacaatgtggaccagattatgtgagattacgaaacagattcgaatatacaaacggtcaaccacacgagtgggatcttgcagaagtactagaggccagagcaaaaagctacttgatgatggtggggaaaaaccatgagtcagtggaaatcaacaaaactaaagggtgggatttaccattgaaatattatcatgatgagaccgccactataaatgctacggccgcattgtatggggcaacaaaggatgcagtgttatcagacagagccaggttgctaaattacattcgagacccaacaccatacaaacaccagtgggaacactggacctaccgtccctaa

SEQ ID NO: 1137 - DNA, 1304 bp, Beijing sediment alphaendornavirus 1; identical to SEQ ID NO: 798
  source 1..1304: mol_type = other DNA

SEQ ID NO: 1138 - DNA, 1425 bp, Beijing sediment alphaendornavirus 2
  source 1..1425: mol_type = other DNA
gttacaaaaacaaagtatccaactagaggtagggtggcaatgacgaaagaggcaaatgctttgtacaatgcttttagtacaagacatggtgacaaacaaaatctaaaaacaaggaaactaaacatacctaaagaagtgagaagagtaatgcgagtttattttgacagaaatagaatgtggaaattaatacactttcagaaaaaccctctgtatatacatagaggacgattattagactggttaagtgaaagacctgatggtttaagtgtactaaatgaattacaagaagctatagaacaaggttttgaaggcaatcctattaattccatgaaagtacatgcgaaggtagaagcattattaaaagcagaccctgcttcgtttccagaagaagtacgtgcaagattgattatttggcaaaagaagggaatatgcgccttatatagtccagtcttcaaagaagctaaagtaagacttaaagctatattgaaaaaggaatttatgtatgcagatggaaaaacaatggatgaattgtctgcttacacaagaggattcacaggcgtgacacacttatttgatagtgatttaacagcacaagatcgacaaactcctcatgatgtattagatgtagaatttgaaatatacaaaatacttggagtttctgcagcagtattacaaagttggaggcacgtgcacaacaattggcactataaaggatttgatgtatcaggggaactagatgaaatgagactaacaggccaagctacaacagcacttggtaatttaatagttaatttattagtacatgctaaatttgtagaatacaacataaaacagcatgtattttcgttattactaggtgatgatcacataagtggttttaaacacaaaccagtagtcacattttacagaaacacaatagagaaaaattataacatggtggcaaaatatgaaatcagagaaaacgtatcaatattttgcagattgatggtatataaaacagcagatggtcacatggaagttggtccagattttataaggttgagagataaatttgagacaactcatggaacggctgctgtatcaaaaatgaatttagaaatgcgttctatgtcatattgtatggtgcttggaaaaacaccacaaacaatggaattaattaaaacaaaaaactggccaattgaagttttaaattggtactctttcagtgactgtttaaatgcttgtgccaattattacgatatcagtcaatttgaagtactagatgattatagtaatttactaaaaatgatgaaagatgacagatactacacacacaatgtaacagtaatcactagcacaccatatggcaaaccaaaaagctatgcacaaccataccttgggaagaaaataatattggcaccacctgcttcgggcaaatcatattga

SEQ ID NO: 1139 - DNA, 14655 bp, Bell pepper alphaendornavirus
  source 1..14655: mol_type = other DNA
atgactactaagttgtctagaccttttgctttacgtttactgggtggctctcgccccccgaaaactcaaattcttcatgggtgtactggtaacagtatacccatgaagaaattaaataagaaaaacgattgctctgctagaaaagcatttaggcagagcaaatttaaatttaaaataagtaaaaataagacgatatgtccggcagtgatggcacacagactcgaagaggaattagagttcatacaatttggacctgaagagtgtgttccagatttaaacaaagtggacatcagaaccatcagaaacatgatgctgttgtttgaccaagaccattgtcatttggacgtgaccactgaggatgttgtcaaatacctacaacaaagtcaattgcaaagcacagaaccgttttacggtggacctagtaaaatgtactatgccaattgcaggccgatgttactaccaccatcaaaacaagacggcacaaaaactgaagctgcctcaaaattgttgacaggtttgattaaaaagtttggtggcagtgtcattaacatggttctacttgattgtgtaaacaattataacatgaccccacacgtatacaaaataggaaattcgtatggttacaaagccatggaattgccaaatgtagaagcagcgatgacgtgttcgtgttgtggaatcacaaatttggtgtggttattagacgaaactgaaggattgactaagtcaagatgtggagtctgtttgcaaccgctattggttagaacaatgatgcctgaatgcattatgtggggcatgttggaggtgattgatattacacaattgcgagtgggagcaatagagctgaacaatgcagagataaccttgcagctggatggtcagccaccattagcaccagccacattgtcaaaactaattgaccaagatctaaggaatttgcggtcagtcatgtcacgcgctatgagtaaaactatatatgtacctaatgggttaactgaatatcagaaaaaagaattggcaattgttgtgccggcatacaagctattgccaatgtccggaacacccaacccacacgcaatgttggcagctgaaagaagaatttgtgcggttacgatgggtgacaaagtgaaaaaaggcaagaaaattctggacataggaaccaggattaatttgactgggaatgacagctggcatggcatgggtccatgtttggattggagggatgtggaacgctaccacaacagaccactgacagcaaacacttgtgaccacacagtgaaagagtgtggttgtatggatggacaaaaccccttgttaataagtgtggatgccatgtatgacatagaccctactgacgtaatatcattaatgcacagaactggtaccaaccaattgttcttttgccttagtacagcagaggtggatttcgaaaacaccaatgggaaattagcacatggtcagggagaatggatgcggcatgatgataaactaataacagtgttgcgtggtgatgatcgaccttatgtgaacaactggaagttaaccaaattgtggtccaccgcagatttaatacaagctggccatgttgaattgagtgtgcaaacagttaaaacaataggcaatcatattatcagagtagccacattggtgccggatggtatggattgcctacgcactcgacaggtgaattcacaaaatttgacacatttgaacataaccgtgcccatgatagacgtggaaagttggttgaatgtgttgggaccaccaaaaatgtgtcacaaaacaatgaagttggatctggcattgtacagggccctgtattcaagaaacttaactggaggactgtcattcgaaaagttgattgagtttggattgggatatgcacatgcaaagtacacaaccaaaacaacgacaatctcccatcaacatgtaacagcagatgatgttaggatgcacgctttgttggcttgtgcagcgaccagaaggaaatttgcgtgggtgtcttcagcgcttaaattaaataacaactctaatgtatttggtctggatcccattgaggtgacaaaacttttatctttggatttggccggcacactaataacagatttatggcgaaaaatgttaccggatgggttcattaaagccagagttgatgacctagtaacgcaagtgaccaactggataaatgattccttttgggacacattagactcattgagtggacctagcaaagtgttcacacccaacatctatgtgtggcccactactggtcacgaaacggtattgaacaatgaaagaatctgctatcaccatcagcaatggtgtgatcacccaatagctctggacaatctgtgtgaatgttgcagactggtgacttcactacctaattcttctaggtgtgaatgctgtttgaaagacacaaccgcacactcgtgtgaacacaagtgccaaggtgggcatgaaatggttccaactgaattgacacaaaattgcaagtgttgtaagcttaactcgttgaccaatccttgcaaatgttgttctaagaaactagctaaattccccgacagtcaacagcccataggttcagaaatatatgcacaaccacaggtggatatggcaaagaagataaacaattacaaataccaagggttggaaaagataactagctttccaacacacagaactacgactgaacgaccaactgagatcagtgctgaaagattggttccacaatttgagccaactccaaccgcttcatccataatacagttgtggaaaactcaattaggggatagagcaatgagctccaaaccaatcaatgagacacagcaacacctgacagcaacggtcactgatacaaatggtaatgcagaaggcaatgaagagacagcgccaaaagctctaacaagtgcagcaccagatgacaatgagtttaaaacagccattctagagctgacagggttaacagatttcagttatgttagcaatcttcggtacggctacacagaagcagtagcaagccagttggctctgccaaacgaacctaatcctgagaatcgcataggtatgagtgaattaaaatattttccaatgggcatgcatcaacaccaccctgatttgttggttgcaatacacacacagtctgtgggtggagaaggactttgcgcattctacgcgttagaacatgcatgtggaataaaactgtctttggaccacatgcaatcagctttgaattgcaaacaacagttctccactttgcaaataatcaagtacgggaatatgttaggatataacgttgcagtgttaacggaggaaactataataaccggtaaagttgaccctaccactgaccattttgtttgtatactccatacaattgaagcagagacaggcgcaccccactggcaaccatgtaatgtggtacagactgcggacctggagagcaccccttgctacaaaggtttgttcacacaatccaacattaacaaacaactaagtttgatatcagccgaagttcagggagttgagttgacaaaggaattaatcaaaatagtgttgagcttaataaagagagcagttccaaagctatctcaattaaaatttgggcgcgtagaaatgacattgcacaatgaagacgggtcatggaaactgtccaacaataggattaatagacatgaccccggctgcggattgttcaatttttcaattgatgaacgacacacagacctggttgaaagtgtttgtcatgaaacagtaccattgcaagttttagatgatttggagagtccgttgaatgtcggtactatgcacaattgcgatgtggatgaattacgagtgtccctattgcgcaacacagttttgcagttacgacaaacatggctgcaagcaaaaggaattgaaccaaggtcagaagatgcatgggtaaaggtgttcgcgctaacacataagattggccgggatactagattgctaatgttacaacacaccaaagtcaagtcaggagatgtgatttcagtagacaccatgtttggtattcaagatcgtgtaatatggaagttcaatgacggatttcaatgccaagattggttgcctcctactattggaacacaaaccataaaaatttacattaacaaaaggagtttcaaaagtggattaatcaaactaatgacgttgagcagacctcacgtagatttcacacaatttaaacagttggtgctaacatccacatgtgtgatagggccagccggaagtggcaagagtacaatgattgccaacaattgggtcgatggtacaatagcaatagctaagacaacatccgctgttaaaaatttgcaattgaagataggtgggccgaaaaatttggtcatgagtcacgaaaaatatgcattcacccaaaccccgatccacgacctggtgattgatgagtgcagcatgtttacttggtttgacttgtacttttcattaaccgagttaccacgaacgttaactatgtatggggacccccaccaaataagcacaatagatacatttatgctaggaggggagagaatattagacaacataacagattatgtagtcgaaaagaccaatctgagatcaacgttcagatatggggctagtgtgtgtgcactactttctccattggtgggtgaattgtcaagcaaagccaaacatgacacaaaggtggtggatgttaatttagcattgtgggacaatgttgaattgaaagccacaatcaacgaacacaacccagacgtcgtgttaactcaccataacatcaccaaacaacgattaatggcattgtgccccaacaaacgagtggagacaatacattcgttccaatctatggaagcgaatagtgtgctgattgtgcagtacaatgaagggggaaattcaaagatatacatggacaaaaaatacgccatatccgccatcacacgagcaaaactaaaagtagtatgggtaagtgtcgaggtgtcaaaccgaatgaccctgcttgacaagttgcgtggcactgaactagacataattggaggtggtaaacaaccggcggtaacagagcatagcgacacacttcaccaaacattgttggatacgctgcaaggcggaattaatgaggaagaaacaaaacaaccagtgttcccccaacaatctgaagaaacaagcacatcataccacgaaatggctgaagttgaacatcaacatatgagcaaaatattaaatgaaaaagtggtgacaacagcagatatagaaaccatcttagatggttacaatatgaacaagcaaccgttgttgatttacaatgggtgggcggattttgttgagaaatggtcacaaacgttgccgtccaataagaagatggaagtgagagaagacgttgggaccataaaaatatggttatattctctagaaataattgtaacagtggatgaaaatagagagtattacagcttgcaattgaacagccccatgtggttgtcaccaatgaagagcattgtaatggaaaaatacagagcaggacttaatgacgagtggtgcaagcatgcactcggtaagaagtattcaacagtgctagcaaaattacgcccagtacatcgagattggttcaaatcagttttgcattggcagccagagttcgaagtgccaaccactacaaaaatagcagaaacgaaaaacaaccaaaatttgaagcgaattgttgatgtggattctgaaggggacgaatgggaagatgcattgagtgaagatctaccagaagacactcaagccgctttagaggatgccgcattgtcaaatttagaaatgaacagaatattaacggatagacagctgagaaataagtatccatcattagcaaacttaaattatagtcagattggtgcgttgttaaacccggcggcaccaatgctgtatccgatgaaatcaacatcgctaatagcattagtatatgctacattaccaaatgtgaaattaaccacagttgtcaaagagttggacaatggattcgaagttactatgagcacagttgctcaattaatagtaataattgcagtgactggagatggattgttgttggaagttaaaggtggaacactaaaacaaaagatacaagaggcaatcttggagctaagagtcaggtcctacaacgatcttgcaccatatgcaggtgtcaagcaaaatggtagaacgttaacagcaccacaaacgcagttaatacaacagtggtacccatggttgacaaacttggaaaagcgtcagacgagtgacactgccattgaagtccatgatttgatagagaacggtcggtttgacgtgtcaggaaaaatgaatgatttgctaaattccatgcgcgagctgcgttggattttaaaagaacagggtgttgaaacaagtaacgacattgaatatgtgtgcaaagtgtgtgacgatcaatgcatgtactcggacgaagaaatagggcttgaaagcggttgcgtcatgttggaaacatacttgggtccaacggcaacaagaatcttaaggttatgcagtgaatgggctgtcttgcaaagtgatatcggtaagcagtttgtggttaacatacgcggagaacaagtaatgatcatatcattcggtggctgctctctttgcagcggtttgaaatttgtgtgcaataaccaagaaataatgcgaatttccccgcagagaacaatgggcaacgtgagacgattaaggctaaatcactctgcttatcccgcagtgttaaacagtataatgatctcaatgcatatgaataacatggcagttggaaattgcatgaacgacgagccaatttatttagatttgttatccaatgtagacaacgcattgaagtgtccgtggtatgaactaggtatgctgtttgaaaaaataagcattgccccaaagtatttatggagactaattgcagaccgagagtcacaatcagcatgcaaaatgtttgaagatgaaaacaacaatttgttgagtgaaattgcaaaccacataccaaacattgaaatcccaatgatagtgaacacaccaggacataggtcattgaatggtcgtcctttaggtgtaaggtacaaagggataaagtttgcaataatcaaatttaatggtaaatatagttgtgacaaccaattaatggcagcaaggtttgcatggtcatacatacccaccaacgtaatgatagagagatacttttttgtgcgactaaacagttggccatgggttatagctaagttagtaactctcaacggaaaactagcaaacattggcttggggcatgattttgatatgccagtaaactctctaaacttgccactgagctaccatgaatcaaataacacagcagttaatcgatttttggtagagaaaagaggggaggctgtgttgagcaccatgaaaaagacctatcatatagtgttcgtcagcaaaacgcaactacagaattatggacccatgctacaacgtgactgtgaaggaatgccaatagaggaacagggttgcgacacaattgatcaaggttttgacatgttgacagaacagatatgtctcaaatacttttacaatgggttgtcacgaggcgaagtgagccaaatgattacagactatccatacctttcaatattaacgtcaagttgggccaacttttgcaccccgcctgacaaaaaacatgcttttaggtactatcaaaacttgactgactgcaacaacatgatggagaaaatggagcatgcatatggagttggcaagcaaccagcagaaacaagcaaagagaaagagggtagtactagacaagacattatggaatgcgtcaacctgcaattaacagagggaagtggaccttggtacaccaatcaaacccaagatacagcagaaattgtgacgaacaatgtgttgatgggattagtgcagtgtcgattaagtccatgtgagatcgcagaaatgatgacgaaggctaaaaagaagtgtgctcacttgataatgccacaaatgatagagcaaaacaatcagctttttggagtggctagtgaagacgattatcagtacaaattttggtatcataactctagtcatttaacaataataaacaaacaattgttgacaatgttccaaactgggcagtgtgtgtcaacaccacacggtactgtggtgctgcactcttccaacagagtgttggggcattgcatagtaaaggtgttgttgctgccaagctgggctgcattgccaaaatatgtaaggccaaacatacatgacaaccaacaaaaactggtaaaattcaaattgccagatatcaagaactttaagcaattcataacaacaggcaaagcaatatcttacaaagaagtgagtatgtcactaaaactgtatagggcattatcattgagaatgttaagacctggtacaacaatagacgatttattggcttatgctagaacttatagtcacacagtagcatacaccattagctcacgaagctctcagcaaccacaattcgtgacggagctgatggagtgttgcgtttgtgtgtatgtggaaagcatcaagttgaacagtgcagcaactagagtaatggatataatcagcagcacagaacatccaatagataatgtaggcaaaattaaaaatacaatttggttcgctttagttaagatgttggctgaatgttatcactggttagggttggacacgacaatagaaaatttgattgaattgtttgcatctgtgggtaaagaaacagtcggaaatataatcaaaaatgttgaaaaattagtggtagttagaattagtaaggtagacacagccgacccaataatttattatcatgatgacaccgaccaatgcgaaatgtctagaactagcatggatgacactaggagaaaagtgcaacaagtgttgcaacatgttagagaaagcgtacaatggggtgatcaagtgcggaaaaataggaacaatctagtcaaggacaacaacgacaatgtcaaaccaacccctacttcccaattaactgacaaattggcgttgagattgggcaaagatagagatcatgaaattgaaaagttaataccaaatttgatggaatgttatgacagcaacgagatggcaacagcagtcacaagagtcatcaaaaacgtagctaaaaagttggagctaagagaacaacctaatataatttcttgtgtcggagatgagaggtggattagtgaaagcactctgttggaaaaagacaaaatttgtatgaatgattgctttactttggacgatttgagaaaagaaataattgaattacgttggatgtacccagacgagtgtaaaacctgggaaaacaaattagtaatatttagtacaataggtagtagaggggacattgaaccatacatatcttggggccaaatcattagagagttaggggcagagtgcagatttttggtcccaatagattatgtgggttatgtgaatgactttggatttgaagcaatgggtttgcaagtaaattctcatgatttaataaccacttgtatcgaggcggaaagatctaagtggaacccaataaggttatacaaggtgtggaaggaaatgtttgaattgatagaaaatttgttcaagtttaaccacacccaattaatgaaattcaccactggagctgatttgatagtcgaaacaccattcacgcacattggcatgcagctggcccaaaaactgaaaacaccatgccttttcgctacagcgtatccgtgggagcaacaggctggtatgaccaccagagcagacagaatgacagtaatggaaattatagcaggtgtcgcagcctttgcaccattcaagaaacacattcaattgtggagacaaaatatgctgcaattacacaatgagcgtggaataatggtgcacggtgtgggaaaccccatggtgtacttgcatcccaaaacgacaaaatggtgggaaacatccaaaacttcatgctgcgtaggttatgccaatacaatggttgacagagttcaagacggggacaaagacctttgtatatgggcaagccaatataagagcattgcggtgtgttttggttccatgacaggtaaaaccagacaagatttgacatcaaaagtaatagaaaaatttgacaaccagtttagaatagtagttgtggatgggagttacaatttgccagctaacaaaccaaatgttatagctgtaaaggaagcaaactacaatatgctattcagttgtgtggatgtcgtaattacccatggaggcagtgggacaacacacaatgcattgagaaaggactgtgtagtgttgattcaaccacactttggggatcagctagcatggttaaaatcggttgaacggttaaactgtggaggaagcttatcaaaggcattgtcaatgcctgcagataagttaatgcaagagttcgccacttggcaatgtaatgccaaaattgtgggtgcacaaataagatccgagaagttttacgtcaatctggtatccaatagtgtgacactgtggcaaaaagcggcggaacacaccaccaatttgttggccgatgttcgagaaccagtgcagtcattacaattgaacacaagcaacaatgttagtttgttgcggagggcgaaattaaagtggagtgactgggagtcggaagcggcgctaacaacgaaattgattctgaaatcgcacttcaaaccacaatttgagaaaactggtagcagtgcccaactgccaccatcaggtagcgcagacacgagaaggggaggacctagaccacaagtaccacccaaacgcgtgtatgaatacacatatggtgcgccgaaagacacatccagcacaccattagaacaatcagggatagaggtgatagaacgacaggagagaaggatgcaccttggtataaaggaaaccgaacagcaaacaacaccattggagcccagattacagttgctcagtgatgtagcggccacaacagaagaggtaccaattgaactaatagacagctcgtcacaaaccaccgacaacaacgacgattcaaattcttctaaggaggatgataatgttgaaatggacttgcagccaccagaacctgatgaaatagattatgccgagggctttagtgttgaacaaccaccacctgagccaacacaagttgtggaagatgtgccaatgccagagacggtgggtccaccagaaatccaattttcagtagatgcaacaaatgagctgaccagcaactcgatgttattattgaatatgtttgaactcaatccagtaactgattggggacccccaatggaagttgtaactcctggcagaaccagattgttgctagcaccaaaaagccaattcgattgtgcaaaggaagttttgaccatggcaatacaaacacaatatgacatagatgagttgcgagccacaaacatagtgcaaaagtgttaccagtggttaagggtggcatctgtaccaagagtgaacgacctcaaggtaataattcgcatgctggatttaaaattgggattgaagttaccagatagcaacatccgcttcgagcataaaagcccaaccggagacacagggcctgtaatagttgtagtaagtggaaccagtttggggcactgcattttaaaggaagtaagcatactagggtcaaaactgatcaagcaagaaaactgtgtgcaaatggggatcaatcgaaccactgagacgcaactaaacgaactattcgaaagatgtggcggatgtggtgattggaccagacaaaacttgccctcactgattttaaatgaggaaacagcagaaaaagcttgggtcgagttgaacactaattatactagacaagaatttttacacaaactgcagggtacaaatttagtgcacaccgcagacagaatggaacaaccaatatttctagccagatgccaacaaagttggtcagcaatattttgtaatgaaaagattgtaccagatcgttggtactggataaatgacggcacatgttgggacggtgcagtatccgtggaattgaacaaacaaagctttttattaaccaatagcgcagaccgaaattggaaccgagacatagtcacgttcaggacagacatacgcctaggaatagggaaaagtacacaaaagcgcaagccaattaaaaagaaaataataataccaggtgaaagcaaggtcaccgctttgaataggagtaccttgcatgagtcaaccttgaattactacggggtcaccctaactggaatacaggatgagagttgtgatttagtagctgtgttcgagtatgataacagggcacaccataaatatgacgacagagagtttctaactaaattgggtgcagagaaatgtttgggattaggttttgaattaacaagtgaattatggaacaaaataacagctagagttacaccattgcgccacatgattcacaaaggggagcacaaagtggcattggaattctccaaccaagctcagagattaacatttacatctatagcacacagcagcgaaatagattacatcgcagaaggtaacagtgtgtatgtgtcattggctaacctggacaaattaaaagaacaatgcttagaagaatgggccatttatatgggaatgaccaacgggcaagtaccacacatagatgatgtcttatccaagttgtcaaattgggtgccgctaagtgaatttttaagtgaacacggcggtgaagtgaacccaaaccatgtgtttggtaatattaacatagcccaaagtaaaataagattaatagtgaatccagggcgaacaaccatgaaactaacgaacatagtaaaggttgaaatggaatatgacccaccaaaactggttcataggaatatgtgtataacacttgaggtgatgattgacagaagagccggtgggcttgaggaaccagagttttggaagtttgcagacgatttcaagcagaacagtgtgtctcgttggtgggacgcagtaacaatagagaaaccaaaaaccaaatttgatgcaagcagattctcgcagattaacacagaagcattgacgggccatggtgctgacgaagtcaaccagataggaatgataatcaaaggatgtgacaccggtgatgcaaccaaattagcatatcaagcggtgcaggaatggtcaaatgcaatagacactgaacccactactgtagaaatagccagttatgatattatgagtctctgggaagatacagatttttcagattggaatgaaaaattttgtccaagaaatgaagcagtggtaaagtcaaccaatcctgcaactcatttgagagttacaaacaaatacactatggtgcaataccctatttacagcagaccagtattaaccaaagcagcaaatcaagaattcaatgccatcactggtagattgcacaacattacaacctataggagacaaaactacaacgtggataaagagctgcaaaaatttgtggcaacttattttgatgcagacaaagcagacatattgacttcatttgcgcaaaacaagctgacttacaatgatgcaaaagtgttggattggttgagagacagacctgatagtaataaggtagcagtagaactagaagtgatattggaagagggaatgcaactacatgccattaacaggctaaatgtgcacctaaaattggaatcattgttaaaagctgaaccagcaagtagtttaaaacaagtgaaagctagagcgttgttatggcagtgtaaaggttactgtgcaatttttagtcacattttcaaagaggcgaaagtgagactcaagcaaatgttaaaaccaaacattgtttatgctgacggattgagagcagatgagttgtccgcaagagtaagactaaccacaggtgtaaaatatttattagaaaatgacttagcacagcaagacaaacaaactgaccatgaaataattaaatttgaaatggcactgtacaaactgttaggggtgcatgacgatgttataaccttgtggcacaacagtcatttcaattggaaatacaaatccaggacagtaagaggagagggagatgccatgagattgactggtcaagcaactacagctctgggaaatgctataaccaatatgttggtgcatagacgattagttaaccggctcggacataatctaagattgtttttaattttaggagatgatggtctcatgtttaccaatacgagcatagatctcagtcgactaaacaatgagacaaagatcaaacacaatatgatgtgtaaaccacacgttagcaacacatacggagtgttttgttgcatgatcgcatgcataacacaacaaggtaattgctcactgggtccagatgtagtgcgcttacgacggcggttcgaatgccccaatggggtaagtgaaaccacatctgaaaatgcattagctagagcaatgtcatattacatgatgctgggtgcaactccagaagttatgaatgaagtaaaggttcagaatttgccaattcaaccggtcaaatggtatgacgtggatagcataaggtcagcagtcgctgagaaatataacatgagcgatgaagaggtcataaacgaagagcggcagcttttaaaaatgttaagagaaaggcagtactttaagcacgaagtgcttcactggtttgaaggaatttaa

SEQ ID NO: 1140 - DNA, 14820 bp, Cucumis melo alphaendornavirus
  source 1..14820: mol_type = other DNA
atgggtttaaacaaaaatccgtttcaaaccagttttagaaaagtgtttaaagagaataagtcattaatatttgataaaaataaaattaaattagtaccagcaatccgtggagtcaaaaaatttagagatacttgtgggtcagtggcagccaacatacgcttcgaagaccctcttgctggcgtggttaacttcgaagctatgcacccattagatatagctagaatctattacaacgtgataagtggagggtgtgaaatatggaagccaccacataaaccaatttccgactatttaaaccataccaaacatgaaggaatagacgacgaagaagatgaagaagaaatgttcttagacagcaataacctagataataatctaatagtgcgaatcgtgggtcctggacgtggaaattgcacttccgagatgttagaggttttaaacaaacttgtggctaaatttggagaatatgaggcttattataacgtttatttagaaactcaacatagacatttcggatacctacagaaagaagacaatgggaagtactccttcatcaatgcaaaattcaatccactcaagaagtgctcagtgtgtaagtacatgaaccattatgaggagatgataaggggtcttaggatggtccattacagtttaaaacattacagaccaaaatcgaaggtagtgactgatgaattcttaaccacatataatgtgggagatgtaatagaggatgtcccttggcgttgtggatactgtttttcagatttaaatttgcaagtgtttatgcgagaggatagattacaagaattaatccagattgtcactcagcatttgtttgtgcttatgggagacatagagcaacttctaaagatgggttatggagacctatatgatgatatggacgtggctagcaaagaaaaattaaaatcagctgatcaagtgatcgttaacgagtatttttaccatttgcaacgcaaaataataccagtggggcgcgattttgatgctgcacagagtaagactattacagaagtattgggtggttgtttctttaagccacaaagcaaattaaatagtgtgaaacccgaatttatagctgaactatcaactttaactgaactaattgaaaaatcgtgtgccagcaaacaagttgctagtgtggggcaaatattaccaggtagttcgaaggaaaatgtgcaccattggatgcatgattctacttggtacagtccagatccggcagtgttctgttgcagtgaaaaagtgtgtggacacaaacacaattatattgtatacgccggtccaggaatttacaatcgaagtttgtcaaatattttagcattggtggatgaacaacgaactttacaaatcattacacccattaaaaccaaccagaacactttggcggatggaacaggagcatatcagcgtaccaatgagcacttaaatttatatttagatggaaatcccacgcctttaaaacttaaattagacacatacacaatcataaacaactatcaaattattaaattagatgacaaattatattatataatggaaacccagaaattgaaattaacagaaatcatgactatagtcggacctttctctgaccaagttacttacccacaaaaattaattaaagatgataagggtgtcaaattacgcatgtacctaccgaacattgatagttttatgggagacttccgaggtttgaattatgaagagcaagagtttgaattgaacgtatcattgttcagatatttatgtttgcgtaacacatcaggaaaggtaagtcatgacacattgcgctcttacgctgtaggctactcactacgacgatttgtagtacacagcaaagtagtatcaaaccccaccattgtgtatcaggacatcgacatacatgtaattctcagcagggtctgtatgatgaagttgaggaattgttatgacataagttatggctactcccaatttgcaaagaagctaggtccattcaggagttggctaggtgatgtggagagtgctatgacctcttcgtttttaggcttaatcaacaaattggtaacagatgccctgggattagattggaacgtagttcttaactttattgatgacattagattacaaaccttaattgatggtatttcgtcaaccaacttttgggaaaaattattagctatggcagaaaatattaacacagaagatgtcaaagtagtggatcttgaccaaggagttgatgtgtttcttggaccaaatataggttcttgtgaccatcacaaagaaacttgtgaacatgtaggacacactggaaataatcgctgtctgtgttgtaacatgcctataactgagtttgaattttgtgattgttgtacccctaataagaaagaagcaggtaatttctttgatgtggaagaagccatcaaaaatgagtctaaggctgaaactgagttaaagaagacaaatcctgcacgtaaagatgtgctaagtcagttagttaacgaaatagaaaaattggtgtccacaaaagaagcatccaagaacggtgttgagaaatcaagtcattggaagcaaacgtttaaaaatgtggcagaaggaatcaagcagggcgtaagtaatcaaattaacagagcaattgagtcaagcgtcccatcagttgaaggtgccaagcaaacacaaacggaaaatgctgaagaggttaagtctactcaaaccgacgggcctccaaaaaccgaagaaattcctacctcatctgaggggtggaaacgtgtcacaaggcggaaatataatgacccccaggatatgtcagatcgaatggtggttgagactctagataagttgcaacctttgacagtcagttcggacagcgctgaggcaattcagattttaggctacgactttgtcagacattgtctaaatccaatggagtacgagaatatactgaacgatggcacaaaaactatgtacacaatgcctcatttgcccatgggagaaaccgtatcacagaatagggtatttgaggtaaccacaaagatagtgatccccaactctgatgccatgacgtgtgcttatgatgcgtataaatacggatacgccacagcaagtttagaagaaatgattgcaataaatgaaggaccaccacccctatccacgacagttcttactgtttatgccaaagctagaaaagaaaatttaatcatcataggcagtactggtactttacaaatttcgaggaatagcttgacgtcaaataattaccattgtatttggtttgacgaaccagaattaggtggtgtagggcacttcatgcctgcaattatacggcgatcatctggtgatccattttattttgctcacacattgcctggtagtttagatgaaaggaatcagctaatgaaattgcattacggaccagggacttcaatgcttacattaccagagtcctttaacgggaaagaaaatctgttaatggaattgactttttacaacttacacacttacatgtctaacaacacttctaccagtttgttaacgatagagaagaaagacggtagagtgtttttaaccaataacaaagattcaaaagtgcatgctacaaatagagaaaaaattcatatagagataccatcacacttatgtaaatttgcagataaattgcaactagcattacaattcaagttaacagccgaggatgtaccggaaatgagacatataagtgatgaactccctaataattatgaacacgaaattgaagaagaagttaatgagatattgcgcagttttattagggtgtcaaatgttcaatccggtttagatgccaaagacatcaaattcccttataaaggaaaattaaccagttggtatggtaggagtaaattcttactactaggcggagaaacacacaaaatgaagagatatgatgtccttgccttgaaggtagatcggaaaatagaactagtgtacgttctgggaactgaagggaacagtgtcattttagacaaaccagtaataaccagccaagaagtcacagtttatgagttgaaagaatccattggtagcaagatcaggttattggtcggcttatgtcaaccccacatatcaattcaaagtttaaagaacaaactaagtattgcaaagtacataactgggccagcaggctacggtaagtcaaccatgatagcacaacaagcaaaagctggagacttgtgtgtggcaatgacctcaacgtccgtacaagcactgagactaaaatgtaagaaggatgtaagtgttttaagtatggaaagggccatttacgatcactgtaaaactaatggtaccttgttcatagatgaagcaacaatggccaattggttacacttaggttatttgtgtggtgaggacgcacaaataatgttatacggtgcggacaatcaaataggaaagaaagatatgagtgccactccaggagtaagatataatgtaaccgtaaaggatttcttgaaaaaggagaacattaccaaagaatatcattcttataggatcggtgaaccaatggttaatttgctacaacctatagaaccaggaatgactagtaaggccgaccacaagaccacctacaacataacaaccttagatgacactgagttcgaaaatattaaaacaatagtaacaagggctaatccagatgtgattataactccctattcacataacagaaataagattaaagcactactggggtcactagacgtaaaagtcgtgacaacgcactcattccaaggtatggaggtgaacacagcacttgttgtgttgagggaggacatcaataggtcaagggaattgaacggcaatccagagtatctaaactcagctttgactagagcaaaattccacactgatatagtagtttatggacagtacggcacaataaccgacttgcaccctctgttgaggagagtaggtggaatgccaaatctgaagaaattaatagccccttcaagtagtaaaataccaatgaaagataaaggaattattatagatcctgacactggacttccattggaagtcaatataagaaatatgcacaatctaactcaaaatatggttgacaaattaaatgaccttagcatatctaatagtggggtgacgttgaattacgagaaactggctgatggaactagagttgtggctaaactcggaaacagtacagttagtactgtaactaacaaaaatggagtgatagatgtgcaggcaaacagtttcattaaaaataagataatgaataacctggacactaacataactattccagttcaaaaggagaaaattgatccgaactacaatgtgatagaattgataaatgtgagttttagacaaactaacaaattaagagaattagcttggatggtggataaaggtgtcggaaaaaccatggagatcactctgggaggagaacggataaaagtcactaaagatagtggctgtccattattctctggtgcaacatttgagtgtaaagatgaaaaattaaaaatatccaatggatggcagagctggacaaagagaaaattatattttaacaagaacatagaatatgttaggttaagtcctattataaattggttagaactaagtcatagtgaattaagacaccataagttaaaatcaattggttggttagatgtgatgaagggcgatactgtacacactttgtggcaattccaggaaaggttgacacaaatacacttatggttattaaatttcctaacagccaatgcaaaccccaaatgttactttaacaacgtcaagaacgtctccaggtacaataagttggcccggtcactgggattaccccctgtctctcaccatcaatcagtggtatatcatgaaaatttcatagttaacacaaaatttggttggtggcgacaaaataagtacaccttaggtaacggagatgaaatagtagcagaagtcagcagccgagataatgaagtagtgtggagagtatttgcaatggaatgtttagcagatatgagacatacttaccctaaatgtcagggaatatcagggactgattttgatatacctggattacatgttccactacataagcatatggcgaaaaacacggctatccatcaattagtctgtaccaacttagcaaagatcaaagagcaaattcaaccacacacccatgacattgtcagaatggataagagaggaatggctctagttaaaaattacctgaatcagaaatacccaaagatgacacttacaactggaagttatgaattaccaaactccccaatcgaaatcgctttggaacaattaatgatcaacatggtaggcagtcttgttaagaatagtgtgaatttagtagcttatgccggttatgtcccattagctgtagctatactagggaagtactacattaagatggccataccccccttggatgagtacggcaggttttattacgatatgagcaagccacaacttgattctatgttggatcatttcaactccaccagaaccaagaaagttgagtggtacattggaacggaaacccgattggaaagattattgttaggtactagactttcttgtatgacccctcgaaaaattgatgaagctctaaaccagaccaaaaatgtttatggttggttaccaatgttccgaaaaagtacagataactataattatgaccacaaaaacagtctgttaagctttaaacatggtaaattgtctaatcctttgaatccagaattattcaattgtgggttaaatggcaaacctatttttgtcaattccaaagaaaactattatctcgaaatgtcaacactcactgaaacgttcgatcatagactagtacaaattaccaaaagacaaataccaatagagaggtacattgataggagaataggtagttattccgaaatgaacaacataattaaaatcaaagtaccatggatagatctagatttgcttagaattatgtctgataggcagattttaacaatcaaggaattggtgataaacaagaaattattgaggaatattctcttacgattaatgactggcgaagatagtcatgacgatgcattaaactacgctagaactttggaatcaactcaagtgatcaccgacaaaggaatagatgatttgagtacgacaaacctggttgtaactttaaataccacatggtatgccatatacatccacaatgattacttacgtaaattccaaagtttgatatatgcagtcaatagcacgcaaggtcgaccattagctgtaggattactagagcaattaatctctggatttagtaagttgttaggcaaggtgagtgtggtggctcaagacatatgcgagaaatacttgacgaaattgaattccgcaatcaatctcaccaataagatggcagattgtatcgaggaagcaaagaaaactaactgggcccctgaaatgagaaatgtatacttcaatagattttacttccatgacgatgatttaggtgatataaacgcatggttcaagccaggagatgacgatgatgataactttgatgatgatagaaacttagagagacaaatgatggaagatgaaaatgactatttcgatccacaagtggaaagtaatattgggcgataccgcagtattttagataagggcaaatccccacccacttccaattacgaagaaccaatgaatgcatctacatctaaaaatcaacaatgtaccaaaccgtcaagtgaccagcaaacagatgacgatgaaacagattttgaagatgctttgagctctcatgaagattctaatgagctaatagaacgcacaccaaccaacgaacagatcacaaatgaagacgtgacttttataatctctagcgataataccctttatctagagcagaaattcgaggatttgatgtgtaggaaaaagattttgcgctacttagaacaattgtgtcaatacaaacaaatgacacaagaagaagtgaagaaatcattagacatactgcatgcagaactaaataaaaacaaagaatttaattttgatgattatacagtcttagtaaatgccggactctgtcaacaagatgactttgcatcaccaaaatacaatgttacaccattgaataaaattgaaattccaaccatatcaaagtggggtgtcaaacccattaaatatgtgcgaaacaattatcatatgatacccaaagttatatggacttactggcattcaaatgtaaccagtcgtgtaatcaagaaatgtatggattcaatacaacaccataatcctaactatgaagttatagtaattacggataagaatattcaagtttacctgaccattgacaacatccctgtacccacatctagaaacttagaagcgaaatccgattggattaggttaaacttattgttgaaatacggtggaatatgggttgatgctagtagtatcggaatatcaagttttgatgattgtttgcaagaagcaattgattcaccaacaggagttttacaggtgagtctcagctctaaggaagagcctgtgaaagtgtacgagaattggtttgtagtagcaccacctcataatccattgattaaggaatggttacgattgttcgaagaggtactagctagaaatgtcgtcgatttgtctacattggatgcttatttagaggataagttcgttgaatacagtgcagtcaaagtcaagttaggggacagtaagaggttctacctgaaatgttatttgactgaaacgttagtgagtagggaaacaggtatgaaaccagtcgctgtgatagcggatgatcgtagagttgatgttcatcacgacgttaaatgggaagattggaataaaattgctctgatgtactgtctcaagcatgatggaaaaatgaaagttcccatagtaaaaattatcgatatacatagaagaaatttagaatattacctaaatgtgggtggagctgtggagcctgaatcttggctaggacaagccaataataccgcaaacttagttggagtaatcacggatcctgaactaccctccaaaataatagaattgataaactcacattatgtaaggatgtgtatagataataaaattctagctcataaaaagagtagtgtaaacaaaatacacaaacaaatcataaaaattttaggagataaagttgatgtcaagattactgatagtttaagcaagataggcaatgttttgtttgagctgggtttactacttatactcaacaaatatgaattgcaagatctaataagtaaaataggggaattagaagatgtcaatcaaatgaacgaaatcaaaattgtggattttgtagaacaaacactcaatattaaatcaagatacaggtacaagttggtaactagtaatttagttcagataaatcgatccaataagtacccctcgaaaccaaagtacgctgaaagaaatggaatcaaaataccattaatcatatggtcatattgggatgacacaacagtcaatcaatttcaagttgatatgatagacaattggcattaccacaatcaagagtatagaattgtgattattaacaagaattctttgtcaagaatgttgagtaaatccacttatgaactaataatgggtcaaactccccagtacagatctgattgggtacggttatttgtactgcaacaaataggaggagtctgggtggatagtactgggatcttccaagattctgttcatccgttagtcttggaaacattgacacatgaatcaggaatgtatcaagtcagcatacaaccaagaacaacttcaccacgttattatgatagctggttcatcatagccaccgaaaataacaaattaatgaaacaatggttcgataatttacatgagatgaccaaacacgttcatccaagtggaagcaacgcactcagttggttagaacaaaatttcggtgagtattataatgctagtaagcatttgatagttccaaatctcagggtgtatttaagggtgtgcttgatcggggtaataacttgtatgcagttagaaaccgagcctttaagcatctgtgaagacgagggtgaagtgagtatgtttcataaattaccaagaaacaagtggctaaacttctggaaacttttgacggaagaaccagctgaacagtgtaaggtgacattcccatttattaaatggataggtatgcaacgtagtattatatttaggaacttcaacccagcaataaagcccaggccaggcagtttactcgatcaacaaatgtacaaaatcgaaatcaattacgatgtaactaaagcgggtgagatggtcattcctaataaacatagtgaagcgttagtggcaaaacctatagtaatcagtcaatatagacaggcaagtacgttgataatgtgtataggtagtgggggagacatattgcaattcatagccctttatgacatattggaatcaatcggaatgccaccagtcatcattacccatgcagatcatgagaagagtttaggcaataggcgaaaacatttattaagtatcaccgctgaatcaataatggagaccgtagatacaaagttgacaaaaatagatttgagttctgatattaggagtatgcgacaaatgaaaactatggttaaagaactagaagaaatcgcatttaattacgctcatttctctaagttcataatcattaacagtgctgtttccaaattgaaatgtttttctgaagtagctgagtttaaaattatagaaatatcaaccttcccagtagattgggtgttcggagacaatactagtgataaaggacacagtgcagggattaggcttaaaagatggatcttcaatatgatgagtgacaggaagaaaatacacaattttgagagtcggtactcttattacaactcttgtagtaaattgttgtatccagaaggtgataaattcattggacccttaactctgtggggttataaaagtacggcagattacataacactttcgaatagagacatattggtgacatttggtagttgtgataagacaatctcagtagatcacaaattgagtttgatggataatttgattacaatgggacatagtataatttatcatgacccttaccgtttatgctcaattggtactagaatgtgtgatgaagtacacaaaaggcaaggtaaaatcatcgtaattgagtctttcgatttacggaaggtaattggatcagaattgatcatgcttactcacggtggccacggaaccgtcatggaaggtttaatggctggattcaaattggtgatacatccgataatcgctgatcaatttcaatgggcaaaaaggttaagagatttaaaattggcgtcaatcatatatgatattagcaacagagaacaatgtgaggtagcattgattgaagtgaatagacatattaagtacagcgaggtattagggtctgtccaaagtattgacacattaaaattcctaaggacaatcaatccaaaggcattgttttatgacccgtcagtaagtctacgagcattgcgaggtgaaggtatactagatcaacaagtaacgtataagaaaggtatctacagaattcgaaatgtcgctttctctattaaatacaaccctgtagttgtggataaatgtgtgtatgaaagcaccatacaccagttaacacccgaaggagaacttgaatttagtatgctcagggtattaagtagtaacaaattaaaagaatctgcggtcaccgagcgggatttgattgatggggtgctcagcatgggattgaacattgtcattatttacaataatggaagtggagttgtacacaatgtatttaattctaagtgtttaacttatcacatagatagaagttgtctaccatggcatgttagtgttccagaggtgatgagctatcaagagggagaagtaatgaacatgttagcaacaccagtacgggagttgccagatgacgttataaccgagagagacaactggagaagtgatttctctgtgatagaattaactaacccgcgagtgttatgtttgaaccaagggaaaaagaaaatagacaatttgactgcccgattacgcggatttatgctgaacgaactagggtccagggcagaaatacattgttgtagattagaactacgtagacacgggtacgttcatgtgggggattatgcagccccagatcagccgttatccgtcggatgtatcacatccgatcaaggttggatgttagttacgtggcaagttaagaataaccagatgattatatatggagaacaagggatatatacgtactccgtattggtaaatctgcacatacaagtagggatcccgaaggccccaaaagcaatcttgagcaagtcaatagagttaatgagcttaaacaagactacaaagcagcacaccattatcaataatctaaatccgaggagcagtcaaatagtgagtagttacatgcaaaaatatcgtttgattgtgagtgattatgacaatagggatcatcacatgtatgatgaaatgactcttttaaagagagcatctgagataatattccatagcaatagaaaagttacgttggatgatttcgtagaaagtcacggagctgcttacaacagattaactttgaagcaaggaatggcaatctttgagcattattttgaagataaagatataggtgccctggttgtaggtgcacacaatcgatatgacagagataaaggtggatttgaaacagctaataggttagatgacgaaacgattgcatttatccaacattacttttacaatctaaacggcaaattaatagctagggacacttgggaaattaatggagttgaaatactgagcaacgaagagattttaccgcacaccaatagtgctatcatgttcacattatcagaaaaagaaaatttacgcacagttattaagagacaccctcattgggaagtagcacgtttaactctagctgagttaaagaaaaacccaattatccacgtgcaaaccaccgacaatggatgcataattctgcagaactacttaatcatactccgaccaccgaagttgggaggagatagcgagctcgaacgacagtggtggagaataacacacagaaagactgagtcacttccaacacctggtaattggtgggggatgaaggtcaaagaatctaataaaacgaaaagcaacttcaatgatgtgatggcaataaatgaactacactatcatgagccaacaacactaagtatagctttatctgacgacgttgagtatcaaccaccaatggacatatacattgctccgtacgaatcagtgtaccctgggagtatattagaaccactaacagatttgcctgacaccatcgccatgcaattgtgggaagataatgatttaactaactggttgaatttatacgccccacttaataattgtattatcaaatctagagagctaccaggaaagataattaaatcggaaaaattgacaatggtaaagtacccgatccgatctagagccgtattgacgaaagtgtgtttcgaagaagggagaagtatcattggaagaatgaaatcagtggccatgatacgtacaaaaacacccaacccttatagattaacactagacattgcagatacgtactttcgaccagactggcaacagatgatcaacaattacagacaagaattattaatcatcagacccaaagatgtgaagaaatggattgaagagaataaagattgcgagaaaattgaacgagagttaattgacctattgtgtggagaattgatatcgaaaccaatcaatgatgttaatgtacatcttaaattagagagtttgctaaaagaaaattttacaataatgaccatgcaacaacaagcaagaatcatcgtttggcagagaaaagccgtttgtgctatctactcaaacctctttgtagaagttaaacgtagattgaaagaagtgttgcacagaaaaattgtatatgcagatggactacgaccagatgaaatatcagccagggtaaggctagtcaagaatgtagctggattctttgaaaatgatttaactaaacaagatagacaaactgataaacctattattgaagtagaattgatgatatatgatttattgggagttcatccaaacgtaatagcatcttggaaagaaatgcatgaggtgtggagatttaagtcaaatttgtactggggtcaaggagaaggtatgcggttgactggacaggcaacgactgcacttggcaattgtttgaccaatcttcaagtacaccaaaactttacaaagacaaatttctgtatattgcaactagggttatttttaggggatgatatgtgtatggtgttcagtgagaagccagatacgtcaaatctcagaaaagatattgcaaccagcttcaacatgcaaagcaaagattcttgggtgataaatggagctactttttgcagtatggtaatgactagaactaactttggagccgaattagcaccagacgttgtgagacttaagttcagatatgaagtaccaaatggagtgcatgaggctacaccaaccaatgtactaatgagaaaagcttcgtatctaatgatgttgggtaaaggtcctaacgttgacgatacggttaggatgttaaacttacctatcaaaccaatagcatggtacaatttcgatcacatggtgaccgctgtggctcataagtataatatgaacgaggagcaggttagaggttattatgatcaattgttagccacaatcagaagtgacaacatttattcacatgtatttagacatttctctaataaatag

SEQ ID NO: 1141 - DNA, 11859 bp, Erysiphe cichoracearum alphaendornavirus
  source 1..11859: mol_type = other DNA
atgacgccccgccagtctcagaagtcacgacaaagaaatacaacaatacatagcggacgtcgccgtaatggcggcgcccgcaatgaaattaaattaaagaccctcatgctgtttcaacacggcgtgcaagggtctcatgatataccacccatcacgatgaaacaaacgttgaagggtgataatcaatatattgacacgtacttagcagattgcaatgacgtcgtcaataccaaaagactgggtatttccggtgttatcaacatataccactcgaaagctacttatccagtatgtgaaccttatagtagcatgacatttaatggcaacactagtcacgtccgtgacggcaagtattacattgatgattaccatggggaagtgcaagatttgtgtagtttcgaaaaatatcgcgcagatttgctacgagatatacgaagcagcaagaaaactcatggcaccaaaaagaaaatggagctgatcaattggctaacagataagtccactgctttcccatatggcaacatggctcaaaaacgtgatggatttttagagttgttagatggttactacattaaatgcgcacactgtgattgtttgacgtacctaccattatccacacttataaacccaaatgttactaaagcccaattaacgcaattcctgcgtgatttctccactcaaaaagctgaattcttcccagatgcagaaatctacggcgagttggctatgatggtgcccatgtgtttctcatcatcatcgggttcttgtttcaattgtgatgaggatttgttcagtgaaacaataaatatgatgcatgcaatttatactgaatcaatcgcgtaccacaatactattcgaggcacccatatagaagagatgacaaaactgaatatgctgcagggtgcgccacccgatgatatgccagttgcaacagctaaatacaacgaacttcacaaccggcatgctgccaaagcattggcgaagatgaatatcaatcacatcaataccatttactctttgaatgactccacacgcctagaaatgatgcacgccagagcacacactagaataactaacactgccaggatgaacactaccccaatgtcaatactagagagtgaggaaattttattggtaagcgacctagcaagtgccactgctggcaacctagttcatcaccccaccaccatcacaactaatgcatccttgcgtgatatagttgacaccgtttgcaatggtccatattttgcagacacaggtgtcactattgacataccgactgctgcagctgattacctagaaattataccagcgcagcacgatatggacaaaatgctcaattacgctgctagtggtgcatacgttatgctaattcgcccggatgtgcacaacgtgatagtcaagcaagattccaagtactactataccctagcaacaggtactgatgtaccagtaaaatgggacatcagaacacacgcattactcagcaattgcgctaagctacacgatggtcaaaaccactacaatatacatactatcagtcatggtgcgtatctgcaaattattaaattggagttatccgactcaagtatgcatgctcgcacgctaggtaatcaacccacattcaccgcttccattccagttttcgaccctcttaatccacttgcatcgctcggagtgtttggtacgaaatgggaatatagacaaataaacgtagagctactgcgtagattagtcacattcgcgctgacagcggacaaatctccaggggcgattgaggcatactacgcaggtatactcagcacccattacaccataggcggtaaagtggtagatctaagtaacacaccggtgtctgaaggtgtgcctgaaataatatatgctatgatgatactcagcaatcgcaagctggttaccatgtgggctagtatactacatttgaataattattccagtgtgaatggcctaaagacaatcaccaacttcttcctgagcagattaatccgcgtcgcagtccagcttgccgacaaggtattgccgtggttcgaaggagttctttccaagccaagtgaattcgctaaaaggttagtcaacacggaagagcgtatagacgtcgaaagtgtattcgcaaaacttctaccactattgatcattacgtcagtaaatgatactcaaaacccagccaaaccagccatttcagtatcagagagtgctgtctgccaccatcacacatcagaatgtaatcatcaagttggtgatgttagatgtatatgttgtggagtcctcaatatgaattcaatatgcgaatgctgtgctaagcacaccaagtgcaggcattcctgtaaccacgcgtgtactaataaactacacatctgtaaaaaatgtgccaatggcgagcgatgtgtcatgcgcgcacgatgcccgtgctgcaatgtgtatggttgtattccgtgccccatctgcccgcaattggagaagtttgaagtgtccgacgttcaacccacaaccgccatgtcacttgttaccaaagttgcacatcgcaccatgaaggtacccgaatcacacagaagaccagtacaaaccacaccagccatatctaggcccaacttaggtaatgatgcattgataaacttggcaaagtcacaagccgtgttcaagccaagtgacaccaaacacatgttgcacactgactacatgaatattaacaaacctaatcacttgtttgtcattgaccactctgatttgtacattcctatgctaagtttcactgggcaatactacgtgcccatcaatttacctacaccagtggtgtccaatccaatacctggcacacattactgcgcgtatgcatgcatagcagaccaaactaataacactattgaatcgctcaaaaatatgcatggggatagacacagtatggatgcgcaagaactgcgacacttaattaaactacttggactcaactgcctacttctgttgaatagtaggactgctgaaatattgcggtatgggcctcaggcatcgaagtacctcctcattgcacatggttccatcacagcagaggtaccacataatcattggttcgtaccacacatacctgaatttgtagacatgccaactggttactatggcccacataatttgggtcaaccgtttgaagatatgtcacaattgaacatgtggaaggcatctacgctggaaatgggtcgtatcaacaagaaaatatccgttatgcgccggcaattacagcataacaaacctggcgccacattagaattgcccagagtaacgttgataggcaatagctactatctgactaacggtaagacccacgagccacggattggcaatatacactttatgcttcccccaatgttcgatgaggagttagtggaggcagttaatggctccagctcgaagttagtcaaatcattatatgccaatcagaccaatgaatgggaacaagtagaaacagatgcaataaacttgctcaaactaaagtgctgtgatataaacaatttccttaccagtataaatgatgttgaagaccagaataagtgcactaggcatgtgattgattcagatgaaccgttcgtgcctacgcatgtactaggtaaactgaaaccactagacgtggtgcgcatcgtgcaaggtagtcagagcacgacgattatcgtcgctggtgaagccgcacaaccggtagtgtgcaatccatacggtgccggtgccatgttgtaccagttcaaagttagtctttcatcattgtatcgctctttaataatggtcacgaaggctatttccaatttggataatgtaaagaccatgaagtttggtcgcgtggttgatggtgtggctggttctggtaaatccacactcatcaagtcatttcccaatcgggaaaaaaccacgctagtttgcaaaacaaggtctgcaatggaaagtcacattgatagtggtttccactcgcgcatgaccatggaagcagcagggctttcagaaatcatcactagcaccctcgtcattgacgaagcgtctatgataaccaacgttgaactattgtcctgtctggacagcccacacatgcaagttcacatgttaggtgacagttatcaaatcggtgtgaaagacatgtccagtgtgttaggctcacgcgacgagaatagcctgttggcgcaactaaaaaacgaagctctcacgcacacctatcgattcggccaaccgcttgtggatactatgctgaagcagtttgtgcctaacattacctgccagcccgacgtcacaactaaattaactcacctgacagcagacaattatgacaaagtgctgcaatactgttcagatcacaacgtcaatgcagtgtacgtatttatgcacgccgattacttgcaactcatgcacttggttggtgataaactttcaatcaataaagtacatgcatcacaaggtaaagagtttgatacagttttggtgctacattggggtaatttctcacaagaaacttcaattgtgagatcatctaaattcatttttaccgcagctacccgtgctcgtaaacaccttatttgggtaacacctcccgccgtaaaaatatctctgagcagcatattagacatagcctacattggtagcggctacgccgatgtatcagtgttcgacgtggatagatgcgccctaacacgcaatttgaccaaactggaaatggagctactcggagagatgttacccaaccacccaactgcaaaagagtcgaacagcaaattcgttattaaaccacattgtatcaacgttaccgcgctaggcccacccatactcaataaacggccaacagtatcattcgtggtagataaatcaggcacttatggtacaaataccgtggcacgcatgggcatagaaaagatcaagtccggaatacggaagcatttcccctctagcttcgctaagttacaagctgaaatacaatcgattgagaaccctgttgacatcacaacgcccactgaaacgagcgaaatgtttagcaagatgaccctatcaccaaatgatgctccaagttcagacacaacagacatagaacacctaaaacccaagacatcttttacacaattacgagagcccactatactaagtaatggtagtgaaacatcatcttctgaagattcgttgaaccaattggcggcagaagaacgcaccagccacacaaacccatcgcttttaacagctcaattaaattacatggtgtcaaacttgaaccacaaagccaaagaacaagctgggcaggtccttggcaatgtattggtcgacactgatgatcaccacacaactgcaccgtatatcaacgatagattctcatttggtacgccaacacctattgtggttaaacaaatacatttaaacagcgaattgtggtccagaatgattgtgctagcggatgtggtgcttgcctaccaatgcacgaatgcagcaatcacttggaaagttgacaactcgattttcaaactatccatacacaatggttgctcactgtactgcgggtttaaattcgagttcgaaacagaaacggtcctcattagttcagctcatgccgacgatagtcgagatggagcactcactacgttgaacgcctgcaaccgtcatattgttggtactacaaccgcaatagttaaagtactttcattcttctctgacaactctatctttgggcctgtgtccagaaatgtatgcatgaagacatacagagagaggttgagtaacatatttactgctgtgatctcaaattgcacttttgactcagttggtgaacgattcggcaatagaaatgaggagattgctcaatcatgtattgattactctgacagttggtgcgtacctacgcaccagagcatgacgcacttcatagtgaattcagatactggcgttactctccaacctgctaatataacagttaccggtgtgcatgcattaatcaggatgttctcaggtatacgcggtgaggatgcagtgttcacactcaatcgtgccaacaaagcgacgctggatcgcacactgatacggcacatgaatgcagaagaaaaatttgataggccggtaagcatacccacgcaattaatgcgcagtgagttatgggccccgttcctgcaacaagtcggttcaaatgtgatcacaccggttgccctaggagtaactagcatatccacaatacatggtgcaatgttacttggtggtgccatgctaaaacaaatgttcggtactgacactatgcattatgttggtttaaatgcacaacttttcacaatcaactataacattggtgacactattgagaaagtaccaggggatggcatgatttacatcaaaaatatgttgaaagctaaggttaagagttacacacagcaactagaggtagaatctgacccaagcaaaaaagaacaactgctatcagatataaatttcctgggtgatataaataatgtcttacgcagcaccattcgtggcgttgtgatctgccatccgccatactatgatgcatatgctggtgataattgttacacatgttatccacacacaacatatccgacttgcttgctagtgaaaggcaacttaatagaatcttccgaagatggtactaaattttcagtggatatatcccacaccgtaatcatgggtgtagtcggttcctattatttacacaagaaagtgaccaatttaccaagtctaacagtgcaagcatccgaactagccaacccaaattatagagtattcgctagtaacgttgctggcatggaaacggttaaaatcccagacgccatctttagaaggatggttgctagggcattcgcagagcgtgatacgacgctaccggacatggttgcatatagcaggtcactattgaacaccatgacgtacacttccaagggttattcattcagatacaatgacaatccgctggaacttttgcagtacagtgttgtagttttgaatttcgcaaataggcagcgtaagttaacctcgttcgttggtgccgtattaggtgcatcagctgatgataatagtaataacatcgctagtccaataatcactctattaacggaagcacttaagaccatcggtttacaggtggctcaaggtgtgttcgagcaaccacttgccatactccacgagatgttgacaagaggtacaattaatacacccatagtgtccgatgtgtttgctgtgctccgcgacgccaattaccaagagatattcccaagtgttaggttgattcaacggcatcacactgacacagagtccactatggtggttagtccgcagcacccaggcatggtgacgcaagaggaagtggatgaggtgattggtgaaatgccgaccagtgccacgctaccctccggcttgtctcaattagtgcaacccgttgtgtccaaattcaagaaggacgtggcgcaagtaactacccaaagtcaagtagagattatacgtaacacgagcaataaactgatcaacacttggtatgacatgcgagacgcgtggaataaatacgtcaagaacgatgacaaattccagccatgggaatttgatgcaccaattggtgatgttctattgttatacgcaggtagtcgtggtgacgcacaaccactagataccatagccgagattgcagtgaagtgtggcttgagcgttaaagcactaatcccggcagatttacattcccgcatacccggggtcacttacgtagaatactgttcatcttatgatcacctaaccaatagtggagtaaatggcacactacctgatgtgggtgagttcgctaaacatgcgatggatgtgtatcaacattggctaattgagcacatgaaacaccgtatagttattggtctattcttttctagtgaagctaaccttgtgcacggtacagaaaagaatatcagaataattccgcaactggatgatgagtgggacggcaacaagaaatgtgcgcatggtatgggcagcaatagcatcagggctctgttccaattaccacaacctaaattgacatcgtactgggcggtgccgtttgatgtattagatcgtgcagacaacttaggtttccttataccacagtatagcttaagcatcgataacaatactgatatggcattgcgattcagtaagaagcacaatggtaaggttcgcgtgatcactcttggttcaatgctaccgtccgattttgctgtgagaatagacaacatgctgcgtgcctcagaattaccacccatatttgtcactggcaagatcagtactgcgcagggcacgttctcgtacaaagacatttcctacgaattttcagcccagggcatgtatgaggatatatgcatagttaagagtgtgaactacctggctttaacaggccacgtgcaggagtgccacaaccactgtggcgctggcacttatctcacctttaagatgatgggagtgcgacaagttccctggccggtcgcatttgaccaacattataacgcatactattgtaatgaaactgacgtaaagtccaatggcgcgaagccatccctcagtgtggaagaacaaataaataagagtgccagaaacgtccaagtgatgctaggcgtaaaaggtgcagtgcaaaactatgagttacggttgttgcatcaagttggggagatggtgacaattcccactaggattgattccagtataataatgcaggaagtcataacctccggattaaaaccaattaaaaacaactatatagacaattgcgttctaaatgtggtgttagattgtctagaacggcacccaataatcagccgacaggctgagaatttgtatcgtactcaaacattcatcactgtcagcgacgttatggaatttctaatacagttacctgtatcatacctaatttgccatggtggtacggccataatgtgtaaacgccagagtgacgcacatgtccgcatttacgtcacggaagatatgagccacgcagaggaatttacgtacactggcgtggtgaacgcggccccagttgtggatgatgtataccaggatttgattgttaatggtaatttcgaagacgacattaaaattgcaacccggttgctagaaggtgtgccacaacctagtgtgcaacaaataatcaatcacttagcacaaaccagcatgcgtaaattacacccagttgagattttcaaaggtacgacagcggttggacactttcagaccactgtgcgattaagtgctggttactcctacgcatgcttcacctccgatggggtggtaatggcgttatgtgtacccagtgtgtctggtaatcccatcttgctacacatgcacgatagacagtaccaatgcgctgtggtaatgagaatgaacaaattgattaatatacaagtgggcgtctcacgcagtctgataagatcaaccacccttgtagcaatcaaccactctaccgccactaaattaaagtgcagaggaatatatgtgtcatctgttggccaaaccaatgcagatacactatacatatatgacacttgggcacggaaacaccatctagaacctgagcaggacgtgatcaggagtgcgaaacgaataatgggcgtaccagaggaggataaagcgatgttgtttgatctaactaccaagcggtcactactgttacataatgattatcccgtttgtattgcaaaaggcaagttatacttccgattagaacacggttgtgagcagagtgcagctatcatttcccgcattcgtgctgtcagcaaagtcagcgataacctggccatactgccttattcacaggaaaaggtgccaatggtaatgattgtctttaagtacgatggcactaaagtcacatatagtaacaccagcgatgttagcccacccagtaccttgcaagaactagtcgaccttattaaattagacacacaagtggctattaaccagttgaaaaacatggccacacaacacggttatatgacgttagaggcatgtaagattgagctggtggtgaaacccatatctctacctgacttgagtatggctgtaaggaggaaattgttgatagctgacaccgatatactgatcaatttgaatgcatggcgcttccaaatcgtgaaacaaggtgcagggttcagtaaattcgatgaacttataatcccatcactagacgacaacaaattcaatagtggaagatatgtggtgcaaaatgaaactgaatcgacaactataacaaataatatgccagccctgctaccattggatttctcgcaggctgacgtaaatttcgtcgcacggcaacaactgtcgtatcatgccaaagagaatcaaataatttctgtagggtcagtaggttcggtaggcatggaagtcgatgccattacgcttgatgaaatcccgcaatcgcaagttatggatttctggcataacgaagagctcttggacagtaatattatcctcccaaccaacacttcgttcactgtgtcgagtagaattcacccgatacgcataaagtcaaatgcttatttactaatggaaatgtacccaatgtatgcgcgcccgtcccgcagcaaggcatttgcagaggaattgaatagtatcaccaatagacatggtgcatacacggtgtataggaaagtgaacttagatgtgaagatggaagtgcaaatgctgctggacaattatatgcgagctgactgcaaccagataatagcgcaataccagggcagccagattaattttgagccagcgaaagcccaggcatggattgataagcacaacatgccagctaaggtacgttcagatgtaattgagatgctgaactctgggtgggaacgcacgcccatcaatgcaatgtctgtgcatggtaaaacagagcagacgacaaaaatgaaaacaacacgctggtttgacgaagtcgtcacccgcagcatagtagcggcaccttatgcagtttcagccttgttcgctgatatattcctggaagccaaacagcgcttaaaagcactgctttcagataaggtattctactctgatggtagcacacccctggaattagctgcagtgatccgcagttctgaagatttcacgttctgtgttgaagatgacctaacacaacaagataggcaagttgatcaccagttaattgcggtcgaaatggaattatacaaattactaggtgtaagtggcaacgtgttagcgttttatcgcatgtgccacgaaaaatggtcatggaaggggcacggcattagtggtgtatgggatgcaatgcgcttgagtggacaagtcaccactgctctgggcaatgcaataaccaacatgattgtgcacaaccgtttcatgttgcgaaacaagtcgaagatatgcaaaatgctattcctaggtgacgacatcattttcctgatgaagcaggaggtgacggtcaccaagcacggtactgagaccaaggaattgtacaacatgcaatcaaagatagtgtctcggcgttacgtgggtggtttcatctccatggtagtttacaatattgcgggcaatgttggcatctgcccacatttcaagcggatgcggcataggttctctgtgtgcaattatacatatccagtagatgaaaccgctgacaaagtaaaatcccgtgtgctgtcatatttgtacatgataggtgattgcgcatgggcacgtgcacttgtcgaaaagatggggtactcggtgcaactgccgcagtggtatcacatggatactgcaatagtggccaattcattgtatgatgaagaggaagaatggcaaacacgttcgcatatttcggctcttcgatatatgctagagaatcaagtagtgaaacgccataagttcctcacgtggtcaagtgtttaa

SEQ ID NO: 1142 - DNA, 12084 bp, Grapevine endophyte alphaendornavirus
  source 1..12084: mol_type = other DNA
atgacgccccgccggtcaaggaagtactgtaaaagaactaaaataacacatagcggacactaccctaagggtagtgcccgcaatgaaattaaattacgatccctccacatataccaatatggtatagagggggatcatgacattcccaaacttacaatacaccatacattgaaaggcgaacatcaatacattgatacatatcttgccgatcaaaatgatgttatcaatacaagacgtctgggaatctcaggtgttatagacatatttcaccaaagaaaagaataccctgttgatcatccatatgatgagttgactttcaacggcaacaccagtcacgtgcgcgatgggttgtactacatagatgactaccacggggaaattaaaccgacgtataacttcaacacctaccgcgctgcattaatggacgacatctacaagtcaaaccatgtgcatggcactaaacgcatgcacacactagtcaattggttaactgacaagtcagttgcattcccttatggtaacatggcgcagaagcgatatggctaccttgaggctttggatggctattatataaaatgcgcgcactgcgattgcttaacatatttgccgctttcaactttactaccaccaaccattacgcgtgcgcaacttactcaattcttacgtgagtttagggatcaacgtgaatgttatatgccagatcccgagatttttggtgatatggcaatgatggtgcccatgtgtttttcaactagtaatggaaactgttttaattgtgatgaggacctttttaccgagaccgtcaaaatggcatatgccatctattcagaatcgtttgcataccataacgtgatcagaggtactcaaatagaagaaatgacaaagatgaacatgttacagggtgcgccgcctgatgacatgccggctgctttgtctaagtacaacgaattacacaaccggcatgctgccaaagcactagcgaagatgaacatcaaccacttaaacactatttacaccattaacgacatgactagaacggaaatgatgagtactcgctcgcatctccatatcacaagcactgcacgcatcaacacaacaccgatgacatcgcttgaaagtgaggaaatcttgctgattggcgatttggccagcgcaaccgtaggtaatctggtacatcaccctagcacgctggtggtgaatgcctccctgttacacatttgcgacaccatatgcaatggtccgtactttgctgatactggcatcactgtaaacgtcccaatgtcagttgaaaattacttggaggtcataccggcgcaacactcatttgacaagttgataaactgggcaattgacggtgcatacataatgttattacgtcctgacgtaagtgacatcatcgttaaacaagacgcttcgtactactacaccatagcaacaggtaccgatgtgttagtgaaatgggatgtccatgcacatgcactactggccaatagcgcaaaatactttgatggcgcgaattatttcaatatacaaaccatcacacacggtagtcatcttcagattgtcaaattagtgccagctgataacacttggcatgcccgcacactgggcaacaaacctacttttgaggcgctaataccagtattcgacccaatcaacccattggcaacgctgggcgtttttggtactaaatgggaatacaagacaatcaatattgagttattacgtaggatcgttacgtttgccttgactgcggacaagtcatcttcagcaatagaagcgtactttgctggtatactcagcacacattacaccattggtggcaaggttgtggacctaacaaacacaccaattacagaagggttaccagaattgatttatgccatgatgatactgaccaaccgcaaactagtcacaatgtggtcatcaatcctacatctcaacaacttttccagttcaaatggtctagaaactctaactaaatttttcttgagcaggctggtcaaggttagtgtgcaaattgcagataaagtactaccatggttcagcggggtactgtccaaaccaactgaattcgcaaaacggctattaagttccaaacaccccatcgacgttgatagtgtttttgcgaagttattgccattactaattatcaccaagcaatctgacaacactgagcccattgctccgccgttgcacgtactagatagtgcaatttgccaccatcactcaagtagctgtaatcattccatcggtgatgtgcgctgcgtgtgctgcggaataatgaatgccaatgcggtatgtgcatgctgcgtgcagcatgtgaaatgtcgccactcgtgccagcacaagtgcaccggtaatttgcatgcttgcaaatcatgcatgaataataagccatgcaacacaaaagcccgttgcgcgtgttgcaatgtttatggttgccagccatgcccagcatgccccatcatggagccaatgcagctacatgacgtacagccaagcagcaaaatgagcattgtcaccagattggccaacaacgctatgaaggtgcctgttgctcaccagcaaccaaaaaccataacgcctgcggtacagcggccaaaccttggccacgatgcacttatgaacgtgcccaaaggaggtgcagttttcaaaccgaatgaaactgcgcaccgcatgatgactgactacttgcaaattacaaggccagaacacattttcattattgataattcggacttgtacattccaatgctaagcttcacaggacagtactatgtgcccatacaattaccaaatccggtggtatccaacccaatacacggggagcattattgcgcatacgcctgtatcgccgagcaatccaactacaccgtgcagatgctgaagaacatgcacggtgatagacattccatggatgttgttgaattgagacacttgcttaagatactatcattgaattgcctattgatattaaatgacacacacgcagagattttaagaaacggaccacaagccaacaattacatattaattgggcatggttcaatcactgatgaggtgccgcacgcccattggttcgtgccacatattcccaaatttacggacatgcccactggatattacgggccgcacaatttcggtcagccgtttgaagactttacaaacttcaacatgtggaatgccaccaccacagagatggcaagaattcaacagcggctaaaagtgttgcgctcgcaagtaaggcacagtgacaagttaggtgatttggccttaccaaaggttagactcattaaaaatgtgttttatttgaccaatggtgacgaacacacaccacgcctgggtaagatccacctgccactacccgagttcgttgacgaggaattggttgatgcactcaatggtgtggactccaaattggttaaatcactttacgctaaccaaacaaatgagtggtcccaagtacggcaagacgctattaatatgttcaagttaaggtgttgtgatattaaccaattattagttagtgatgaagcattaatgtcaccactgcaatcatattcaaccacagttgattctgatgaaccatttgtacctgtacatttgctaaatcgggtcaaaccgctagacatagttatactgaagaaaggcactcaaacacacacttgtgtcgttgcaggtgatgcaaggcaaccctgcgtacgaaatccgtatggttcaggtgttacactttacatttgcaaaacgagtctgtcttcgttgtaccgcaatctcattatgtgtgtcaaagccatcaacaacctagataatattaggtctgtagagtttggtgatgttgtagatggtgtggccggttcaggtaaaacgaccttgctacgcaacttgaccaaccgtgacaaagcaacattggtgtgcaaaacgcggtcggctatcgaaagccactacgatagcagtttccacacattgatgaccatggaggccgcgggtatgtctcacattgtaactaacatccttgtgattgatgaagcatcaatgatcaccaatgtggagttgctatgttgcttggataatcctaacatgttagtacacatgatgggcgactccatgcaaataggtgtgaaagacatgtcaaacgtgctgggtaatcgaaaagaaaactccttgcttgcacaattggccaatacaaagttgtatcacacatatagatttggccaaccgttagtcgataagatgttaaaacagtttgtacccaacatcacatgtgagccgaatgtacacacagaattaactcaggtaacagcaagtagttatgatgaaatcgtccagctcacaaataactacaaggtggatgctgtgtatgtgtttatggatgcggactacgtacagctattggagatactcggagataaaattgcggtcaacaaagtgcatgcttcacaaggtaaagaatttgataacgtgctcgttgtacattggggcaatttccaggttgaaacgtccattgttaaatcttccaagtttttgtttactgcagcgacacgtgcccgtaaacacctaatttgggtcacaccgaaaacagtgaacataaatgtatctaaaataatggacatagcatacatcggtagtggttatgagagtcctcatttgttcgacgtgaatgagtgcaggctcttgcgccccatgactgaactagaaatgggtctgattgaaactatattgtcgaaccatccaagtgcaatcgaagcgaacagtaaattcacgattagaaaatcttccataaccgtggaagcccaagtcaagaagtggctgaccaatatcaacatatcattcactgttgacagactaggtactcacggtaacaacttggcgagccgcactgccattgactccatcaaagatggcatcagggccaacttccctgctggctttgcgcagctagagagtcgtattagtgaaatcatgtcatactctgaaacatcaagtggcatcacaagtgatgaagaaaacgctatcggaacactatacgatgctgatgccgagccagttgacactaacactcacactgtatcatatcacagttacaatatatcgattgatgagactgagcaatttgcgactccacccaggcctgacacagtgcgtgctagtgatgacagacccgtcccaatgccgctcagtggggcatctccacaaatctttgaagccgaatcagagcgtttaagaaaatacttggacgacgtggaacagcaacggttaagtgccgcgcctactattagtgcagcagcactcaagaataccgctcaagctacaaccctactgcaagaggcactgggtgatgcctcaattgcagaagcattacctacgcacatgcaacctatactaactgacgaccacaatcccacagactctgcggttgccactgtgttgactaaacagttggcgcacatggtgcgaagcttacctcgcgatacaagaggaacgcagccgacacctgttggtgctgtgttatccacagatctagcagaacccatacaacagtgtttagacacccgtgctttcgggattttatacaagttacaagtgaaacacatgcatctaactgcccagttgtggtcacgcatgataatacttgccgatatagttctatcatatcaatgcacttccacagcacttacctggaagcatcaaggacacctatttaagctgagcattttcggaggctgttccttgtactgtgggttcaaattcgagtacgatgatgataccgtattgattagttcagcacatgctgatgatacgcgtgaccacctgctcaatacactaaacacttgcaaccgacacattaccggcaccactgaagggatagtgcgcgtcatctcatttttatcagatgacactctgttcggtagcgttcccaggaacacatgcttcaaaacgtacgttgagcgcttgacgaacatttgcggcggtgtgttgactgattgctcgtttgatagtgttggtaccagattccaaactgaaaatacatccagggccataagttgtgacagttattccgattcattcatcataccgacacatcaacgtgtggagcattacatagtgacaacgtccgatggtattagattggaaccatgtaacgtaatagtacacacagctaaacaattggtgcaattattcagcggtattcgtggcacagatgcggacttcactcttagtcgtgcgaacaaggccacacttgagaaaacgatgatacggcatctcaacgccgaagaaaagtttgacagacccgtgaacatacccacccaattggtccgttcagagttatggcagactttcatgcagcaggtaggtagcaatgtcatcacgccaattgcgattggtacaacagctgtgtcgtcaattcatggcgccatgctaatgtcagcattgatgcttaggcaaatgtttgctgatgaaccgatacattacatcgggttgaacgctcaattgttttgtctcaactacgtggttggtgacaccatcagtgagatcccaggagacggcgctgtttacatacgtcaaatgatgtctgcgaaagctgccgctatcgccgcactcattgaaggggaatctgacgcagatgagctgaaacggcttcaagacgagttggctattgtgtcagattatcgtgcaatcgttgcatcacctgttcgcaagttgaccatatgccacccgaaatacttcaataggtaccacagcaatagggtgttcacttgttacccatacacaacggacccaacgtgtatcgtgcaggacggcaagctacttgaggcatcggaagacggtggctcattcgaggtgtcactagataatacagttattattggagtggttggttcttattacatgcacaaacatgttgaaaaactacctgagataacgttacagagcagcggtatagcaaatcccaattaccgtgtcttcgcgagcaacgtacccggcatggagaccgtgtcaataccagacaccatcttccgccgtttggtagctcgcgccttcgcggatgcggacactaagttaccagatatgatcgcatatagccgatcgttactcaacactatgacgtacacttccaagggatactctttcaagtataatgacaatccattggaactcctgcaattcagcatagttgcacttaatttcgcaaatcgccagcgaaaagtgaccggatttgtgaactccgttcttgggttaggggttgacactgataagagctccagttatagtccaataataaatctcctagtcgagtcactaaaaaccatagggttgaatctaatgcaaaaccaattcaaccagccactccaaatattgcacgagatgctgaatcgtggcacaatggagactcctgtgatttcggatatatttgctgtgttgcgtgatgctaactatcaagagatatatccatctattcgtctgaagtatcgacacagtgagcgtagcaaccaaacagtcaactcagatacagcagccaacgataacgatgtggattcccaccccaacacagacgcgggggacaccacagatgtgcaaaccacacctgcagtggcaccaacgccaaagcctgacaaagggaagggcccggcattacccgacaacagtgaatacgccagcagcagccagacacaacaaattgccaagttctttagtgacaaggttataactacctggcatgacatgcatgaggcgtggaacaagtacgttaagtccaacaaccaataccaaccatgggaattcaacactcacgtgggcgatgtgttactattatacgcaggcagcaggggtgacgcgcaaccattggacgctatagcagaggtggcagttgccggtggcctaagtgtcaggtcgttgataccagccgatcttcattcgcggattcctggcgtgcactacattgaatactgtgactcatacgatgctctgactacatgcggggtaaatggtacaattccagatgcctcaacattcatgacacatgctatggatgtctatagacactggttgaaagagcacatgagacatcgtattgtgataggcatgttcttctcgtccgaggccaacttggtacatggtactgaaaagaacattcgtataatcccacaactggatgatgaatgggatggtgctgcaaaatgcaaccacggcatgagctctaatagcattaggaagttcttcaagttgccaaaaccagttattacaccatattgggcggtaccatacgacatcctaaaccgcgcggataacctcggtttcctagttcctaaatactgtctaaatattgacaacaacactgatatggcaatacgattctcaattaagcacaatgggcaagttcgtgttgttactttaggttcgatgatccctgatgattatctcgtgcgtataaataacatgctgttggcatcacctctcccagttatacttgtcacgagcaaattgcataataaatcggacaaattcgactatgatggtcaaacattcgcattaaacatgccaggcatgtacaaatccatatgtattgtgccatcagtcaattacctggcattaaacaaccgtatagttgaggcacaccaccattgtggagcaggcacctatttgacattccgcatgctaggtgtcaagcaagtgccatacgctgttgcattcgaccaacactataatgcttggcattataacaaggatgcggtggactcagcagacaaaccacctacaagcatgtccgttgaggaacagttgaatcggtcgatacgggatgtgcaacagatgctggatatccacggcgctgttactaatatcaagttagttgaccctaccgcacttggtgaaataccattcgtggagaggccaatcgacaccaatattgttgtgaaacctgtaatccttcgcggtgtcaaaactattaaaaacacctacattgacaattgcgtgttcaatgtgctattggattgcatgcaggatgatcccgcatgcgcaaggttagttgatgctgcgtgcgcaacgcataccttcatggtgccagaagacgtgatcgagttcctgctaacaatgccatgcaatttcgctatcacattccgcaacaccagtttgatttgtgataagaagttgaatgtcaatgtgcgtatatcaataacagatgacttgtcacacgccgaggagttcacctttgatagctatgaagaagtcgctcacgcaacatccgatgcattcaatgacctgatcattagcggtgactacacacgtgatgtgcaaacagtggttgaaagtatttccacactcgaaccaataaactttgacaaagtgcgccactcactcgtcttgacgagcatgcgcaaactgaggccattagagctgttcaatggtgcatctggcttggcccacataacgtccagcaagcgtttgtccgcaggctatgtgtacgcatgtctcacgagtgctggtctcgtgcaagcattgtgcgttccatcgttgaatggtaatagtatgctggtgcacatgcaacctgtcatgtataactgtgccgtcattattagattgaacaaactgatagacataccggtcggtgctaaacggagtttgattaaaacaaccaacctagtcgccataaatcatgccacatcgctacaattacaaacaaggggcatatttgtgtcatctgtcgcgcaaccacaagctgacacgctttatatctatgacacttgggcaagaaaacatcatttcgaagccgaacaagaaacgattcgcacggctaaacgcatcatggccgtaccagaaagtaaagacaaaccattgacggacataacaccgcaaaaaccaactctactgagtaaggcataccctgtgtgcatagctaagggcaaattctatttcaggtgtgagagcgcaaacagagcaaccaacgacattctcaactcgcttaaattttgcagcaagttgactgatggattatatttgctgccgtacaaatccaaatggaccacactgtttacaatactatttaagtatgatggcacaaagattgaatactgcaataccgtgagtgtagacccgccaacgaacttgcaagagttgtacgatttcaccaaagtagacacaatggcagtaaaactacggttagaaaatctaagtaaacaacacggctacacatcaatggcggagtgtaggattgaacaagttacaactatgcataccattgagacgtattcattggcggtgcgacaaaaattgcacatcgaagtagatcacctcataaccggtgcgaatggttggacattccgtatagccaaacagggcgcaggttttgttcaatttgatgaaatacacataccagaattagaagactcaaaatttaacaattccaagtttgctactccattgcaaccgacgccgtccaccacattgacgcaagacatgactgctctcatcccactagatggtaaagacctttcaaacaactttgtctacaaacaaacgttaaactaccatgctaaagaaaaccaactaatctccgttggtaacgtgacgtcattaggtttagaagtggatgctataaaatatgatgaaataccacaatcacaagtaattgatttttggaataacagcgaattattggacagcaacattatactgccaaccaatgcacagttcacagtgagaagtcgcatacagccaattcgcatcaagtccaatgcgtacttactaatggaagcctacccaaaattcgcacgcccatcccgtagtaaagcttttgcagaagagttaaacagtattaccaaccgacatggtgcatacaccgtcttcaggaagaccgatttagacacaaaacaagaagtgcagttcctgatagataattacttcacaaaggactacaaatccattcttgccgagtttcagaaccagccaattactttctcacccgctaaggcgcaggcgtggatagataagcacaacatgccaaagaaggtgcgtgccgatgtgatggaaatgctagcaacagggtgggaaaaaacccccatcaacgcaatgagtgtccacggtaaaactgaacaaactacaaagatgaagacaaccagatggttcgacgatgttgttactcgtagcattgtcgcagcaccatatgctgtgtcagcactcttcgccgatatatttcttgaaaccaaacaacgcctcaaagccgtgctcgggccaaagatattctattcagatggtagcacaccacttgacctggcagcggtcatacgcagctcggacgatttcacatactgtgttgaagatgacttgacgcaacaagatagacaagtggaccaccaactgatagccgtcgagatggaactctatagattgttaggtgtcgatggtaacgtgttggcattctaccgtatgtgccacgagaaatggtcatggaagggccatggtataagtggtgtatgggatgccatgcgcttaagtggacaggtaaccacggcattgggcaatgccataactaacatgattgttcataacagatttatgctacgcaaccagaaccgtatctcaaagatgctgttccttggcgacgacattatcttccttatgaaacaggaagtcaatatatccaagcatggtaccgagacaaaagaactgtacaacatgcaaagcaaaatcatctcacggaagtatgtaggaggattcatttctatgatcgtgtataacataaacggagatgttggcatatgcccacatttcaaacgcatgcgccatcgattttcagtttgtaactacacatacccggtggatgacaccgattccaaggtgcagtcacgtgtgctctcatacctgttcatgctcggcaagactaagtggaccactgatttagtagcaaaaatgggttactcagtcagcttaccagagtggtaccacactaatactgcaataacagcaaacgcattgtacgacgaaactgaagaatgggtagtacgttcgcacatatctgctctcagacatatgctggaaaagcaagtggtcaaacgccacaagttcctcacctggtcatcggtataa

SEQ ID NO: 1143 - DNA, 14604 bp, Helianthus annuus alphaendornavirus
  source 1..14604: mol_type = other DNA
atggacatattaaagaaagaacccaaaccaaaaggggaaccctcttcaatacaacacgctggggatggtccccccagcgtgttaaacgttggcgagatactcgccaacataaacaaactggtgagcgctagggaccgacgccgccagacattaaggaccaaaacacgacgcttgaccgagaacaacgagttcaacgttaaggtcgacccacatttccaaccaaagtttgtgaaatgtgtggcaggttccaacaaacaaagtatgaagaaatcacctcacaagtggcaacacaatgtgatggtatttaacacaataaacctagggaaaagggatcctcatgagattgccaacaagctactggcctacggtgccccagcgaaagtcaaggactgccagtgtgcgagctgcgtgtcagtagataaccaacggtccaaagtagccatcaacacccaggccactctaggcatgtggagcataaccaaagatccatgcgccctagagggtatagacatcatcaagtacaggcccaaagcgatacatcagctattaagcacagagcaggaattcaggaagacattgtgggatttcaagcttgagaaaaccttagacgaagtcgtcacaggaaaagatcaattcaaagcacacatgagacgacaattcactaaatacctgaagaaattttctggttatcagggattgattacagaggctctgacacaaaccacgcggtgtgtcccatgggcacaggtatacgacattagaactggtgaacctctggctaaccagtttagccacaggaaaccgacaccagaagaacggacacaaatgatcacatgtccccactgcaaatgtaccaacagtctaatagtaccacgagatctcaaacctaagttagtggatttgacagatcacagatgtggtgcatgcggacggccctttcaagagcagatgcatgacccttgggcggaaatattcgatatctttgacgagtctatcaacccaaacgtgggggcacagactgaaatgatgaagttgatgggccgcctagacatgagcgagatagatgaagcatacacccttatggacatagccgagaagcatgacaccaggctagtgaaatcagcgctgagcaggcttcagttggatctggttgacgtgcccttaaacatggagaagtccaaactgggggtcctagatcaactattcggcggtttcgagttcgtcccgaaacccggcctggtaactgacacacctctagaagacacgttcagaaatgcggtgatgactatggtgaagaagaccacaatgagcgagggattctactggccagacgcataccagaaacctaatagtagcagactgaatgtggtgaacccctaccaatgctgtgggtcgctagagtgtgatcattggatcaagaaaaacaccttcatcacactagagtcactgtcagtaggcttaaacggcatcttgaaaatgatcgaaaggagtggaaaggaagcatgggtgtgcctgccaacggaaggatacaacccaaaggccgattcaggccaattcgaaggtggagaaacacactaccatctgagtggccatgttatgaagttaacaagacccggacacgattacccgatgatagtagacaagactgattatgagaacctcaccgaaggtgacatcttccatgggagtacgggcacttatatggccacgaccatactgaccggctgcggtcacaaagtaagaataatcaagaaagtggaccttaacataggggagataattcccaaactaaaaccaacgaaagcgagaccccagacattcaaaatacccacagttttgcctgggagcttgggtagcataacgggaatattgacatctagtgtgaaagaagtgaccgtggaaccaacattgcttaagagtctaatgatcaaaaacttagacgccagcatgacctttgcagaactactagaatttggaatggccttcagtttcacaagataccacagaggggaaaaagtgatatcctatcaagacctcacttccacgcaagttatcgatcactgtgtcatagccttgatactaacaaggagggccatggcagctagaactatgatagtgagcgcgacacagaaaaattcagttatggaggtcatccaaagcgctggtctgtctgtggggatgacgacagcagtcacactcctggaggggatcaccaacaccacgattaaatccagtctcaagaccctgatgagtagagttgatgccatatctgtaaactcgttaagggttataggggagcacccagtctgggacgacatacaacgatggaccactaaggtgaccctatcaagctatagaatcatagactatcgacctctgagagccactatcaggaaagaagtgacatgcccccatgtgctatctgtaatagaacaaggagatcagcaatgcttgtgttgtggccgactggcaaggtctgatatgtgcaaggactgtagcccttgcgcaaacaaagaacatgcatgtagtcacacttgcgtacatgatcataaaggtgagaagaaatgcttatgctgccaattgccttctgaaaacaaggtatgcacgtgctgtaaggtacactacagcgtcgctgacatggtaggacaaccaacaaagaaacctacaaagaaaccagaacaaccaaaaagggatagctcttctaaacaaaccaagccggagcaaaaaccgggtccaaaaaccagagaagaagaacaaggacaatacaatgatgaagacgaagtggtgatagaagcagcagagagagaagacgctttgatacaacaaacttctttggattttgtgactgccctgctaagcccagaagcctggccaacagaggccacaaagaacccaccctgcggggatataccaatgggaagccgcatcctgtacgttcccatgggattgactataggggaaagtaagtctgtaaaagtgaccagccacaaggtcatcccaaataaagaggggacgtgtggactggacgccttgaggcttggaatgggagaacaagtcaccatctccgtaatggaaacagtgactaagaagaccagaggctgggatgtagatgatctactaaaagtcggtaaggctttggggaaaaacgtactagtgctgacaggcacagaggtgcacgtaatgaaatccaactctgaggacgactaccacacgataatacattctactgccctgaataaggaaggacaacattggtacccaggaaccgtgcagcaagtgggggtgataagaaaggaagtcgtgtacaacccgactatcaccatgcaaaccatgcacaaaatagcacaacaagtcacgagaaagaaggtcaaccattacgacgtggcactaatggaaaggaaagaattaatcgaccttcatgtggctgccgcgacggtagcagagaccatcaaaattcacacggtggttgacaagaacttcagactggaaacaaaccaagatgaacagtacttggtcaacaacaaagagagagaacataacatccgtgaggggaagatatgcgttatcgtacccacatatctcttgagcgtgattcgacacctgacaaggttgtctccagactcaatcagcaacgacgacgtcaacacgatattcgataaggatgaccagataccagagacattgaacgcttggatcaagagtgaagtggctgattgcgtaaagaccatattatacgccctatgctacgacgtgatacctaaatccacgaacccattaaggatcacatatgagaagtttgacatgatacaagatggaaccaggacagtgctggacgtctccagaacaaaattaaagtccttagacgtcatatatttgcaccaagacgggaagatagtcccaacaatgatcaaccccaagatgggcaagatagcaatcaccacagacaaatcctaccggaacaaagggatgactataggtataccacagatatccataggcagtgccatcagaaacctagcgagcctgctgacaatgaacacacaatcaacatatgccatgagcaaactagaagatagtgttatggtgcttgcaccaccaggagcgggaaaaaccacggaaatcatgaaattgttaaccgagagcagtttggtggtggcatcaacaggcggagctttaaacagcctgagacaaaagaagccgccctgccaggtgttatccgtagaggcagggaaaaactacgacttacaagtggaccacttggtaattgacgagtgcaccactgtcgggtttctagactacaaggccatagtggacaaagtcaagcccaagaaagtatttgcttttggagacacctcccagatcggcctcaaagacatgagaatcagtgcaggcaccagagcaatacaaggactgaacacataccacaaatcgatcaaaaaactaaaccatacctacaggataggacagccactcagcaacgtgctaagcgaggtgtacaatgacttagaatctaaagcagaacacaaaacggatttcgaggtcatttggagtagccactttgacccagagacagtgtatgaaaaagctctcaaacataactatgacgtcatccttgttcactacagatcacacaaagcagcgttgctacaacagctcaacataatagcaaggggcaacactccacttgcccaatgggccaggagagttagggtcgagacaatccactcataccagggacaagaagcagataaggtcatggtgatacagagatctaatcaggcaggagggtcgatagaatttgatccgcaatacaatatttcagcagcgagcagggccaagaaacacttaacttggtatgcggtaggggttcactctcccaatgtggacttaggaactatattgagacccagcaagaacatagtgggatacgggttattcgacatgttttccaggttccacaccgacacaatccaggaatcagtaaaacaaccaaggttgaagaaaagaaaaggaatagggagacaattcctgaaaacgattaacaattatctagacaggaagtacaaagccaccgcgacgttagtggaaacccacgacagagaagttctgaaaatcaaggtgagtgtcataactatggcagaggtaaccataagtgctgatggaacaattaaggaaggcttgaatcgcgtaggtgatctcagccagttaatagatctcatacatagtaacctagaagataaacccaccatgacgtgctcttgtaacaccataagtaagatcccatctcataagacaatgaaccaattagagtttaacacttgcctacgattatgtaatcttaactgggtggcatgcgaaatggctatggtaggggaaactctgagactggcagtaggagataaattatatgattttgtcaacccaggggaatgtcatgtctgttccaagacgacgattgtgcaccaggaaacggagatagtgaggataaatagatcccaccacttccacaccgacgtatcaatagagtatttaatcccagaagagaacttattagttgagcattttgacctcatgaacaatctcgggcttgatgaacagttgatcacacatgaaagaagaccagtggacagccctttactgaccagactcgcaaacacggaactaaccataaacacttatgtgttgcagatgaggaaatcaatcgagactaccctcaagagaactggcaatttcatagtggacagcttgttcggcttgaaacacgagaccatcgacagtgaaacttggtgtcaaagtagaggtctcacctgtctggccactatcggaaacgagatgagccgcctggtcaaggtagaagtggacaacagaatagcgctcatgttgcccatagaagactcccctatacattatttggaggaagaagggaagagagatgacaactgtaagacaatggaagaattcatcatggaatacataaacaccctaaacacggacgggttactgacaaaaatgataagcatcctcggccagatgaaggtaggaggtagggatgacttggttaactttgaggggttaatggtaccctacgagagacacatggcaagaaaagatagagtctggcacaccgtcgtaaacaaactggggaaaatgtacgtggaaagcaagagaggggaggacagcatcctttacctatcacaaacacaaataagagagcaaggtcgactgatcaaacaacagttcccgcacctagcaattaacgaacacagatacatgatggattctgacgactacggttctactctagaacagctgataaaccatgtgttattaaacgattctgtaggcaaggtggattatgtgacatacaggccacatttagtgatcctgaattcacgaatcaattgtagactggtcgaacccaatcacaaccggttattaacagccaggtcaaagatcaatgagactttcatggaaggcatgtgcaggaatgtggaggaagccatcctaaccatggcctcggaaaacgaaaaagatgaattggtagcaataacaaagcaaaaattggaattggcacagaagtgtatcagacagaagcaagggaattggcacccgtccaagacattctcaaaagacacggacttaatatgcctgggagaatgcggtttatcctatgaaccaagtcaattggcccaactagtgatggagaattcgggaagaagaataataatatgggggccaaatcccgcactcgcaaaacttgatcaactagaagtagaaggtcaggagtacctcaacgtagtggacaaaagaacaggtggccactacatcatccacagtgggatatgggatagcatgaaatatgggctaccaatagctcaggaagagaaaaccagcgtactcttggcatcctacatgaccatcggaggtctgattgtatacgacgtgaagatcaagaggccccaagacatcgaattgtcttggtttgcgcctctagactcttcaaaaaccaccggtttgataacgatagaggtgccacacattcacagggatgtcgtgaaattggccaaggagggagtaccaataatttccaccaggaggattgtcgccgacgcaagattactttcaaacttggcgaagcgcatgttaagacccacgacatttgacgagttgctaaactacgccagagtcttagcacacggcaaacactatagtctgaaaggattcacatcagtgtacgaagaaacaccacaggaattacttgacataacgatgggtgtgtacctaatatacagtagaacaatagaatccatggaaggtatgacagaaggtatcataagcaggagggatcaagatctggatacattcaaagcggtattaacagagagagtggcagacttcaaaacaggtttgttaggcctggtgagcaaatacacaggattagatctagatttaagcgactggttgagaatactatcatcagggtcaagggaccacctgtcagtcatcagacaaatgatcacaactcttaaacacactagagctagattgttagacgacaccaggaacatttttccccgaccaacggtgggtagtgcaccagaaagtaaaatagaaaagaaggactacagcaacaatccattccggttcttagaattggcaatagacaacgtcaaggcattagccaaattgacatttgacaacactcatgggagtttcaaaacagcaacaaaaccagcaatagacaaggtcgtcccccagcggaggatagctgactcacaccccacaagtgattatttgaacatgatagagaagtctgccatgctcacataccaaaagttccaacaattaccagagtttgattacggagaagcttacaagaaaaaactcatggagttccaagaagtgctcgaacatgccaagaaggtcaatggtaaaccaaacaggaaaattagaccagataacaagctaattaggaacatcaccaacctgttagaagaattagaggcagaagactggcaagacagagctatggaaattgtggaagaagcctactcagtgatggtgcaagtgataaattgcctacaaggagagatcaaaaaatcaaaagctaaaaaatttaaaatacttatgatgacaatgggatcatctggcgactataaatacttcaggaatgctgccttgattttaaacaaggcaggagctcagacggattacatagtgccccatgaaggagcaaaatggttcgaagaggtcggagggaaaatatacacttgtgagtacaaagtaaaagagaagctagataattgggatgcagcaaggcggtgggacttggaagcattgctcagtggaatggctgaaggtacagagtgtttaaccaccaagaggatccaaacggaagtgttcaacaacaagtatgacatggtcattggcacaggaattacgatactgggtaaaacaatagccgaatattttgcgtgtccatacatcgagttgaacgcacaaccttggttcgtgcagttgtacacgcatgatgaaacactcgcgggcaaaaccaaaggtttactggacaaaatgggaaaagcaaacgtgatactggctaatgcaaaaggtattagagatttgagagccaacttgcagatgccagaaggagacttagcaagcgacgctctcattgaccaaccgtcaatctactgttacgaaccatgcttaagcagtgacagaatgtatgagtcctggccgattgtagggtatctgggtagatcactgatcagaaaagaccaaccagaatgccagaagtatgacatagtattcacaatgggaagcatggtgagtaagaacatcccgatacatgccgagacggtcatgagctacagtaaaaaacacaaattgaaaacgctgatacttggaggttactcatccgacaagatcaaaccattacatgacaaattgagcgaaagagacaaagaactaatacattttgaagtgtacgctgagcacgaagatgtgatgactgaaagaaccatagtcatacaccacggaggctgtgggacaaccaaccaggcattgataggtgggtgcccgcaagtcattataactgtagcctttgaccaattttattgggctcataaggcgaaattgtgtggaatctcagagcacatggacgtggatgaaccaacagatctactaccgggattgatcacaaaactcaggagtgagtcatatgcccaggcggcgattatgatgaagacaaggctggtcacaggggttgcgaaaaatctaataataggactaagaagtttggcaacacagatggatatgctgagaaccaacccctcaacatacgaaaagataacaaatttgagcccgcctcttgaccaagaaatcttctcaagtaaatcactaccccaaagacccgccataacaacgcaagggcccaccttcacagacgatgtacctaacaaatctaagtactttaagctacaagaggaaatgaaacccctaatgaaggagtggaactttgaaatcacggagccaagaagaatacactacacatgttgtggatcttacggatcaatagacgtcacattggccgagaatagcgatacgctaatagtttgcaatttggaaaacgtaaggaaaccaaggtttgtatatgtggcaaaagaacacactataatccaacccgtgcttccattcgacaccaatagagggccacccagtacagccacattagcgtaccatgcacatggagagatacttcacgaacagatgaaaccatacaaggcaacagagattaaaacactagcaggtcaagaacagataatatcggagtcaaagtggttatactatgccgcaaagaacactaggaaagttgacacagactacggaaacaaaagaaacggtagaggaatagattgcaggatatgctataggaggggttggaaagctcacccagatctagacatatgcacatgctgcttttccaaactagaatttcctcagatagggaacacagcggatgaggaaaccatcaagaaatacacaatactgaaagaagggggtctaaaccgacaaaaccaattccaagctggcataggaaacgccttaagcctcacgacctcagtaccacaattaagtgtaggactgtatcacggaaaatcttacggttatagcacgaaatttaatcctcaagggccagatggttgcgtcaagaagtgtatacaggcgtatgtcgaccttaacacagaagcaacccgaccagtcatgaaaaataatcgattgaccctaatccaagaccaaccatctatcatagtagaagagatcctgaaaactttcaacatgccctcaatgacaccgctagaacacatagaaccgtattgtcacctgctaggtttgagtacaacattggtgataaagggtaatgtgagagttacagtcttaccagatgccataggtcacatagagttgctaataatacagaccaataaactgctacactgcgtgctggtgacaatgaacccagcctacttagaaacattaatcagacaagaaactccaagattaagttgtacggtgcaaaacagtgactccttaaccacgtgccaaatttgcgagcaacaaaccatagatattaaagcggggaaaggattgcgtgtgtcaacccaaggaaagtgtcatggtttgcatgcagagtgggacaggtatttggtagcatgcagacggatgataatgggagagatggtggacaggggttattggtcagacaaaacagctaaccacgtaaagtcagtgcaccaaagaataacactagagaaaatcacacacgtgtttagaagcatgacagagccagtgatttttagtcccctgagcaccggaaacgattatataatgatagaaaaaccccaaacaattaagccggggcaggtaatgatagcaaacacggagaaagggataatcataggccacacgctacaatacaaagatagaatgatgttagtccacaacatggggatagtagaaccgttgtcgcaagcggtgatcaacttgaggacaacaacattacccagggattacgatcccaaagacacagaccaaggcaaagaggtcacaagttacaatctagccacaagacagacgatggaacaaatagattacaatttgaggtacctaccaataagcctaaagggaatgaaagttatactaactgacctccggaacagaaaccaccacaatgagatagtagcagtgaacattgagaaagccaggcaattcctggtagaccaaactatgaaacctctggaaccggaagtcatagagtcactgaaatataatggacccatcgtgttagggctcaaaaacggacgattggagtaccagcacaatttagtggcctccggaccagtgtcaggatcaatcatagccgatgtggaaaaacacctaactggtctaatttcaatcaaaccactagagaagatagacaaactaaaaaccatcaatccaaacatgtttagatgtttgggcaatgaatggacttttgaagaatatgagtccgagttggaaaaaccggaaatgggaaaagacataaaagacatcggggagttgagagatttattgatgcagccagggtggaagactaggttgcgagtagaccaactaaccccagacaatttcccaatatctctaataaccagaggggccgtcattaagaatgcaatgagagtagacccaggcgtggaagtagcctacagagagcacatactacaagtgctggtgtgtgaggaggacaatctcctactaaaagacaaattacttgaacgggacgtggacttcaaactccaggctgcacaagatgcaatagcagaagaaaagagaagattcgaatccagaccattcaaaaccatcataaactcagaagaaacatttgagacagtgaggttgctcaggaagaggaacacagtagttgaaaccatccaataccaagaatacaaacaaggactgcaagctccggtacaggaagttgacttgacccaagacaagagatgggaagacatgttgagtctaagaccacccactaatgaggtttacgtgctcactagaccagagagcactcagatggtaaggaggttactggaagggaaagtcacaccacagtttgacacggtagaaggtaaagtgaagttgcatgtgatggccccaaacccgaccagcgagttcatcgacttaaacttggactattatatgggcacacacaaatatcaggacaatatagagggcttgatggagtccgtcatccagatggatgacgcgggtcaactcacatcagatatgcacaaactagtcaccgtacccagcacgctgggacacgttaaaaacttagcgcggctaacaggggtaccagaaacgcccgaattggccaaactagcagcagccattctagaggcaaacggaaggaagggtaagacaaccagccacagaatggtgttggaagacctaggcgaggaggaactagtacagttgctagttccagaagaccccgtagtgatagacaaatcaatatacagcaaaataggtggagcagtctataaaccagccagtctggtcgggttcggcctcaaagatttccaaaaagaagcactcactaccaggcaattttggaacgagaatgaaaccaaaggcaaatacaagttaacagaaacaatgacagtagaaggctataacaaactacattcaaacaaacccaccataccagtcaatgtcaccagccagggccaacactctacaagcacccaaacaaacataacgactcagaccaccgaaaaagaaattttggagaagtacgccacaaatgaaccaatagtggtcaaccaggatacagtaaccaaatacagatcgatgaagcccaattacgtggaacccgggtgcctagagacagagtatgtaaaaccaagagatattacgacagatgcccacgattctagtgtgaaggaaggagaagcattaggaataatcaacaccaattggatggaagaagataaattactggaattactggatagcaccacagaagataagagcgcaggactgtgggtggagaaagtcgacatggatcacaaactagtggcggaggacatgaatgataagatcaatgtgttcacaattaatttcttcgaggataatgatatgacagacttcaacatgatggtagctcccactcagggggtgctcaagtcgaaagaaacaccctgtagagtgatggaaactaggaaagtgaccttaaccaaaagaccaacaggtagcagaccagtgtttaacaagttggcaaacgcggaattcatggcggtcagcaggagattgatgagcgtagtaaccatgagaaagtaccaactagacccaaaacaggaatgggacagattcgacaggaactacgtctcagtaatgggaaagaaattacttagagcgtataaggaagaccagatatacttcaactctgaagaaattaggaaatggatatccagcagaccagacagtgtgaaaatagaccgagaactggaggagatgttaagtacaggcttcgaaattaatgccatcaacacagccaaggttcacgtaaagttagaaagtctactcaaggaggattatgagtcagtgggtaaccgggagattgaacaccggataatagtgtggcaacggaaagcctggtgcgcgatattctcaccggtattcctacaagccaaagcaagattaaaagccatactaagcaggaaagtcctgtatgcagacggactaacacaagaggagttatcttcaagggttaatcttatacatggcgactgttggtttatggaggatgacctgagcaaacaagatagacaaacggacattaatctgatacaatgtgaaatgtatatatactcacaactaggggtagcagatgacgtgctgaacttatggagacgaacacacgaaaactggaaattcagaggaacaaatgtgtcggggatattgaccggcatgagactcaccggacaagccactacagcagtaggcaacgccatagtcaacttgttagtacacagcaggattttcgaaaccaacaagaatcatattgagttaatgctattactaggggacgacaatcttgttataagcagaaaccgaatcgatagctcgaagcagtcaaaaataagcaaagattattacaacatggtcagcaaggccagtcacgatagagaccaaggaacattccttcaattattatgttaccacaacccacaaggagtactggagtttggcccagacgtaatcagactagcacaaaggtacgaggtgacaaatggagtaagtgagtcgaacaatcacaacatgttggctagaacgatgagctactgtatgttgatagggaaaacaatgggaaccaaggctgtggtgaccaagcatgggttaccaatagatttaaaaaccacctgcagcatggcctcagctagaagagcttgtgcgattaaaaggaagatgactcttggagaggtggagagttacgagagttatttatacagaatgatgaaagacctcaaaacacacacctggatttttaaacacctagcgtga

SEQ ID NO: 1144 - DNA, 16122 bp, Helicobasidium mompa alphaendornavirus 1
  source 1..16122: mol_type = other DNA
atggacagtctcatcacaccctccactcctaacaccaccacctctaagacaactattcacacacacaacaacaaaaagcagctgctgctacaagcagcagctgcttcaaaagaacgattgcaaaaagcaactaaggcaattatcaaccaaacggttggtgatgtaagccaagttgcgccaatcgttcgcggtcaccaattgggtggccaaaattacgtcagcatcacaacttccagtggcaggaaggatcagcccacccagcgtgtgaacgttgttgaagcaggtgagactggatcgagcatcaatggtcacttcaacaggctgaccaacaagaacaggaaggccgtgctcagcaagaccaaggaactcgttaaatacgttccgaaatccagccgtagcgttgggaacaagaaggaaaaagcaaccattcaatgcaagaccagtcgaaatatttatcgcaagctgggcatctacttccatgatgacaaactcggagacaccgcaatgggatccaccgagatgactgtcaaccagcagtacactgccgctatggacgatgactcggctcgcctgcaatttgtgatgaagttcaagtcttggatcccgactgacatctttaacgaattcatgtactatgtggtctatccttctcacgttagcgactttgtaacggtcaccaaatgcgcaccacaagttcaagcttacgccgcaccgctccgcaaaatcgacaacaaactacttcgctatgtgagcaggtatgacaagatcaccaaaaagacttctaagcgcaaccggaaggcgattgagaagcaacgccgcgccaattccattcgcaacatcggaaaagatacagttaacgcacaacgtcccaaagttgagcgaagtgtgaacaagccggttaaaaagaacaacaagagggctaaaactcaaaaagctagtaagacccggaatgtctgcatgcgcattatcaaagacgcgctggagagctttgcaccaattgctgacgctaagacactgtatctcagtcactttagagaagtgctagtcgcagaacaaataccattatacatttgcgtgaacggccgtgtggccaaaaccaaccacgcgtcgctgtacaattgtgaaggtgcgttgacttacgaagcgtggaaccaaagcgggaagttcctagaggcgaaagacacaacaggaaaagtttttaaattccagaagcgtaccgtctttaacatggggcactccctctccatgatagctccctgggcagcagaggacgatgatgatgatgatgacgaatttggccctgtggatgtgattcacccggtttgcaaaaacatgtggcatgcgatgcaaaccacggtgtatgatccaaacatcggcgatgccattgacggattagcaatggcccggatgccaggcacgttcatttgggataacagcaatgacggtcttgttgaaatgtatgaccatcaagcgccggacttaacgacatggttctataatgggcaaccagctagccctggcaagaatggtgacgtggatttcaatgcctctaccaattcgagagttagacggccaggcccatgcgctgactgttacaagaagttaactaatgtgcccaaattctggggttgggccgaaatgtggcgcaacaacgcaccgaaaagttctttcaggagcgaaggttacaaagagccgaccatggggaatggttatgaagcttacgttaaccaaaaatatgatgcgctttatgccccaatcatcaatgccaaaacaatactgaaacctgggaaactggtttctgtgcgcactgagttctgtgcctttgaattcaacatggaacaccctgatcgcaaggctagagagcacctgttagccacagcagctctacactatgctggccgtgcttgggttgatttcgacgataccattcaaccgaaacaagggacatgcaggaaaacattgcgtcacatagcgaatcatttgaggcagactaaagaaaatctgcaaagctttgccggcaaccatttctatgtcaattgcccacgcaatggtatgatcttggctcgcactgacagatgggtcgaaacaacgtgtgaacgtggccacagcaatcggatgccgtacttactagagggcgaattgccaaccactctgtgtggtagatgcggtggcagtctcagcaccagtgacgccataagcggaaacactaccgatataatgaaaggtctcattgaccagcttggcgtaacctccaatttctttgatgacatgacaacttctggcagtaaagagtggcaatctaacgtggaaaactacgattacagagtggtggcactcgctctccataacatcaaagtgttgcacatggatgtacagtatcgcctccagaaagatgaattggcacacatgaaaggcatgtttgtggacctcgaattgacgtcatccggtgtgagaggctcactaactacaggcatgtaccatgcagtccgggactgcctactagttcaaaccttgaaatcagcgggagagagagaagtggaatactacaactgtgctgagaatgtttcacggactgtcggacacatcgcggtaccgtcggatgatagcaatgaagcagccatcgtagttggtgattgggtgcaacagtgcacattgagtaacataatgaatgagaaaaagaaaaagattatcgtcgtattaccaaacgtgccttctgacatggatagggtgtcatcagccgtgaccgacatgggtgaagtagtcaactacgaagacaatatgattttcacgtttcacgactctacgcatgtcaaaaccatgcaccgaagcatgtatagcgatttgcggcgagcacggtacctcactgcatcagcaacctatgtcagcactacagtgagagtcactactgattgggtggtattagtgttggatcggctggacaataaagagaacatagaagcttcacaaccgttcttcaacacgaatagtactggtaccatgatgaaattcacactgcccatggtacatggcaggggcgtggcaggcttaatgggtggtttcaacatcgagctcaaggaattcacagtgaacaagaaactgttgaggatgttactcactcggaatatctataaaggtgatataagcttctctgagatgaaagttgcagccattggctacgcattccggaagtacaatacagcatccagaacgattaccaacatggatgtcggggcagatgatgttatgagtcacgcatacctggccaccgtgctcacacgacgtgcaatcctaaagcgggaatgggtactggatgccatagctgaggaatatagttgggctgctgtttgcaaacaaattggtgtgtccctagttaatgtgctgatggtcacagcaatagagcaggctgggattatcgatagatcaacagttaaacaactggttaacaattttgatcaaatgacggtgactatgctaacaaatgctcttggaaataataacttcaatgaactggaagattggttagagacagatagcactgcagaggggatttggttaagctacaccccattagagctcagcgccatgccgacttgcgggcaccacaatggatactgtttgcatgtaggtgacaatatttgttcttgctgcggcaaaccaacaaatgacaagatgtgtcagtgctgcactcaaggaaaatgtgtgatgcagcacaactgcacccacgcatgcattgggcacggtgacagcactggaaccaaatgcacttgctgtggggtggatagcgatggggcattgtgtataagttgtgtcgagcattccgctactgatgaggtggaagcttggccatggataagtatagacaagatcattgaggaacgtgaagtcttggcaaagagtggctctagcagaccaaatcgagcgcaaagaatggatgaggtgggtatgaggactaccaagcgcgagcctggcacaatctactggcataaaaattttaacctgtgggtgatagaaccacggacagaatgcacttttacaaaaggatcagaacaccagcacatttgcgcggtgaagatcaatggcagggaatgtggcagcttgtaccagcacacccacgcaagtcgcagaaaaccggagtcattgcacccccaattcgtgggagattgtaagagatgttggccgaatccagtagccacaatggacccagatactatcccgatcccaaatccgttccttgataaaggtaaaggtcgggagaagagcgacgaagggggcacacaagtgccaactaatgcgcctcggacggaacctcttacaaatgatggacctgtgaccgtggaaaaacctgaagtaaatgaatggtttgacatgggcttaaccgcacttggcccgcgatacatggcagcactattagagcccagcctctcagaggcattcctgagtgatcaaaacatgccacaaggtacgggcagcaacttccgttacctagtacaatgcaggcagacaatagagcgcgctaatgttggcataatccacacaatgttaaacagcaacttgggcagtgactgcggttacaccgccttgcaaatgctattcagtgacctggtgcaacctactctactctcaagagtagttaaaaccaaaaataacatgactgatgaggatatcttacgagttgccccactgatcggatacaacataggtgtgctaactgacgctgggctgacggtaaataaagttagcaatgatgtacttgtgtattgcgtgatgtaccaagcggccaacgtcaacacggagcaaccagcacattggcaaccagtgttattacagcatctaaaatggacaaacgagttgatttcatcttctgtattagccaccaagccaatcctagatgcaacaaccaaccgaatcacaaaagggacgaacccacattggtctcgcgacctcctaacagaagagcaaatcgtcctgatcgagttagcactccatgacacattcgtggcattcgaattggcgagtcattccaatgaattagaaataataaaggttgggtcagactattacctgccaaacaacacatccaggaaacacatggtcaatacaggtttgatacacatccgaataccgcagtgggccttgaatttaatgcttacgttaaccgagccaggaggaaacgaccaccacttgttacaagcggactggaatcgtgacagcgatttcgatctatcaagagatgcactcggacacttacaagcggccattcgcgtgtacaactccttcagattgctgcccaaccagtgggggggaaagatgcccgcgcacgataaagtgccaatgtacgtgaatagtggtgttgtgccgattttgcaacttccaccaggggtttggaaagctcttgaccgcatatactacgtgaccaacagtggtctcatcccggtgaaattgagcccaactttcattgccggagggtggagctcacccgtcgctcctgggatattcaacaccggcactgtgcaaatgatcacactcaagcagagttgtggcagcgccatacgaacaattgtgtctctgatgaaagaaatgccacacgaatcaacttgcctggcaaagatgcgagattcttacatgtttatcggcccaggcggagccgggaaaagcacgagaattgctgaagcttataagaagggtgacatagttgtcagcgccacaagaggatcgatcgcttctcttaagaacaagatcaaggtcaaagacaagaaaataatatcttttgaaaatctagctagtggggtcaccactattgaagcaacagtgaatacaatcttctttgatgaatgcacactactagacccagtattgttagcgttcgccatagagtccccctacatgccggaaattcgattctatggtgacaatacacagatagctaataaagattttgttgactgccctggtactagaatggaaatcagcctcctggacttctgtaaagctactgagaccaccaacgtgcaatatcgcattggcgagggccttgccacggaaatcgacttggttcgaccaggtggctacaagtcgtcaccaggacataaaggcactaccttcgccacgatggacgttgtgatggtagatgcaaaagaagtaatcaatgctatcaaagaacataacatatccactgttcttgtgttctacaagaagcacgctaaaataatgaaggaagcattagccggtgacgcgtctttaacaaaagttgtgattgaaactgtccataaattccagggcttggaagcaaaacgtggtatgattatacaggcccgcatgggcgacagagtatacatcgaaaatgacccgacttattgtatgtctgcagtgactcgattcagtgagcatcttgtacgggtttccgtggacatgcacaaaggactattattgcgcaagcgattgggggtgtcagccgttgcaagtggtttaaatatatttagaagcgttggcgggtcctgggacgatgtgttagccaatgtccaaaccggaaagaaacaaatgcactttacatataatgccgatgtggacacagacactcttgatgttaacaagttacaaaagatagcaaatgaccgtgcacgtggtactggggtagtgatcaaacacacactttcagacgacaaactaaatacagtgagcatgatgtttggtcgtagtatcatagagatagatacagacctcagcaccatggattccaaggtggtgagcgatacaatgggcttggtcgaaacttatgatgtaatcaaagaactgcataactctatcaaggaggcaaaaggatctgaggaagagctagatatgcacgatgtggtgcatatcagtcacctgaactggactgtcctccagggactggtgggcgctttgcatgctatgcaaggggttttcgggacagtggcctgcactattcctaactacaatatcgcgagcaatggtaaatcactctctgtttactatagggcgcaacgcgtggcagtcgtaagaatgacagctgctgagcaagttgtggacttagaatggagttctgcggacattcaggttcaaaacattctggtggaattaggtttagatccgacacatcgtcctaacaaggttcatagcctcatatcgaaccacccgtacgggaatttgcatacgtacatgagtttcaacgcttggttgcgtaatgcggacaaggcagtgaacgtgttgatcaagaaattagtggccatggatggtttgcataatttaacacaccacgtcaaccagaaatggttggacaagcttgatacagcggtgcaaagtaacgtctcaagtttgacccgagtgaccaaaacatcgagcgcagacaaccaggtggggacacccatagtttacgtgaatgaggcacgttggcccataatagtgacaatgtccaccacaaacgatatccgcatgagccccctgcatgaagtattagatctcgaatcagactttctcctgacagctctcgataatttctttgacagcctagccgaaagtggcattgggttacttctgcgcgggctgggatacaacctgaatacaagaatggcagctggcatcgaaggcctcatcatgccactagaccaacacaaagagcgtggagataaagtgtatcatctagttgccaacacacaagggcgtcttgcctctcgtgccctcaaatcagtagctaaaccaatgggtctaccagttaatttgggcaccgagatcactaatttgttgaaaactcacatgcctggcttgagtgtgcaattggtacaaagcgccgctggtgtggaccagttgtatgtactagagcagagtgtcttgatgtcattgcaccaccacagagacgaatacacggtcgtcaccaacagaccagccaccatcatgatgtgtggccaccaaaacagtgtggtgatgatagagccatggcaacataacggaatgaaattacaccaaaatggcatcaggatattctcggaccatatcgccaacttgttgaaccttcacgtagaatatgctaaggatgacagcacaaaaccgaaagatgataacgctgcatacaacctatacttggtgaacagtgcaaagaaaaacataaaagctctcgacggtccttgggtaacaaggagtggtaacatgcgtgatcaaattatcgtgtcaccggagtgtttgccgacagatgtcacgagtgtggaaactgtgctgcatagtggcaacagagtgtatacctgggtccctgacttaaatccactattaaaggcggatgcaatcgaggttgtcacagctggtggcatctctcatattaagaataatggtatatcgtgcgttgtcagtctacccacgatttggtatgatatactcaccgcccgagcggtacaccacacgccaaagggaatgttatatgctgaaacactcttcacccttggccccacaagagtaatccaactcaaaatgcaacgacaccgcttcctactcacagcgccattagatcatgcagtggggctagggatggtcaaagtgagggtgccagtggtggatcttgacttaatctccgcagctggacacaaaggtatattaacaacgaggaccttcactacgccaatgcgtctaatacgtcatctcagtttagtgctagcccgcgacaaccgtacatttgaagacctacgtgcaacagctcgagtgatactgaatggtgaaactttcaccgcacacaatatatatacgagggaaagcactagtccctcagttgcactggacacagcattggctgtaatgttataccagggccgtatgatcaatggtctgcaaacggcaatggcagagctccaggctattaaatatgacgcggcacatgctagttacgaacacgccgctgcaaatgttactggagtattaggtaggttgatgagtgcttctggcctgaatctcgaaccgcgtgaagttttgaacgcaatagctgaaaccaccccaactcatgatttgaatatactacgccaattgaccattgaatgggataaacttgtggttcagcaaggacatgtgagtcgtgaagtgaggcaacatgaccgtgtcggcaacactacaagcctcactgatattcgaatcgaccacaccggaacagttgccatgccggactctattggccgatttgtgtacaataacttacgttatatagctgtcacgaccaggcacggtccaatcactgacttatacgagtacccaacaataacagcgatccgaggacctacagccacactcgggcacaagaaagcgacatcaaaggttttgcaacctatggctccgcagttcgttaagacaccgcaagcacccccccctgcagcgcctgaagtgacctacgaagactttgaaaacatgtggacaatcacgctaaacaaaatgagcaagacgtttaaaatccgccaccctagacataagctctggttcgacagcatattaccaacaataatagctggccgggacgcacacgacggcgcacatttacaagccgctgtgaaacactttgaagaagaagtcgaagatgcattggacacggcgggattgacagaatgggaacggttagtgggtcataacctctggctgatgaaccttaaaatgcctgacacagtttgggtggggaagaatgaattcaaagatatgttggtcggtataaccgctattggcacgaggggtgacatggtcccaacgatcgcaatagccagcactttgatacaagctggcgctgacgtcattatgtacatcccacatgcgtgggtgcaggattgtatgaaaattgtgcctttagccacattaagaccgggcaactgggatgcagctgaaaaactggcattagcgttcaaggcgaacaactataacctcgaagctgtcaacacaatattaaacagcggtaccagtcataatatattggcagatgttgactggaaagaatctggattcgtcgatgcctggatcggcaccactgcaaacccgcaagctagattgttgagttgggcacacaacaagccttacttacaagcccaatacttaccagtgtttgccaatgaaactgaaacagaagaatggtatgtgacagcataccggaatttcatgactaatcaaatcacgctattgaatctaccaaaattagaacaactataccaagagatacggggtatcaaattggacaccaccagattcttgagtgcacattacggcaacgctattatgtttgaagaagagctgtcgggcatggaacgtggcccgaacaactacagagtgggtagcatgtcaaggccattactgggccaaaatctcaacacactcagcgaagcgacaggcgtgctcctcacgtttggttcaatgctagacggtgtgccagacatgacctacatgttgatagcagaggccctcgtacggaccaagcaacgcatacacgatttacacctgattaatctgccagtcggaaggtttgaacaattggggctcgtagacacaattgggaatgaaaaattcttgaatggtagaaagattaaaatacattcacataacaacgtggatctgcgatcggcgaccaaaatgggactcataatacatcacgggggtgccggcaccaccattggtttcagtgagactagggtgaatcaggtaatcattccagtcgccttcgaccaatcaggatggggagaatccataacaaagcacaagatgggcacctgtctcaagatgcacgggaaaatagaggaatatatcgctgcaatggactggtatgacggaaggcacgaccatgctgtgcaaccaaaaccaggcacatgcgaccggttcttggctagtttagtttcagaaattaaccgtggtcgttcaaaccatgacatcctagcagtgccacacgtggaagatcaaaatgtattcaacatgacggcaaatgtatctgaaaactggatggacttaatgcgctatggcctgagacccacagactggaggcaccaacccgaaatccctctcgtgccagtggggtggcacgttggctacgctacgagcgacccttctataaaatatgatcctgccgtagcggggccctgcaccttgcatgcaatcgcgtatgcgacgaaggaagagttgccaaagctggagagctttgcaaaacgtattggtctcaataatttaacaacgggagccttgagtcatgatgtactcttaatgtgtgccatacttggtttcacaggagtggtacgagatggtatgagatatgagacaatgaacctaaataatggcccattagtctggttcttgaatagagacggccattgcatggttacacacccaccagatgttgggtcaatcaaatgggtgcgtgacgctttgctaccaactgcacccataaccagtgtgggcacatcaaggccagacagagaggtgaacggtgtcaccatgccaaccaccgcagtcagttggtcacatagtggagccacacatttcggagctaatccaaggcaaacattaagcgtgttgcgggcattttgtaggaaaacgattgagcaactacgagacggaaatgactctatagccacgacaaagttaagacaaacacggaaaatgatgcaacggatcaatcgtgctgagtatgtaccaacagaattcaccacctggggagtcactgaggcagatactcatgtggtagttgacaaatgcaaaccaggtgccttgtatattggctgcgaccataatggaggggctcattggttgattggggcccatcataacgcagagttcatcctaatcaaggacactgacgtcaaaatgttgccgttcttcttcaccacgtaccaacaaatagtaaggtttgacacgacagtgaagcatattgtcggtaaaagctacgggaattctttagcacttaaccgccaaacagccaagtacatggaggaactcactggtgaggtgatcaatgtagtggggtcctataacgtagacaagccagtgatagtgacggactttggcaactatcaacatcacatgtaccacgatagagacaaattaatggagcacgtgaatcaaatccattttgtcagtacagtgggcggtgtggtaacactgaggcaggatccggaactagtgaaccgtttgctacacaaagggatagtgtccaccgggttactccgtggcaaagagatgttcgtctatcacggcagatcgtctcaccaaatgcacgagttcttgaagcaacatgatgcttcaacacaaatcaagatgaacagtgcttggttcagcaagccattgagtgataaccggctgaaatggctcgaggcgcaacatgattggaaagatgatggtgcggggaacatggtgtggcaacccaaacctcaacgcacaccaatcaaaagacaatatcaccatcaggaattacaactcctggcagaacaatgtggttcgttgctggcggaaacaatggctacaaaaattaatgagactgacaccatctcaatcaccccatattacggtacttactcattagaaatagtgcatgaactagaagatcacgtcatcttcaatgattatggcgacttatgggaattgagatgggaagctatgccactgctgttgaacacagacacattggcaacgatcgcaaaactcaataacaatactctagacatcaaggtgtgttatgatgccaacacaagggttggcaactcaacgcttgtgacggcagacaaagatctacacttaaataacccacacatattgtattgcgacggtactatagcagaactaattctagaagcaaagcgttcaggcataaccatgacaaaccgaaggtgtgagtgtgcgaatgcatcactctacaataaattagctgaggccttcgacgtcatatgccctgacggtgtgaggacaggaagagagccacgtgggtccctgcatttcaccgaagattctttcatgacatcaagagacccggaaaagatcaatgacttggaaacacaagatcctgcaatgcaggaaataaatctgctacacgtacttgaagctacagcgccttgcccgcccaactatgtggacggggataaagtcttctcaacaaattatagagctaacgcaacagatttacaactgtttgaaagcataaacacaggttggttcctccacactcgtatactcaacccaaataaagtcgagaaaagagggcgcggtgaattcggaattacgaatggtaatgaacaggactgtttcctgtatgaacatgaaatcaaagaaatcagtgaactcaaaaccaagctggttatccgggatgtgccccacactaatccagctatcatacccttgcctcctgaagattggatggacgacaggggaatgaggctgccatgcagtccattcactataaccggtcttggcaacggcaaaaccattattggttatgatgcactgttaccaacttatgaatggatggatatgtggtggcaacctggcgacaacaagttgcccaccgtgctcgctaatgatgactgggcgaaagagcttgacatgcgcagtaacgtggacacgggacagacatgggcaaagattgtgaacaacacagacaatgggtggccgaatttattgcgcgtgagagatgagttgaggcctttccccagcctgctaggtgccacagtgggcagccaatgggagatacatgcgacgccagaacactgggcgcaagacatggagcgcggcgtgtgggaaggttggacaaaagctagcaaggtcacagtgtacgtcaacactaccagttctcctcacactaaagtggcattagcacacaactcgatgtacaccatgaaccccccttgcgtagtttcgaaaactgtgatgaaggggcgcacagacgtcgtgaaagaattgatactcaatcgtcagtacaagcgggaaagaaacacttgggatttccgagaacaccaggcctattggcataaggcaagcgacacaggagaatacgagcagccagaatccaacaaagaattccaagtcgatttcaagataggtcaaactacaaagccatacgccattggcgccccaccgggtgcaggtaagacgcatttgagtaaattaatgcctgggaaatttgctgaccatgatgactacctcgaccaaaaagaacatgcaagactggtcgctgcaggagatatgattgaggtcagtaagttccataggaatgtcagtgtgccgacaaataaaatgttactcacatggggaccatttgatacaccaaagacacatcagttcatcgggtatgtaataccaacccgcaccacgcacagcgtgaacgtggcaaggcaaacatatcaacgcgcagcaagagtacggatattaacacagacagtgtatccagttgtaaagatcgatagggtacatgactttggtgcagctgtgaataaactggtacaagtatatgaaggcaggaaagagaagcctgttactgactacaccttcaacggagtcgagtctttgggtagcttcatttacaaagaagggactgagccaccaaccccacaggtcaaccattgtatgtccaagaatccttggctaccatacattccaccattgaacactgaccatggtgagaatgagggcatagctgatgaagccatcccaattcaagtgatgaatctgtgggaagaacgcgatcaaaccgataaggttgtgctatttgcccccggcatggacaacaagctgcaaaaaccgcacagtgctgaacagcccaataaaatcatcacaaccacaaaagtgactctcaagaggtaccctgtgaggtcacgccccgttaggactaaaatgttcgccgcacagacaaaagcagctatcctccgtatggaaaatcgggttgtttacaagaaagatgaattggatgtggatctggaactgaaaaggttcgccgaagcgtacttcaagactgggtggcaatcaatagtggaacgctggcaaccattgtactttgatcctgcagctgtgaataaatggttacatgaccatccggggtcagacaagttagctaaagaggtgcaagaagttctagctactgggttcctagacgacccactaaatctagcaaacgtgcatgctaagttagagagcttactcaagagcaaccctatcatggactggacgaaagaacaagtgcgaatcattgtatggcagtcaaaagggaaagcggctctgttctcagtattcaatgaagcgaagaacagattaaagatgttgctgaatgacaaaacaatttatgcggatgggctatctccagatgatctatcggcacgcttgcgagcagtacctaatgatggagcttggatattagagagtgacttggaaaaacaagacaaacagacagaaggtgaaacattggattgcgaaatggaaatttacaagagatacctaaaggtacactatctggtggtcaatttgtggcggagagtgcatgatctatggaggtataaaggaacacacatccgaggaatgagtgatgggatgagatggactggccagataaccaccgcactagggaacgtaatagtttgtatgttggcactgatgctgatggtaattttgatgtggtcatcactgctaattattttattcttgggtgacgataacctgacgataacaaaacggccccctgacgcgacaagtctacgctcatacattaaaaatcattggaatatgttgtctagcgcaacagttaacaaatatcatggcaccttcctacaaatgattgttgcaccaaattccataggcactttcgatatcggaccagactgggtgcgtttaaggagtcgcttcgaagtaacgaacggcggcagcagtgacccaagcacaacagtgcttgagaggtgtgcaagttatgcaatgatgctcggtgacactgatgtgggtcgtagattaatggataaattgcaactagatttgccattggtagcttggtatgacgtgcccagcataactttggctatacaacacaagtactctaaaccatacgagtgggtgaggaacgagctggcagagctcgaggccatgatcaccgaaccccatctatattaccaggaatgggaacatttcaccacagtttaa

SEQ ID NO: 1145 - DNA, 13992 bp, Hordeum vulgare alphaendornavirus
  source 1..13992: mol_type = other DNA
atgaacagccaatacgacaacatgaaaaattattacaatcaaatgacaaaagtacgcatattaggtagaaccatggtaccctgtgcattggctttgcaatttcccatgtccgaaccattggtcaacaattacatggaagcaagttacattgccacatataaactgatgtacaaaaacaaagaaagttacgaagggttgcacccgcatgaactggctgcatttataaaaggtgttagattaaatgtggaagacagtttcaaccatgctggtaacaaattattctatgactctgtcgaacaagaggtgtcaactcacactatagacacaccaaacgatccaatattgtggcaggcaattagagagatcgaagccaaatacggaggggccattggcatgcaataccaagctctgcgcaactgttggacaagagttccgcacctggccaaggttggtggtagacaccaactgttgatggtagatgcagaaccatgcggacacaggcgttgcgcggagtgcggaatcatgaatggctactggatccctggcgaggatggattatccaatgcacactgcggggcttgcggcacttcattagatttcgagagacaaactccagagcctctcgacacaccgccaaccgaagatttccagcaaatcaaccaacccatgggtgccttcgaaatggcgcagatggaaatcattgaacagttagacggagtaggagatttggagggggtagcactgaagcaagcaattgaaaatgatgaaagactgataagagcgatgatatcaagggcgaacgtcaagttgagttttgttgatccgggcatgacacctgaacaacgtaaattggtaggttcaagcttcaaaaattttatcttgatagacaaggtagggccaataaacgaacatgccatgattgcagcagaacgtcagcttatggcacaagttatgtatgacatggcagccggaggtcaacccatagtggacattggagggcctagccccggttggacggcagtcaaatcgtaccagacggtgagccccatcctatcaatcaaagacataaaacggttcaacaattacgacaagatgccggtgcactgcacacacaaactgaaagaatgtagttgtcacacgggacaagcaccattaattatgagtgttgacagcttgtatgatatatcaccaaaagatgtcatgaaatttatgttactggccaaatcaaattacatagtttactgcctgagcacagccacactggaccactccacaaacaagggtgtgctgccttgggatcaagggctgtggataaagcatcaaggcaagttggtgacaacattcaatgggtcatcttcaacgtatgaaaacaattgggcccaaaccttatggtggaccaaggcagatgtgataatagtgggggaccatagcttatgcatacaaaccctaaaagtgtgcggaaaccacattctgcgtgtagccacaatatgcaacgattacaaagcacagtttttctcactaaataaacccgttataatgagctcatcttccagtgtatgcatgccaatacctgtatggaaaaatccaatcagtcacgttgtcaagaatgtggtggagtggaggacggtggccgtggaaaaagaatttcttaaattgctgttagtaagagcgagcgcaggtcaatgttcttatgatgatctggtcaaatatgcaatagggctgggttatagcaagtacacactaaaagataaggtaatatctatgaattatataactgcggatatggcgttaaaccatgcgttaatagcaaaggccatcactgatagaaagctgctggaatcaacttacatcatggcacacgacaaacaattttacgattggcataacatgagccagacggacgtgttacaaaccatgggcacgttaatcttcgaaattacaaaacacttgctctcaaagtggtctgcatccgacgacaaggttcagtttgtgtttaacaaagtagttgacggtatatctgaatggatagctgatccagcatggtacaatctggtggaggcgatcacattcgatgacattacaaaaatgaacatcattagagtgaacacatccagtccggacacaaacgaagccatcatatgtgaccatcacagcgaccattgcagtcacactgtacaactgtcaccacattattgtcaatgttgtgggttgtaccccgtcgtggccggtgaaaaccgttgtggctgttgcaaaagcgatcactgccaccacaagtgtcaccacaagtgcacaaacagatcggagcatctcgcgggcacaaaaacaacacctcgggaatgcacctgctgtggtgtcgagtacgatacatatgtgtgcgttgtctgcaacagacctgatgggtacagtgtcgtaacggacgcagaagtgaggaaaagagtgcatgaggcagagttggctgacaagcaaagaaaatccaacttaaaacagtctaaaacacaacagtcactcgaacaagagggtgacacgggcagaggcaaatcagcaaccaaaactcacagcgctgatcccgacccaagtaccgccaacgcgaccaacgtggcgcatgcagcacccatcacggagccaacagcaccacttgcggacccatcgagtgaccagcgtaacaccgccacaccaaccgtgtacgatttactgaagctgcacatggacgacttaatcgaaagctccacaccaaggctgtattcagatgtgttgagttcatccaccgcggagtcaacaccccaggttaacgaacagccgaccaggcaaggccgcgacccaccagcagttgaaactcgggagccgagcattaatgttgtgaaaccaatgatgacaatgagtatcaatcacccaaccgacataacaaccatcacggacatcgaagcgggcaatgtcgagggacgccttttccttgaactggttaacctcacaagcttggaatttgctaaaatcatagctgacaatgagcgaggatgggcatgcgttgaaagtgaaacagaagtgaatcatactaaaggtttatctcaaatcaaatatgttgggaggaatattacggtcacaaccccaaataattttgagatagttgaaatcactgacgttagtggccaaggcaaccaatgtggttataacgtcatcaatgacaccgtgggagtggacaatgacgtgtggacttcaattatcagttcacgacaaatgtacagcgacatggaggtgcagcaatactgcacaatgatgaacctaaatttgttgctattgggtaggacaaacacctttttccatcgcccaaacacagcatcagacacattcattgtcatgcgccattgcagcttggacagtccagaaggcactccaaaagagttatggttcaaacattggcagcgcgcgaatgtaaaagttaagttttcaagaccatgggtcccgattttctacccatggttggaaagggctgcctgggacaggttcatgcttgacaacagaattaacgaagacttttggcaattagcaaccgagcaaagactacaattgatggttgaattttacacaaacaattttgtgtgtagcaacctaaaagaaggatatttggccatgctaacaatggatctaaaggcatgcccgcccgtcatttacaataactcattgatgatggaccaaccagacacacacctaaaaggctgtgtggtgagcaaacaaggtgcggcaaagttaccatacgctctgacgcagcaccagtccatagagcaagactcaataatgggtgcccccatcaatcagcaaccaccaaccaatgagtcagaactggaagtgtggttgaacaatgaaatcaagctagagtgcattgattatgcatacaatatggagcacatgatgttattggaagaagagatgcattttaaagagtggcagacagtcaacgtaaagttcgtaggtcagcgtctacgattttcgaaaggcttgttcaaaaaaattaaaacaggtgacataatcatgattaaagtggcaggttacaaaatgacaacaacggtgaccatcagcatgcgccaagtgctttgcgacaagccgtacaccgggccgacaattgaccaggccctggtgggcgtgaacaaacaaagccatgcctccaaaatggcacaagtgatgacgttgttgagcaaaaccctggacgccaagcacatatgggataaattgaaatcagcaacagtgatcaagggcccaggtggcagcggaaaaaccaccgggctgcttcgtgaagcacacaaaggcagcataattctaactaaaacaaccatggcaaaaaccaacatattgaaacacaacccaccctgccccgtcatgaccctagaggcataccacaaaaaagatgaccaacatacaaaaatactcatagacgaggccggcatgttctcactgctagattttgccaccctaagaatgcaaacaaacacacaaataattatgagcggagatttattccaaatagggcaactaattacccacgtacacccaggaattagggattaccaaccttgtatcaattttccggcaaacgtgaccacactaaattcaacatacaggtacggcaagtctgtgtgcgatgtgttgcacacagctggcatgaacgtgacgtcgttggcaccatatgacacaaccataactctattagacattaaggaaatcagattgggaacgattaaagagttagtcaaaaagtacaccccggacgcagtattgacattttaccaatcacaaaaaaatctggtggaatcatggcagctggacccagatacccacaccgtacacgaatttcaaggaaacgaatgtgacacagttatggtgttgcaaggcccacaagccacagcaaccacaggaatatggaataaaccagaatattgtatttcggcactgactagggccaggaagcacgtggtgtgggtcacttttaatgcaaccacgggcatgaacatggtacaacgatgtggtttaagcccagaactgagggccacccacaacaccacatcattgacccaaacttgggcggacatggtggaagaagaccaaaccaaagaggcaatgcggggcggtgggctcaatactgacgggctaaccatttacgttggccgcaacaccaaccacgtcacagatttaaagtccatgaccaccattaaaaacaaaacagtagtgggggacgaagaactgtttgtagtgttgctgcagagcgactggttaatgggcatggttgacgagaacaaatattatctggtggccggccaagaactagccaccatgaaagagccaaaaaatgtgaccgattggaggcgcttgctgtctgacctcacaattagcgagcaggcaccatccagattgctgcaagcagccagcaatttcttctccgcaacgatgattttcaaaaacaacatggtgcatctctctgaagacagggccgtgttgtacgtgccagacacacaagcaaaactaaccgagttagaacaaaaaataagggctaaaaccaagctagtgcagataacaagaacccacaaagaattgaaactccactttctgctcaccacggtggggaccataacaattactgggcgacacagaatagaagtgtttggtaatagggcgctcaactacttgacaagtcatgttgatcaagttaatgacgctcaattcaaggcatgggttgcacatttgatagacaacttcagatgcacagcgtgcgcagcagagatgtacattgatccagtggcattaactgagcacttgtcaaatccaaacagtgatacacaatggaccgggtgtagcaggtggagctgcgaaaatttcaaagccccaccaagctccgaagaaaactcaatcgaagacgtgatggacacagaatcgtcttcgtcagaagaggaaccggacaaggaacctgccaatggcggcactttgctaggcgacgaagcagccacaggccaagagtgtgagcatgaatcagacgaagaatactatgacacgattgacaccattcacgtaaaccccacgaccgtctgcaccacaccgcacaacagaagtggccaagacgacgttaacaacgaaattgttcaactaatgtcaatagcacagccaagtggagggcagaccgcagaaaaccaaacagcaacaacttcccgcacacatcaatcatcaccaccacccaacccccaacaacaggagcgcacattaaataatttggtggtgtcaaccttgcataacaaccaacccagacgcacatcaagagagagggtgatgcacctcgtcgaacagtacgcgcaacacaccaccgggtggattatctttccgcgatgcatcagcatcaggcatatgcaaacagctctattacatggctgcccaatgcactgcagatggactctgcaacgaaacgaaatgtgcaacatttttaccctcatggccgggctgactagggtgctcaccattgcttttaatagagcgggcaacgtggttggtcccatggacggaagtgtagcggacgatatgtacatcacattggtaacacatgccgtggaccaatggcggttggtggcttcgggtcaaatggagctggatgaagatttagcattggaggggttgaaattcattaaccaatcacgattgtcaccgatccatgtgcataggcatgacacaattgtcattgatgataccgaatggccggcatggatcggcgcctccgtgaaggaatatgagccatttatgaccagaccaagataccaacaatccgtgacacaccacgcaataaagaccatgctaccagaattgcccactgaagtgtgcgggtgcgaaaccaaaattcttgacgaaaacaagatatgcgccacatacccctggttagacacgtatctaatgacacctgatgaacttgcaagttgcattagttggatccaattcgtgcagtatcgacaaattgggggtctgaaaacccacacagttatagatggcacagtagtggatagcacaaccttcgggggctgtgcactgtgcgcagggctgaagatgacaataaatgaggaaattacaatgttaatcaatagtagatccggccccgaacccggaaccatgtgggtcaacatcaatcatgtaatacaatatccacatgtgatctcagagctgtgcaaaattctagaaatgcctggcatgatcatgcattacccagatttggagctgtattggtccgtcaggcaactgaccgaaatggacggcatgatacaagacttcggccaagccatgtcgttaattgagcgactcagagcaggagttgattgggtgatagaaagggtcaccagcttcagtttacaatggaagtgtgaccaatataacacagtcaattcggagtacgtgaccatgctgggcaaagcactgttggacgcaggggttgatccatcattacactgtcatgcaatcactcatacaggcacactattggtggggctgccaacaagatggtcagcctcgggccaaaccattgttatatcaaaattcaagggcagatttcactgcaccagtcacgcactgtccatcacgcagcgatgggagtggcaaagcgctagtgacatgctagtggaggcagtaaaacaccgcatgctgatactctttgcaaacaaattgagtggccgcagagagttggttcggtccattttggaagattctgtagccatcaacctggaagaagtaagaagggccatgggagcagttaagctcaacttgagtttggattaccacagggagcacaacaccggggtgaacgctatgttgaacgatcgcaagaacaaactggtgcagggacaactcgtgggcccccaccaggcaatgtacttgtcaccaaatcaaatccggatgtttggcagagatattaatagaacatgttgcacgcacaacttgacagaacacggcacctggctacccgacgaagggttatttgccacagcggaacaggtggcagcgaaaataatatctggctggtgtgggaaaaacaaattgtgcacatactcgggtacatatagctatatacctttagtgaactctagctggaacatgaaaagtgtaaaaccattacgtagtacaccgctatacagtgcgtgtgcactagccatgaatggggctttaaacaatttgatcacatctattaaaaacttgaaagataaagcagaaaccgtgaccgggtttgcattgagtgataatgaaaaagccctgatagccatgtgtgacaaggttgcaaccacaaaaacaaacccttggtgcagcagcgagtcagtcagtgatggcgacaaagccatgttgggaagtgagtatttaggcctggactggcattcgttttgtgagcaactggtaaaaaccagtgcaagggaaacattcattttggtccccgagcaagacaatcacagcggtgattactacaacatccatgacaggcaagagtattttgaatgtcaaggggttgcgagcaccacattaataaccctcaaccccaccacatggagcaacctgcttatcaagcacagcatgaggtacaacaacaaaataatacacgcagaacagctaatgtcaatattaggtttgcggcttgtcagcatagtggtgacctccccaacagtgtcagtgcctggccattattcaccatgtataccaaacaacagcaatcaagtggtctacaaaatcaataccccacaattgtcatggaatacatccgttttcagccaccacaagacaacagtaaaggtggacaccaaaatgtaccgccatctgagctttagagttgtgtctgatacgtgcagcttcgaagatttattgtcctacgccagaacgtacatgcaaactaccacctacactcagactggatactacagggagaatttggaccaaatcaatgatttgcatctcatttgcgcgtgcgtttatcatgaatatcagcagaagaagacaagctggtgcactctagccgcgaaacattgtgatttaccaaccatggatgtgggccgggtaatgacacatttgaacaccaatttgacccatgccgcatttaagctgatgcaagcatggaagttgaatgacggaactttgcatgacattaaattggcttccaaagacacgataggacccgagatgacagacataatcaaaaatcttgccacaatgaacattgagaaaaaagaggtgagccggcaaatcatggtacaaaacggagatcgcgctttgccagacatcacaacaaattgcccatgtgagaggcaaatgactagatccaacgatgtagtaatgccaatactgggcggattggtcaatgacggatcattgctgacagagtttttggcggaagaactacgatcaaactcaagttattggtgcttaatacaatccagcactgacggcactaacacggccgtacagttaggggacggagttaggcgttcccacaatttgtcaagtgtaaatctcaaaaagaaacgtaggtgcaaacaccccggcggtgaaataaaccttacagagaagtacctacagcaaaggatggaaatcactgccaatatgagcagcacgaacgacactcaatcacgtgagtcaactggcccacctatcacaggcacatacagcacaccaacaatgaaccgatgcaagaccagtggccatgaaccatcagtcggcaacttacagcaacctgcagcgagtaataatgaggacgagggcaccaccgaaagtacctggagactaatggaactatcgcatgtcatcattaaacgagtgtcccaagccgtcaccagcagggtgggtgaatgccggcaaaataattgtaaggccagatccaaggaaatcaaacgactgttgaaagatttagcttcagcagtgtgccacaagtgcaatacctgggcagaggagcattttgcgaccagcaagggccacgaagagtctggagccacggaaccgctgaatagaaccacaacacccgagccaacaccaggcagcacaagacccacaggcggagaaagagtgtgggtgttgatgtccccaacacaacgcgttggcatcgtaatgcaagaattaaaccaggcccacccacatgccgagctctcacaattgagaactgtgactagtgacaagagtcatgacaacgacaacatggacagtgcgatacgcgcaaaggccgaccaattgaccgagctaatggagagtgggtttttatcagaatttgacagggcgaacaccattagctcgtgcgacgataacatcttggaatgtgaagagcccacgacgtttgttaaaaagcagtggcagcagtgcaatgtggactgtgtgatcacagaagagtcccatacccaaagcgacctggaggaaccacagttgaccaccggagcctccgagccaacgtcgagcgaggcacaatcacataatgacaaaaatgcatacgcacgcatgtgcgacaagacccacaagctgttgtgtgatacaacggctaacaatgccgggttgatggaagattacattgaatcaacaacactagagtggttgactgaagaagcaaggcaagccaatcgtacgtgttggtgccatgtgaccatgcccgaatgtttacaagagttagtgggaattgatgcatgccatgtcgttgtcaaaccatatgctcacattacaggtgtggccaccagatccaaagaaatatacaatcccaacacagaaggaaactgcgtggtaaatagcctgaactatcttgagcaacgccatcccagagtagacaaagtgatggaaagggcttgcggtgtgtacgggaagaccatgtggttgacggagtccgacgcagcagccatcagctggttgtgcaacctagaaacccgttataaacacaaccaaactgtgcatgaattggctactgggacaagcgctgccccgttgtgcataaatagagtggcaggggacgcagtagaccattgcacggtgcacaacaccactgtcagccatcgcagcgaaaagccgatgcaaattagcatattgagcagggcaacaacaattgaaatagagcaaaacatgtgcactcacttggacatccaagttgggctcacagaattgctacacgatttgaacgaattagtaaacttccaaggagtggatgagtttgtcgctaaatacagaagcagtttttctactcaaagggaattagaggcaaacttgcgattaaccggccaagtgcacaccatcaggaccaaatccacaccaatcattccaggcgagtgggtaaattgcgccaggctaaaatacttcaaaaacaccagcgacaaattgaaaccaggagagtgtgtcctgtggacagatggcgtgcacatgcattgggccgctgtgatatcttcaaatagacacggccagtacgtgtggacaccatgccccatgacgaccgcagttcctgtggtactacgaatttccatgaagtgggccaaaccagcaccacagtcacccatagcaacaaacacaatattgggcgagatccagcatgtcacagcactcaatgaggcgaccgcacggcacatggtatcacacaagctcgtggtaggtaaaccaacaattaacaatccacatgcaacagtgctggttgtagcggattttgacaatcgcaagcatcataaattcgacgacagaacggtcttgcgttcttggaatagagaaaatattgtggtgatcaataagtgcccaggaagggtgccaactgaagtgttttttgaggatagcgacatgatgacagcagtgttgtaccagggcgaccctgagattcacatagtgacagaccacacctcaactgcccattgggtcaagagcttcttaatgagaaacaagacgagatcaacggtgaagcgtaacgtggtggtaatttcagattcttggcacacgttgcaagaaaagaaaacgcaggaaaggcttcaacctcacgtgcacaagatcaatgacatgtggcacctaaacaaactagttcctgggacctttactattggcacggaacaagagttgtgccaactattgcaaattactgaaccggatttaagtgtgacaggcctgttagctaacctaccgttgcagctaacaatacacacagcattccacgaacccttaatgcacaccagctaccaccgaagccaattaataatggttcgcaacgacaaatatgtgcggtccgggttcgtcaacaaaatacaaatcaaggcagcccaacgtggtggttcttggatggaaatcccagcaggaacaactgcaggaaaatggtgggaccaagaacaggacgcacatcaactgccaaacattgacgtgtcaataggtaaggtggaagccatggttggtgcagccataactaacatcccatccactcagaatcgaacatcaacgcatgaagggaaaaccgcaataattccttggatggactaccccatgtacgtcgacaccagcatagcggacacaccagcattagaattggttccagcccaaattatggacatgtgggacaccacagatttgagtgggtatttagacagatttgcaccagaaaaccagttcagcatcaaagtgaaaactgtgcccacaaagttggcacagtcgataaagagcacactagttaaatacccaatatacagcaggccagtatacacaaaaatggccaaccaagaatttaacgcagtgacaggaaggctgggtaaagtaacacagtacagagtgggggattattgtgcaatcagcgaggcaaacggcatagcaaacacatttttccaaaaagattggaagcatgtggtggcagaataccaaagcaacacaataacttataacacagacaaagtcaaagaatggttgcagggcagacctaatgtggaaagtatagtcggggaggttaacaacattctaacggaaggatttatgaaacacccaatcaacaagctcaacgttcacctcaaactggaatctctgttgaaatcacaaccagttgtggatcataggcaaacaaaggccaggatcttagtatggcaagcaaaaggcatgtgtgccatatacagccccgtgttcaaaatggcaaaagacaggttaaaatcactgctaaacacaaaaactgtatatgcagacggattgcgtccggaccaattagcactgagagtgatgcaagcggatcctgccaattacatcatggagaatgacctggaacaacaagataggcaaaccgatgacaaactgttggatgtggaaatggcaatttaccacatgttgggtgtgcaggaagaactgttgtcgctatggaggcagtgccataacaactggaattttaagggaaggtcatgtcgcggagaacgaaattggatgaggctaacaggccaggccaccactgcactaggcaacgcaataaccaatttgtgcgtgcattggcggctgtgcagcaaattgggcaacgattggaaactgtttgtgttattaggagatgatggagcgttattgaccaacaggacattgtcaaacaaggaggtaaaaacccacggaaaattgttgtataacatgataatgaaacccaatacacacaataatgtcggcacattttgctgtttcaacatatacaagttgcccacaaaccgatggaccatgggccccgacattgcaagactgcgaagacggtttgaagtaactaacggggcgtcagaggccacccttgtcaatcatcacgcaaggtgcatgtcatattgttgtatgttaggatcaatattacccattcaacaattaatcaaggagaggggttacaccgtagagccaccaatgtggtatgattggaactccaacgcaagagccacagaggacaagtaccactggctaccagggaaaagtgacacagagctgcgcatgctgctggatatgatgagacaaacaaactacatcgatcataaactgttgcactgggtagaagcaacccgctag

SEQ ID NO: 1146 - DNA, 14655 bp, Hot pepper alphaendornavirus
  source 1..14655: mol_type = other DNA
atgactactaagttgtctagaccttttgctttacagttattgggtggctctcgcctcccgaaaactcaaactcttcatgggtgtactggaaacagtatacccatgaagaaaataaataagaaaaacgattgctccgccagaaaagcattcaggcggagtaaatttaaatttaaaataagtaaacaaaagactatatgtcccgcagttatggcacataggttggaagaagagttggaattcgtacaatttggaccagaagagtgtgttcctgatttgaataaagtggacattagaacaattagaaatatgatgttattgttcgaacaagaacattgccacgttgacgtaactgaggaagacgttaaaaagtatttacagcaaagtcaattgcaaagcactgaaccattttatggtggtcccagtaaaatgtattatgcaaattgtaggccaatgctattaccaccctcaaagatagatggtacaaagactgaagcagcatctagtctgctaacaggtctaatacagaaatttggaggtagtgttataaacatggttttattggactgtgcaaacaattactccatgacaccgcatgtttataagataggttcttcatatggatataaagctatggaactaccaaatgtggaagcagcaatgacctgtgcgtgttgcggtattgttaatttggtgtggctactagacgaaactgaagggcttacaaaatcaaggtgcggtgtgtgtttgcaaccattactaattgataaaatgctaccagaatgcatagcgtggggtatgttagaagtagtagatataacacaactgagagttggtgctattgagctcaacaatgcagagataacactgcaactagatgggcaaccaccattaagtgcagccacgttggcgaagttgatagaccaagatttgaggaatttaaggtcagtcatgtcacgcgcaatgagcaaaacaatttacgtgccaaatggattgacagactatcagaagaaagagttggccattgcggttccagcttacaaactcttaccgatgtctggaactccaaacccacatgccatgttagctgctgaacggagagtttgtgcagtgactatgggcgacaaacttaagcgaggaaagaaaatcttggacatagggactagggccaatttaacaggcaatgatagttggcacggaatgggaccatgcctggattggagagacgtggaacgctaccataacaaaccattgacagaaaacacctgcgaccacactgtaaaagaatgtggatgtttggatggagaacaaccactgtcaattagcgtggatgcaatgtatgacatagacccagcagatgtaatattattgatgaacaggactggtacaaaacaattgttcttttgcttgagcacagcggaagttgattttgacaggacgaatggcaaattggcgcatggtcaaggggaatggattagacatgaagacaaattggttacagtgttacgaggtgatgacagaccatatgtaaatgattggaaattgaccaaattgtggtcaacagccgatttaatacaggttggccataacgaaataagtgttcaaactgtgaaagttttgggcaatcacataattagggtagccacactggttcctgatggtatggattgtctgcggaccaggcaagtgggggcacagaacttaacacatctggatattgtggtgcctatgattgatgtcgaaagctggttgaacgtgttgggtcctccaaaaatgtgccacaaaaccatgaaactagacttggcattgtacagggcattgtactctaggaatttaacaggaggattatcatttgaaaaattaatagaatttggattgggatatgcccacgccaaatacaccacaaaaacaacaaccatatcacatcaacatgtaaccgcagatgacgtcagaacacatgcattactggcctgcgcagccactaggcgtaagtttgcttgggtctcatcagcattaaagctaaataacaattccaatgtgtttggattggatcctatagaagtgacgaaactaatatcagttgatctagctggcactctagtaatagatttatggcaaaagatgttgccagaagggttcattaaaaataggatagatgacttagtaactcaggtgacatcatggataaatgactcattttgggacacattggattcactgagtgggcagagtaaagtatttaccccaaatgtgtatgtatggccatcaacatgcgacgagactgtcttaaattctgagagggtttgttatcaccatcagcaatggtgtgaccaccctatagcattggaagatttatgtgaatgttgtaggttggtaacatccttgcctaactcatctagatgtgaatgctgcacagtgggcacgacctcgcatgcttgccaacacaagtgtcaaggtgggcacataatgataggagaggcagcagcacacaagtgcaagtgctgcaaactcaatgcactaactgacccatgtaaatgctgtgcaagcaaaataaccaagcacccagatgctcaacaaccaattggcgctcaagtgtacgcagaaccacaaagagatatggcaaagaaaattcaaaattataagtaccaaggtttaaataaggttactagtttaccaaaacacacgcaatcggttggtgcaaccgctggtgaagtgcaagaattggatgtaccacaatttgaaccaactccaaccccgtcatcaattataggtttgtggaaggctgaaagagagaaacggtcaataccaacaataatggatggtggtactacaagttcccctggttacatggcaccaagcgtgagacctactgaagacccaaccactaaccaatcaggagaagatgtaagcatcattttacccaatgacagggaattccaaaaggtagtgctagagctaacaggattaactgattttagttatgtgagcaacttaagatttggttacacagaatctgttgcaagtcaattggcattacccaatgagccaaaccctgaggacagaatagggcttagtgagttaaagtactttccaatgggtatgcagcaacaccaccctgatttgttgacaccaataaacacacagtcagtcggtggggatgggttgtgtgcatattatgcactagaacatggctgtggaattaaattgtcattggaacacatgcaatcagccttgaactgcaagcaacaattttcaacattgcaaataataaagtacggtaacatgttaggttacaatgtggcagtattaacagaagaagccataataacgggtaaagtggacccaaccacagataattttgtgtgcatacttcacacttttgaagctgagactggagcaccacattggcaaccttgcaacgttgtacaaaccggggatttggaaagtacaccgtgttacaaaggaatgttcaaacaatcaaccattaacaaacaattgagtttaataccatcagatgtacaaggaacagaactaaataaagaattatgcaaaattgtgttacaaataatcaagcggacggttccaaaattgtcgcagttaaaattcggtcgagtggaaattaatatgaatactgtaaacggcgtgcacatgctgtctaataataggcttgggcgacatgacccaggtgcaggtttgtttagttttgcagtaggtgaacaagatgttgggctagttgaatgcctgtgtcacgattcgctgccattgcatgagttggatcaattagaaagcccattaaacataaccacaatgtataactgtgacataaatgaattgagaacttcattaatgcgcaacactgtgattcagcttaggcaaacgttgatacaggcaaagggtgtggaacccagatcagaagatgcttgggtaaaagtgtttgcactaacgcacaaaattggaaaagatacaagattgctaatgttacaagacacaaaaataaaatctggtgatgtgatttcagtagacaccatgtttggaatacaagacagagtagtgtggaaattcaatgatggatttcaatgtctagattggttgccaccaacaattggaacccagacaataaaaatttacatcaacaaacggagtttcaaaagtggactaataaaattgatgaccctgaataggccacatgttaagtttgatcaatttaaagagttagtaatgtcctcaaattgcataatagggccagctggtagtgggaaaagcactatgatcgccactaattggactgatggcactattgcaatcgcaaagacaacgtcagcggtaaagaatttacaaatcaaaataggtggaccaaagaatttggtgatgagtcatgagaaatacgcgtttagctgtttgcccattcatgatttggttattgatgaatgcagcatgttcacatggtttgatttgtacttttcattggtggatttaccacgctctttaactatgtacggggaccctcatcagataagtactattgatacattcatgttgggcggcgaacgcatactggacaacatcacagattacgttataagcaaacacacgcttaaaacaacatacagatatggtgctagcatctgtgcactactatccccaatagtgggtgaactgtcaagcaaagcaaaacatgacacaaagctagtggatttaaatttgccattgtgggacaatgatcagcttaaaaagattgtgaaagagcatgacccagatgtgattttaacccaccacaaccttaccaaacaacgattggcaggtctatgccctaataaaagagtggaaacaatacattcatttcaatctatggaaccgaataacgtgatggtagtgcaatataatgaaggtggaaattcaaaaatatttatggacaaacgatatgcaatttctgctgtcacaagagcaaaactaagcatggtgtgggtcagtatagaagtgtcaaacaaaatgactttattggacaaattacggggcactgagctagacatcaccggaggaggtgaaccatctgaggaaaagaaacaaagtgaaacattacaaaagaggttattggaagccctgcaatctggtgttgatgaagaagcaatggctaaaccagtattcccagaagtaggcgaaggctccaaatctgtacgtagtcatgttgagtacaatttggatcaaccagaaactaagcttgacaatgacaaattcgtgactatgaatgatatagacacaattttggacaactacaacatgagcaaacaaccgctattaatttatgatggatggcaagattttgttgaaagatggttaaacaccctcccgaagcaagcaagaatggttgctgacgagagaacgggcgtggtgacaatttctgtgttgggcgtgaaattaataatagttgttgataaagaaagagagtattacagtttgcaagtggaaagtccaaggtggatgttcaacgtgaaaaacagcgtgttgtacaaatacaaagcaggtcttagagaagaatgggtcaagcacgcatttggaaagaaatactcggaagttttgttgttattgcgtccagctcacagagattggtttaaaacggtgttgcaatgggaaccccacttctcaattgtgagagttgaaccaagcaaccaaccagatgacaaggggaaaaggattgcacgggaagtggattcagatggagatgaatgggaggatgcattgagtgaggaacttgtagaggaaactgtcacaaacattgagacaaccacattggcacaacttgaaatgaaccggttgatacaagacagacaactgtgtaaaaattacccagcattggcagaattgaactatgaacaaataagtactctactcaacccgtcatcaccaatgttttatccaatgaaatcaacatcagtgttggcactagtgaatgccactttgccaaatgtgagattaacaaccataattaaagaaattagcggtggatttgagttaaccataagtactacagctcaaattgtggccataatcactgtcacagggcacggattgcagttaactgtgacaggtggtgagttaagtaagaaggtacaagaatctatattggagttgaaaataaagtcatacaacaaagtcgcgccatatgcaggagtgtggcaaactgaaagaaatttgacagatgaacagacacaattaatacaacagtggtacccttggttgacgttcatggccgatgcacaagaaaaatttggtggaaatgaattaaaagcactactcaatcaagacaggtttgatgttccaggaaaactaaacggtttgctaaaatcaatgcgagaaatgcattggatgttaaaggaggagggcgtagttactgaggatgacatggattatgtgtgtcaaatttgtgatgaccaatgcatgcattatggagaagaagtgaaactggaaagtggcagtatagcattagaattgcacctgagtccaacctcaacaagaatactgagattgtgcagcgaatgggcaacattgcaatatgatataggtggaatgtttacattaaacattcaaggagaaaaagtgaaagttgccgcatttggtggctgttcgatatgtagtggattaaaatttacttgtaataacattgagttgcttcgcatctcgcctcagcgtaaagtgggaaatgtcaggaagatcaaaataaattgtgttgcatacccagttttgttgcaaagcataatgtctgccatgcatattagcgtagtggaattaaacgcagaaattgataatgaaccactctatgtagatttattagcggagatggacgaagctttaaaatgttcttggtttgaattgggaatgttattggagcgtattagcgtggctccacaatatttatggaaactattacaaacaggagagtccagctcagcatgtaccatttttgaacatgaaaacgaagaaatcttgaaagaattaaccttgcatgcaccaaatatcgaaattccattaaagtctagcaccccaggacacagatcattgaggggtcgtccgataggtgtgaaatacaagggtgtgaactttgtgataatgaaactcggtgataagtttagttgtgataatcaattgatggcagcaaaatatgcatggacctacgtcccaacaatgatcatggtgcagcgttacttttggatgcaattaaataggtggccatgggtaatagctaaattgattacactaaatgggaaacttgcaaatgttgggttgggccatgattttgacatgccaattaattcgttaaatttacctttaagctatcatgaagccaacaacacagcagtgaatagatttttggtggaaaagaggggtgaagcagtcttgagcacaatgaagaaaacatatcacatagtatttgttagcaagttgcaattgcaaaactatggtccaatgttgcaacgagattgtgatggtatgccaatagaagaacagggatgtgaaacaattgatcagggatttgacatgttgactgagcaaatatgtctcaagtatttttataatgggctgtctaggggagaagtgagtcaaatgataactgattacccatatctgtcaatattgacgtcgagttgggcgaacttttgcacacccccagacaaaaaatatgcatttagataccatcaaaacctagctgattgcaataacatgatggaaaaaatggaacactcttatggtattggaaagcaaaatacggatggttccaaagaaaaggatgggaatggcaaacaggacattttggaatgcattgagttgcaacacaaggaaggcaggggaccatggttcactaaccaagcagatgaaagggtgaaaattatgtcccaaaatgtgcttatgggactggtacaatgtcgtctcaacccacatgaattagcagaattaatgaagaatggaaacaaaacttgtgtgcatatgataatgccacaaatgatagaacgcaacaatcaattatttggagtggccagcgaagatggttatcagttcaaattctggtatcacaactcaagccacttaactataattaacaggcaattgttgaccatgtttcaaaccggtcaatgtgttacaactccacacggtacactagtcatgcattcagcaaatcgaatactgggacattgcatggtaaaagtcctgttactaccaaatcaggctaagttgcccaaatatgttagaccaaatatgcatgataaccagcaaaaattagtaaagttcaagatgccagaaattaaaaatttcaagcaatttataaccactggtaaagcaatagagtacaaagaagtaaacatgtcattaaaactttatagagcgttatcattgagaatgttgcgcccaggtacaacaatagatgatttgttagcgtatgcaagaacctacagccatacagttgcatacactattagttctagaagctcgcagcaaccacaatttgtgactgaactgatggagtgttgtgtgtgcgtgtatgttgaaagtgttaaattgaatagtgcagctgcacgagtaatggacataattagtagcacagaacaccccatagatcaattggggaaaataaaaaatacaatttggtttgctttagttaaagtgttggctgactgctacaaatggttgggactcgatacaaccgttgaaaatttgattgaattgttcacatcggtaggcaaagaaacagttggaaatgtcattaaaaacattgagaaattagtagttgttaggatcagcaaaattgacacagcagaccccattatatgttatcatgatgacatagaccaacatgagatgggcaagataactttggacgacacaagaagaaaggtaaagcaggtgctgtcaactataaaagatagcatgtcatggggagaagaagttaggagaaatagagtggaactggttgataacaacgagcagcacatgcgcaacccagtgtcaacttcatatttaacgagcaggttagcaagaagagttggtaaggatagggatgaagaactagcaaagttagtgccagaaatgtcacagcaatacaacagtagcgaaatgtccacagccgtcacaagggtgattaagaatgtggcgagaaaattggagctaagaacgcaaccaaacattgtgacgtgtgtgggtgatgaccgatggttaagtgaagaaagcttgattagaaaaggtaaagaacttatgaatgattgctttacattagatgatttgagaaaagagataaatgaaatgcgttggatgtaccctgacgaatgtcgcacttgggaaaataaattggtaatcttcagcaccatagggagtagaggtgatattgaaccatacatcgcttggagtcaagtgatacgagaactgggagcagaatgcaaatttttagttcccactgattatgtaggttatgtgaacaattttggctttgaggcattagggctacaagtgaactctcaggatttgataaccacatgcataagtgctgaacggtccaaatggaacccggtgaaattgtatcaggtgtggaaaaagatgtttgaattaatagaaaatttgtttaaattcaatcaccaacagctgatgcagttcgtgaatggtgctgatttggtggttgaaacaccatttacacacattggggtacaattggctcaaaagctgaaagtaccctgtttgtttgcaacggcttatccatgggaacaacaggctggaatgacaactagggctgacagcatgaccataatggaaataatcgcaggtgtagctgcatttgctccattcaaaaaacatatacaagaatggaggcaaaacatgttacaattgcacaatgaacgtggaataatggtacatggtgttggtaacccaatggtatacctacacccagctaagactaaatggtggcgaacatgcaaaacttcatgttgcatgggttatgccaacacaatgacagattttattcaggagggcgacaaagagctctgcattctcgcaagtgaaatgaaaagcattgctgtatgctttgggtctatgacaggcaaaactagagcaaatttaacttcaaagttaatagacaaactggacagccaattcaaaatgatagtggtggatgggagctatccacagccattgaacaaacctaacgtcatagtagtgagagaggcaaattacaatatgttgtttagttgtgttgacattgtgattacacacggtggaagtggcacaacacataatgctttgcgaaaagattgtgttgtttttattgaaccacattttggtgatcaattagcctggatgaaatctgttagattgctagaatgtggtgaaagtgtagccaaattactgtccatgccaatagaacaagtgatgcagaagttgccaaattggacaagaaatgcaaaaatagtgggtgcgcaagtgaggaaagagaaattttatgtcaatctgatttctaacagcacagtgctatggcacaaagcggccgagcacaccacaaatttgttagccaatataagggagccaacacaatcattagaagtaaacacaaacaatgacgtgagcatgctgaaaagagccaaactgaagtggagtgattgggaaacagaagcaacattaacaaccagactgctttcaaaggttcaaccagaaccacaaccctgtcaccaacatagcagtggacaaccatcaacatctagtgacaagggcaacacaccccaagggcccagattgcaaaggccggctcggaaagtgtatgaatactcatatggaggtgaacaggccggatttgatatgcccgagcaaccatccggaattgaggttatagagaggcaggaattaagaacgcatctcggaattaaggctcatggcatgggatcacaaataactagggagttgccacagttgatagcgggtgcaaatactaataataatgacaaaagcaccagcgatgagagcagctcatcacaaccaagtaatagagcaaatgagccgccaacaacaatagaggacgatcagaccacaacagatgtggaagtggttgaaattgcaaccgccaatccagaagacgagccacaaattgaacttgtgacagttgaacaggacgctcaactcaccacaacacaatcagaagaaactccggaggtgcactttccaggtttttcaattgatgtaactgatgaattgacaacaaaaccagggttaatactcaacatgttcgatttgaagccaagtgacgattggggtcccccgatggaggtcatatccatgaacaatgtacgagccatattggagcccaaaagtcaattcgaatgtgccaaagaagtgttaacaatggcaatcatggtgcaatatgagctaactgaagaaaaagcgtcacacattttacaaaaatgttaccaatggttaaaaattgccacaaccccgagggtagaagatatgagagccataatttgtgcattggacttgacactgggaataaaactaccagatggcaaattacggttcgaacacaaaggtcccacaggagaaaccggatttgctgtatttatcactagtggtgtcagcttagggcactgcatattaaaacaagtgaacatattgggttctaaaccattgaatttgcaaaaatgtgtgcaaatggagttgagccgagaaacacaaaccgaattgaatgaattgtttaaaagatatggaggttgtggtgattggactcagcagaacttgccatcattgatattaagtgaagatttagctggacaagtgtgggctgagctggatactacttataccagagaggagtttttatacaagttacaagggacaaacctggtgcacactgcagatcgaatggaccagccattgacaattacaaaatgtaggcaaagctggtcagctgtgttttgtgaagagcaaatagtgcccgaccgctggtattgggttaacgatggtggaacatggcaaggagcaatagcagtgcaattaaagaggcacaaagtattgctagtcaatagtgcggaacaaagttggggcaataaaatagtcattcttagaactgacatccggttaggtgtgatgaaaccaatgcaaaagaaaaagccaattcacaagaaaataatagtacctggtgactgcaaagtgacggcattgaatcaaagcacattgtatgaatctaacttgaattattacggaattgcactaacaggtatacaggatgacacctgtgatttagtggctgtgtatgaatatgacaacagagcacaccacaaatatgatgatagagaatttttgactaagatgggtccagaaaaaaccattggatcaggttttgaaatgactgcagaactatggaacaaaatcacaaatagggagatgccattgcgccatatgattcataaaggaaagcacaaagtggcattggagttctcaaaccaagcacaaagattgacattcacggcagtagcaaatagcagtgaactgagctatgttgtggaaggaaactgcgtgtacattgcaatgcacacattgcaaccaatcaaacaacaatgcttggaagagtgggccacatacatgggtgcaagtggtggaaaagtccctcatgtagacgatgtgctgaccaagtattcccagtggacaacacttgacaagtttttgcaagagcacggaaatgatgtaaatcctaaacacgtattgggaaatgtgaatgttgagcacagtcaagtcagaataatgattcaacctggtaggtctacaacaaaattaacaaacatagtcaaggttgagatggaatacgacccgccagcattgatccatagaaacctatgtgtgactctggaggtgatggttaaccgaaaagcgggtggagtggatgaaccagagttctggaaatttgctggagattttaagcaaaacagtgtgtctcgctggtgggatgcagtaacagttgagaagccaaaaacgaagttcgatgctacaagattcacgcaaattaacacggaagcattgataagccatggtgttactcacagtgatttttcagggtggagcatgccaggaggtgacacaggtgatgcatcaaacatgccatatgtggcagtgagagagtggtcaaatgtggttgacaatgaaatagcaactgtggaaattgcaagctatgacataatgagtctatgggaggacactgatttttcagactggaatgagaaattttgcccgaaaaatgaggcgattgtcaaatcaaccatacctgccactcaattgaaagtcactaataagtatacgatggtacaatatccaatttatagcagaccagtcttaacaaaagcggcaaaccaggagtttaatgccataacaggaagattgcacaacattacaacttatagaagacagaattacaatgtggcgaaagagttgcaaaagtttgttttcacttactttgatgcaagtaaagcagacatattggcatctttcacacaaaataaattaacttatagtgatgcaaaagtgttagattggttgcgggacaggccagacagtaacaaagttgcagccgagttggaggtaattttgcaagagggaatgcaattgcatgctattaacagattaaatgttcacctgaaattggaatcactgttgaaatctgaaccagccaatagtttaaaacaggtaaaagcaagagcattgctatggcagtgcaaagggtattgtgcaatatttagtcacatattcaaagaggcaaaggttagactaaaacaagtgctcaaacccaacatagtttattctgatgggttgagagcggatgagttgtcagccagggtgaggctaacaacaggagtgaaatatctcttggaaaacgacttggctcaacaagacaaacaaaccgatcatgaaatcatcagatttgaaatggcattgtacaaactattgggcgtgcatgaagacgttataactctgtggcacaatagtcattttaattggaaatacaaatcaaaatcggttagaggagaaggagatgctatgcggttaacaggtcaagcgacaactgctttaggaaatgcaatcacgaacatgttggtgcacagaaaattggtgaatagcttagggaacaatttaagattgtttttagtgctaggtgatgacggattgatgttcagcaatgcaaatgtggatgtgagtaagctaaacaatgaaacgaaaataaaacacaatatgatgtgcaaaccacatgtaagtaacactcacggtacattttgctgtatgatagcttgtattacacaagaaggaaattgctcattgggtccggacgtagtcaggttaagaagaagatttgaatgcccaaatggagtgagcgaaataacatcagacaatgctttggctagggcgatgtcttactacatgatgttgggagctactccagaagtgatgggagagattaaaactcagaatttacctatacagccaatgcggtggtatgatgtggatagtattagatcagctgtggctgataaatacaatatgagtgatgagcaagtgttgaatgaagaacggcaactattaaagatgttaagagagaggatttattataaacatgaagttctgcattggtttgaaggaatgtga

SEQ ID NO: 1147 - DNA, 2244 bp, Jiangsu alphaendornavirus 1
  source 1..2244: mol_type = other DNA
gaaagtcataaaaatttatttattgaaaatcccataagtgatgttgaattcacacctattgacaatcgtttatatgtgacaaatctttatggttatgatagagaaacaattaataattggtttgaattaggtaatattgaaaataattcaatttcaatttttaaatattatgatgaaacattaaatatagaaaccagaccttacaaaattgaagaattattaaatttgtttaaaattgaaatagaagattggataatcaatgcaattaaagattggctagaggatcttaaactagattatgaaactacaacattaattaaaactcataaacctatgaaaataaacagatggtcaaaaattgaaaatgatagattcaaattaagtggtgaatatatttattttatagacaatttaagttgttttgaaattaattataaaggtagtggggtgaatgaagctacagcatggtctcaatttgaactagattataaaaagaaaaatgaatatgaaaataaaatggcttataaaatgccaaatgtggtggatagatctactgaaatggaaaagaaatatcctgatcttaaaaatttaccaggattatttatagatgaaaattgtgtaaatccaataaatagtacattaactacatctacacatcaaaaaattttaattgttgaagtttaccctaatacaaattttggtatagaggtacaaccaattaacttagatgatattcctgatgttaaaacacaagattattgggataattttaaagaacaaacagatacaactattatactaccaactaataaaaattttaagataaaatgtaatatagaaatcaattcacttaaaatgtgttctaaatttgctttagaacaatatccaacaatagctagaccatctatgacacaaaaatttggtgaagaatttaattcaataagtagtagacaaggcagcacaaaggattatcaagaaggtaagaaaatgaatccattatatgaatttgaattaatcaaatctaactattttagacctgattggagagatattgttaattcatatatttctagtccaataacttttgatttacatgagtctttaaattggatttcagaacattcaagaacagcagaagtagctaaagagttaaaaaattgtttagaattagggtttgaaaaatatcaattaggtaatgtagaagtgcatggtaaagctgaacaaactacaaaagtaaacaaattttcaagatggtttgatgaagtgattactagatcgattgctgcacaaaattatgcaatatctgcattattttctccagtttataaaaaaattaaaataagatttaaagatttattgaggaatgatattaaatatgttgatggaatgactacagagcaattaaatcaatatttatctttatatccaacttgtcaatttatagttgaagatgatttaacagcacaagattgccaaactactactgaaattaatgatacagaaaaaataatgtatgaatttttaggattaagtgattcaatttcaaatttatatatgttatgtcataaaaattggaaatggaaaggacatggaatatcaggctatggaaatgcaatgcgtttaactggtcaagttactacagcattaggaaatgctgtaacaaatttaatagtacataatcaatttgttaaaaagaataaaaatcatatcaaattattaatgttgttaggtgatgatataataatgatgtgtgatagacaactaaatgtaactgcacatggtacaataacaaagaaaatttataatataataagcaaagtatcacaaaaatatagagtaggtggctttttgtctatgattttacatacattgggtgattgtccacaactatgccctcattttaggagaatgagacatagattttctgtgtgcaattattcatttaatgacaaagaaagagtaattaaaactgaagcaagaacattatcatattgttttatgttgggtaacattaaagaaagtaaacaattagctaaatcattaaatgaaaatgttgatataccaaattggtatgacgtgccaaatgctattgaggcaaattgtttatatgataatataaatgaatttgctgttagaaatgatattggatatttaattaggttaatgaaagatagaaatttaattagatataatgcattaatgcctagtaatttacaatggaaatcatttaaaaataatcaataa

SEQ ID NO: 1148 - DNA, 14925 bp, Lagenaria siceraria alphaendornavirus
  source 1..14925: mol_type = other DNA
atgcagtataaaacagatgcaattactccttatagacaaaaatataaagatcggccactacaaactctgaacaaagaggtgtcaagtcacctgcagggttggattagattaccaagaaaccaatccgtcacgataaacaaaaacccttggattagaagttttgaaaaactatttaaacataagcccgatcaaatttttgacaaaaataaaatgaaattggtacctgcaataagaggtgaaaggaaaattagagacacagtcggcacagtcgccacaaatgtaacctatgatgatggactcggtaacgtgatcaatttcaatgaactgcacccattagatgtggtgaagatactttacaacgttaattgtcttggaatcgaattgtggaaatcggactgttattctatacaagatttcctaaccaaggtcaaacacatggaattagatgatgatgaaaaagacgaagaagactttttagacgaggatgatttggacgataagttaatagtaaaaatggttaaacctggaagaggtaattgtacaaatgaaatattacaagtgctagacaaaatacttaaaagatttggaggattcgaagggtattacaattacttcctagagaaccatttcaagcattttggatatttagaacacaaagatgatggatcttatgacttccacagtgttaaattcaaccctttgaaaatttgtggggtttgtggaagagtgaaccattacaatcaattcaacagaggtttaagacaagtgcactattcattgtctcattataaacagaaatcaaaagctctcaaagaagattttctaacagaatttgacgaacataataaaccaataaacatcccatggagatgtggttattgctttacagatctcaactacacggtaatagtggagaaatacattctagttaaaatgatagagtacatatgtaaccatttattcgtacttcaaggagacattgaacaattgctaaaattaggctatggagacatttacgatgacttagatattaaggataaagaagcaattaaaagccacgacgaaatagtggtgaacaactacttctatcatttacagagaaagattataactgtggggcaagacttcgatcaagccagtcacaaaataattaatgaggtgttgggaggttgttacttcagaccaactagcaaattgaacagcatcaaaccggaatttattgcagagttatcgacattttctgaaataatagaaagaactctggtgggcagagacatagcatgtctaggaaatgtgttaccaggcactagtagagctaatatccataattggtttcataaccagacttggttttcgaaggatccggaagtggcgtgcagttctgagcacatatgtggtcataataaaaattacttcatatacggtaacttgggattaatgggcgaaccattacataatgtgttaaacattgtggaagcacagagaaccttacaattcatctcacccatcatgacgacatcaagaacgttaccagacggcacaggaatgttccagagaacggaagacaatctcaatttttacctggatggtaaccctgtacccatcaactttaagaccgacacttataacgccttgaattattatcagattattaaatggggtaataaactataccacgtaatcgaggttaagaagttgagtctaacaagactaatggtgatagtaggtccgttcaatgaaaccgtggattacccgcgattaatggtggagaatgaacgtggaatcaagattcaaattaagttgccagacataaacagtttcatgggtggggtgaaaaacttgaactaccgtccaaatatctttgaattaaatgtaaatttattcaggtatttatgtatgcgcaatttgaacggaaaagtgtctcatgataccttaagatcttacgcagtagggttctcactcagacgatttgttgtgcacaacaaagtcatttccaacccaactatagcatacgaagatttagacatgcatatcgtactcagcagagtttgtatgatgaaacttaaaaattgttttgaaatcagttacaactatagcaaagcattaaaatttctaggaccttttagaagcatgataggagacatggaaagtgcattaacagcatcagtgatagggttaatgggcgaggcaatggaatctaccttcggtttgaaatgggagacatttatgaacgttatagatggagctagactacaatctatgttacaaggaataagtaagcaagacttctgggaacaattattacagttaacagaaaacattaaaactacaccaccaagagttctagatttagaaaggaaagcggaagaagaactactattcaacttgcaaagttgtatgcatcattctgtgaattgcaaccatatccatgctaaaactgagaaccgttgttgttgttgcaatctaccgataacaacagaaatattttgtaattgtgtaaaccacaaccaagtacaaacgaacttatttcacaccgaacattacggaagagaagagaatgtgcacgagcaacaaatagtaaacactaccacagacaaaacactagacactattgccaatataattatgttagccatgagagaaccagaggttacagcgagaagggcaccacgcagggtacaaactcaacaacccaaaataaccactacggagttgaaccaaacccaaactggtatagatcaattaagtttgaaatctacaaagttagacaaagagaaggagacagttgattcaccaaaatccaaggctagcagcttcaaatccaaaactagcagcataaaagaaccactagcagaactagatgattggaagagagttctacggcgagggcgagaaaaaccggatgatatggccaacataatattagataacataatgaccagtgctgagcatataacaatatctattgataatgtagaagctatcaacattctaggttacgattttgttagacattgttgtgagactgttcaatacgagaacgatttgaacgacggagtcaatgaagtatattatttaccacatttaccaatagggtcatcaacactaccacgcgacagttttgaagtgatagacaaagtgtacatcccaaattcagggccaatgacttgtgcatttgatgcttatcattatagcaatgatcctggtagcctccaagaaatgattgacattctgggagcacagccgcccttcagtactgaacatttaggattgtatgcaaaatggagaaaagacaacattatggttttgaccgacaaccatgtccacgtagaaaggtataatgagactagtaacacattcgcagtcattttgttcgagcatggtgaaacaaatgccgacataggacacttcttacccgcaacaataaaaagggttaaaccaacggacgtttattactaccatagagacccaaattcaattgcagaaagggatcatatcatcaagaagaggtacggagccatgtatagttcctcatgtttgccaccctggacaccaagagataatcttagttgtgaaatagcttactataacataacggtagatgtcagagtcagtgaagcaatgcaaccaataaaattagaacagattgacggagagtggtttttaagtaacaatccagaaatacgacagcacctagtagaaaaagagaaaattcatgctaaattaccaaagatatttgaaaaatacattagcaagattgaatacggattgaaacttcaattacctgtgatggaaatagaagagttcagacatatagataaagagttaccagacaattatgacaaagagttagaaagtgaattattggagatactaagagtttttgccagattgagtgagttaacaggaccagttaaattcagagacatcaaacaatcacataatggttatctaggaagttggtttggtaaatccaaatttcatataccaagtggaaaaacacacaaaatgaagaaaatggatgtggttatggtgcgtataaacaacaaattcattaaagcaacaattgttggatttgacagaaacaacccagttctagattatgtggcagtgtgtgaacagaaagcgactctcatagaattaaaagagtcaatggggagtcagattagagaactagtggggttatgtcaatcgtatatagatatgaaaacactcaaagccaaactcgcggaatcaaaatttttaaccgggcctgcaggttttggaaaatctacaaaaataggtcaattggcaatacccggagatttatgtgtagcaatgacaacttctgcggttaaagcattgcaggcaaaggtgacgaagggagttaaagtaatgactttagagaaagccttatactctcactccaagacagatcaaactctgtatgtagacgaagcgaccatgatcaattggttatttgtcggattcttaattacggaatcagctaacatagaattattcggcgcagaaaatcaaataggcaagagagacatgagcaaaactcctggaatcaggtacaacattacaatatcagatttcattaaaccggaaaataagaaagtggaacattacacatataggataggagagccactggccactttactcaaatccgtagaaccaaaattaacaacccgtgctagccataaaacaacatacactatcacagttttggatcctagtttaatagagaacatcagcaacataattaaagagagaaggccggaagttatcattacaccatactcttataacaggaatttaatcgaacagtgtatgaaacaggaaagagttccagtagttacaacccatgcttatcaaggtgtggaagtttcgcgctcaatggttgtgctgaaagccgatgccggtaacaaatgggacttaaatgggaatccagagtatttgaattctgccttaacacgagcgaaataccacgtggatataattatatacggtaattacacagacgtgacatcgttagaagatattatgactcaagttggtggtatggatttcgactatcttcagtattttgataatacagaagagagttcaagcataattgaacagagacaaaaccaagagacactgggagaacaacgtaaagaagcacaaatgcaaagcaaacatttaccagaaaatatcacaataaataccatgcacgaattgagtgaagagatggtaaatcaattgaacgaattgcaaatttcaatgcaaggcgcaaaattgtcctaccaaaaacttaatggtgggacaagtgtgacggcacaatttgcaggttcagtgattagtaaggtaactaacatagaaggtgtagtcacagtggaggcaaatccactcattagagggaaaatcatgcaaaatttggacacaccaatagacataccagaattagtcaaggaccattgtgacgccgacagctattcagtagaatgtaaaatgacactgagacaaacgaacaaaattcgggaattaacttggattttagataagacaatagacagggaatcgactcgtacaataaatggaacaaaaattaaaatgacaaaaactgcaagctgtccactgtttgcaggaattgtgtttgaaactgagaacgaaaaattagcaatatccaacggttggtatcacataacaaataggaaaataacgctaaataaagagaaattttacccaggcttaacccctgttattaaatggttacaactcaatattaaagagttgatattggacagtaacaataatataggttggctacaaatcctaaaaggagacatggctcacttcttgtggcaacttaaagagaaaagccacgcaaatacactgtggttattgaatttcctgacagagtctgacagcccaaagtgctattacaataacataataaacacatcaaaatacaacaaagcagcgagatcaataaaccagcccatggtaagcaaccacccttcagttgcagatcaccagaattacataatcaagaaacagaaatggttaaagaaccaagagatctacatattaacagatgggaaccaagtcattctagatgtgactacagaagaagaaggaacaaaatgggagatatttgcagtggaatgtatggcagacatggtaaaaacaggcgcaggtcttcaaggtatagcagccgctgagctagacataccaggcttaatgatcccgctacataagcatttggccctgggaacgacggtacaaaccataataaacaataacttattgaacctgaacaaacagacacggcccggggtgtacgatgtggtaagattagataaacagaactatggtatgcataaacactacctcaagagtcgtttcccaaggatgacaattacaacaggaaactatgaaattactaactcaggcatagagctagcactcgaacaaatattactaaacatgagaggcggtttaacggaaaatagtaaaggtatagtggcatattgtggattgtgtccaatatccatttgcatgactggaaaatattacataaagattgtgctgcccgatataaattcaaacataagatacatgtacgacatgcaaaaaccacagattgattctatgttggacaattttaatgctaaaagagatgctaaaaccgagttatactgggatcatgagactaaatgtgaaaggattttagcaggtacaggaatatactcattgacaatagaagagataacaaaacttctagataaaacagagtgcatgtatggatggatacccacgcatgcgaaaaacacagatgaatacatatatgacagacaattgaactgttatggatacagaggtggaagaattacaaacaaagtgagaaatgatataataaataaggttaataaaggggaaccagtactagtgaggtatgacaagagtgattacttagaggccacaatagtcacagaagtgttcaatcacagactaatcaaactacaatacaagccaatccctgcatgtaattatatagacaggagacttgggacttacatggacatcaacaatgtgataaaaattaaaataccttggatagaccttgacttattcagagtgttgaaagacagacaaatagtgaccattaaagaacttgtgattaacaaacgatttctgagaaacatcttattgagactaatgaccggagatgacacaccacacggagccctagaatacgccaaaactctggaatcaacacaagtaatcacagaaaaaggtatagatgatttaacggctagtaatttgctaataaccctaaatacaacttggtatgcaatttacatacataacagttatctggaaaaatttaagactttaatacattacttgaattacacagatggcaaacctgtagcagtactcatgttagaacaaatcttgaccggaataggtaatctgatgggggtagtgtctgacaaaatatcagaaattgcagaacaattcattacatacctaaatcgaaactataaccttacaaataagatggcagattgtattaaagaagcagagaaaacaaattggactccggagacaaagcaagtttactttaacagattttatttttcaaaagatgaggaattcacgctaagatcatggttaaattgggaagatgaacccgagaacgaagatgaacaattccaggatctagactatgaagagtcggaaaacgacccaagcatcataaatgtagatcctacatccttaccaaatgttgcatacaaaacaaatgaaactcactcacaggaggaaacactagaggagaaattgagtagcgcaactacagaggcaacatcatctgatactagcagcggtagcacaacaattatgactatttgtccagaaaaaccgaaaaagaacacgaaaattccaatacaagtaatgaggtatatagatgaaaaaggtagtaccataattagtagaaaacaaactgtgaaatcaattaagaaattacaattatatggagactttgatgaaaatcaattagtaacggctgctcaaataattgacaaggagtacatggaatttaaggatttgttggatacaccatggaatttaaaaattttgagtgaaaagttggaacaagcgttaaatgtacaattagaacaaaaatacgaagaattaaatccaaacacttatcaattaaaaaattattacaaaactaaacaagatcattttgaagtggaattttccgagcatttcatggtgccaaaaataatatggttctactggcactctattgaagctcctgaatttataattaggtgtattaattcttgggcgactcacaacaaagattatagaattgtactgttgacatcagaggacctggacaccattgttcctatagatataaaggagagaattcaaaacactacaaccacgaatttatatctgactgggtgcgaacttacgtattatctagataatggaggcgtatgggcagacgcaagcaccatatgcacaggtgatattaaagagatgatgtacaagacaatacaatcaagaacaggtttactgcaaataagtctaggtaataaaaacacaaaggtcaaaacaagtgaaaactggtttataatatcaagcacctacaatcaaattatgttgatgtggaacaacttgttgaccgatttgatgtgtcatacaagtgcaagtggagaaagatgcagtgaatggatcaagaaaaaatacccacgggagtttttggaaatagccaaaacgatggcctctgatagtgtggattatctaagatcttatatactggagtcaataattaaccaaattacaggattatatccagagaacatttgtagaagtgaaggtcaactaacaacctttgacagcttacctcattcagattggagtaaactgttgcaaatatatttcagtaaacagcaaagaccgcagttgattatacccttggtcaaaataatagacagccacagaacaatgataatggatgaattgctagatgatcccgaaatagaggaatacagtttattacatgatatatataacacggaaatcacactaaatctaaccacattgagtgacataatgaagtcaatggaaaaactacacagagaaaattttgaagatgtcaagaaggaatatgaattaacaaaaggactgaaagtttttaaaactgagtttgcttatggtatgtcaaaattaactagcatgttgtatgatagtttagcagtagctgaaattcaaatgattaaaccagccatagagtttctagttaaaagtggctgtcacttacacctagaaaaagaagatctaattatattgtcaggggttctaatcgggaaaatgaagtacatgaaagacttaagagaagaactgcagatatgggcggtacaagaacatataagtgaagtgaaacaaatagaattagagagctggtttgagacaaatgaaatcaaaaccatgaaattaaatgtcagtacaagattaccaaccaagcctgactatgtcatctataatgatagaaggattccaaaaataatatggtcttactggaacaatcaagaggtggaggaatttcaaatcaaaatgataaataattggcattatcataatcaggattatagaataataatcttgaatgaagaatctcttcaaaagatggtcggcaaaaacacatacaatttgttatctaaacagaccccacagtttcgatcagattgggtaaggttatttgtgctgagccattttggaggagtttgggtagactttagtggtttatttgttaaatcaattcacaatttagtggagtctacagtacaaaatgaagcaggatattgtcagatatcattgaacaagaaggaagagaaaaatattgtactagaaagttggttaataatttgtacagaaaattgtaaagtgatacaagattggtttgaagaaacaaaagaaatgacaaaatttgtagatccatcaggccacaacgctttagaatggatgactcaaacttatggcacagagtaccaagtggcaaaagaattcatactaccaaatttaagaatatatttgcgcatatatattatacaaataattgtgcgtctcagagccaaagatgaaccattgatagtacatagtgacgaggcagaagtctcaatgtttcataaattatcagcgaatgcttggatgaatttatgggactacgtagcaacacaaccaaaaggatccattgaagttagtataccctttattaaatggatagggattcaaagagacataataatgagccattacaggcaacacaaagggactatcaggccagcaagtctgttaggtgaagaaatggagtaccctggtgtgaactataatgtaacttccagcgcagaattgagttatcccattagggaaagtcaatcaactaaagagacaacaaatataataataaataaatattccagttgtagaactctattaatctgtgttggcagtgttggagatattttacaatttaaaaccttgtacgatatagccgaaagcgaacagcaaactccagtcataattacacatagggatcatgaaaagtttttcaaaaacaagagatcacattatataaacgtagattcagaagaattgatgtcattagtcaacatagtcttgaatgaagtagatttatggactgatattaaagccaatcatttagtcagacaaatatcagaagaaataacaggtatcgccaaaaattatgaacagattgtggataaagtggtggttaacagcgctgttccgaatttgactgaattaagcgacatactgccatgtgactggttggaggtatccacttttccagatgacgttgtgtttaaccccaaaaagaaaacaggattgaaaggggccatattgaaggccaaagaatggatgcatttcaacataattaggagcgaggtggatagaagtaaggttagatcactttggagaacttgttcaggatgtccatggttttatccacaaatgagatcacgctgcggaccattaacaatatggagctcacctagcaccagcaacgaaattaaacttgatgaacaagatttattaatcacctttggaagttgtgataatactattgcaacaaaagataaaattcaattaatagagaacttcattaactgtgggtatagagtaacttatcacgataaatacaaaatagcgatacctgggtctacattattcaatactatggaattatatcccggaaaatttggaataatcgagcaatatgatttcaggtgtattaaaggaggtaaattcacactgttgactcatggtggacatggtacaatcatggaggctttagccactaattgcaagataataattcaccctataatagcagatcaattccaaatatgcttcgtaatggaagcacagagaatggcagtgcgcttaaatgacataacaaatttgaatgactgtaagcaagcgattactaatttaaacaggttgatggatacagccaggattattaaaccaattataccattattattcacaccgttatgtgtctggtttcaaatggagcaaagacaggatgacccagagaacgccatatgtgtgtttggagaaggggatataaaagagcttgagacagagttaccttatggaatttataaactattagacgtcgaacatcaaatagtatacaatccgcaggttttaacaagatgtgtaaccaacagttttgaatcaatgctcactaaacacggccaagaaaaatacttgacatgcaacaccatagcagccatgaagttgcaacaacactctgtgaccgaacaggagttaatagatggtattctgagcatggggctgaacattacgataatttatagtaatggaacagcactagttattaaaccttacaagagaacaacagtttatttttacatagataaaacaaaaaccccctggcatgtgagcgcagccaaattattaagacacggggatcagattcagctcttgaatcctgatacttgtatcaaagacctaccacatagtatagaatatgagataaacgagttacacaaagtatattcttgtgccacgttatgtataccaaagttgatggcacagcagtttggaaagtcattcttcaaaaatttcttagcacgaattagatccacaaatctgcaagtactttcatcaagatcagatttgcatgtgacttacatatctatcaaacaacactttgatgcatgggtcggggacaccatctacccagacacaccactgggcgtagggtgggtcatcactgctcaaggttgggtgctggtaaattattttgtgaaagacggcataatagtggtcttttcagatgatggaatatttgaacaaaccgttttgatcaacttacatttacaatatcctgttaagagatccaaaccggtagtactgtccacaaaacaagaactggtaagtctgaataagccaacaattatgtacacgacactgaatcattgtgtgccaaggtcaagcaacctggtttccaatttccacaaacaaaacactttaatagtggctgattttgacaatagaaaacatcatatgtttgatgaaatggatatgataaaaagagcagccaaggtgatttttcataccaataaacaaatcaaagtggaagatctagccactagccataatgcaccattgaatcgaatgattattagacaagggaaagtgttatatgagcatgaattcgaacagaatgaggcaaagacaaatagtcaaattattcggaattatgtggttagcgaacaacaatgcataacaaactcacctttgacagaagaacaaatcaattacatacataggtacttcatccagagcgataacaaactcatagcaatagacaatgagaattacaatgacaaagaggtgaagccaaatgactgggtggtcacactgattcaaaacagtgaggtaatgtcgcaagatgtgattcaaaatttaaccaagctggtcaaagaacattcaatgtggcatatccatgatcaacacaattatgagttaacttcgacacaagctggagatgtagtgactttagagcacggagatttgtgggttaaatcttatgggatagttctagtatatgtccgggttggtggccaaagagaaagattaagttggaaactagacacaagtcaccaacaaacgagtaatccgaagccaggagactggtggggcctagagaagaaagcacaaacaaaggtgagtagctcgtttaagaacgtgctagcaataaacgaattaaaataccatgaaccagagacactattggtggatgggtcagatgcggttgaaagtgacgatttattagacatgtacatcccaccgtatcattatggatacacaggtagcgtcatcgaaccgctgttagattttcctgataacatagctatgcaattgtgggaagacactgatcaaacagattggttatctttgtatgcacccagtaatcagtgtcaacttaagtctagagaattaccagggaaaataatccaaacggaaaagatcactttgactaaatggccaatacgtagcagggctgtactaactaaagtttgtttcgaagagggtagaagtatcctaggtagaatgaaatcagtagcattcataaggaccacgacaccaaatccttacaaattggtgatggatatggcagacacttattttatcaaaggttgggttagcaaggtcaatgaattcagagcaaagagattggtaattctgccggaagatgtaaagcgatgggtggaaaccaacaaagatgcaaaaagaatagaacccgaattattagaattgttaagtggtgaaatattagtcaaaccaatgaatgacgtgaacatccatttgaaattggaaagtttattaaaagataacacgacaattatgacaaagcagcaacaagctagaattatagtttggcaaaggaaagctgtatgtgctatatactcaaatttgttcgtcaaagtgaaggatagattgaaatctatattacatgataaaataatttacgctgacgggttaagaccagatgaaatctcagcaagagtgaggctgtgcaaagatatagctggtttctttgaaaatgacttaactaaacaagataggcaaactgacgcgccaattataactacagaaatgtacatgtatgacttattgggagtacaccctaatgtgatagcttcttggagggaaatgcatgaagtttggagattcaaatcgaatcactactgggggcaaggtcaaggcatgagattgactggacaagcaactacagccattggtaattgcataaccaatttacaggtgcaccaagaatttgtcaagaaaaatttttctattttagaattagctttatttctaggagatgacatgtgcatggttttcagagagaaaccagacacaaagaacttaaggaaaaatatcgcaactaaattcaacatgcaaagtaaagacgcatggtacagaaacggagcaacgttctgtagtatggtcatgagtcgcacaccaacaggtgcagagctatgccctgatgtggtcagactcaagtttagatatgaagtaaccaacggagtgcatgaggcgaacgcagaaaacatccttatgagaaaggcctcttacataatgatgttaggtgagggtccaaacgtaaaggagacagtcacaaggttaaatttgccaattaaaccattaatttggtacgattttgagtccatgttgcgagcagttggagacaaatatgatatgacgcacgtacaagtgctagatgtatattataatctgttacagatgattaattcggaaaagctgtataggcatacattcagacatttttcgaacatagaagcaaaataa

SEQ ID NO: 1149 - DNA, 15744 bp, Lily alphaendornavirus
  source 1..15744: mol_type = other DNA
atgagtgaaacagacaaggagttagttattacgcgtcaaaacgtaagtaaactacccttgtctaaaaaactatataataagatgatcaaacggaaatacagatctgaaggctgcacgtatgtgaagcccgtcagcattaacaaacctgaccagatccgaaaattaagtaccaacttatatgtagttaaaagccacactggtgaagccaagataccgatcatgccagctgttggatttggtgaattttacgaaatactagataatggaataccatgggataatttaaatccatggggagtttcaatgctcgccgcttcaataagcatggggggaaggatactatgtgaacaggagattagccaagatcaatgcagcaatacactcttagaaagcgagtacgccatgcaaagcctaattaatgaggaatataaaagatggcccaatatatatcaaattaatggcaaattacagctcaagagaaaaatcaagcttaaacctgacacttatggcctcactaaactaagagatctaattggaatgagtcctgatttctgctggattcctgatgaccaagttgtgggagacaagttcaaggatgttactgtaatggttgctgaggaaattgtcagaaactggagttatcctaatgattttgctaaaacgctagccacaggagtgtacacacaatatgtcgtgctaaactcgcctggttgcagtaagaaagatctggtgaccagacacaacacttttactggactgttcatttgcccagaatgcggaattgtgaactcgtcatatgatcctgaagtattaatgtgcggaagatgccttaagcagggcttacagattaaaattgatgtgagccaggtggaatatttggatttagcgttgacagaaccatcagcatatgaatacgattattctatcaacagtcaattaacgagactgctaactcaaaattacaccgacggaataagtatgaacctcccggaatcagaagaagcacaacaaaagctagatgtgctaaactatgtgaaagccaaatcaagattggatattaaaacgcagtacgtgtgcagtaatttgactagtgaagaactaagctatcttaagagggagtttaagactttggaaataacaccaagaacaacttggaatgacctttatgggttgatgcagtctgaatgccattgtttggcgaccacagtgatacaaaggaatcaggaagacaacatttctattaaaggattttcaccatcatatgtaaatagttgcagatcgtctgtgactttcgtgaaaccggatgttaatacgcattggactgaaatgggcgccataggtggatctgactgtgatatttacaattttaattcattgcccgagcttgaaacactgatcaaactggccgacgtaaaatcgaggtacttaatagtacctaatattcatgaccaacacaacgggtttaccaagaattacagctatgagattagtaaggagtctggcctggttaaaatacttgctaacggaactaccgtagttttaaattatagaatagaaatgttaaatacattgcttaaaggcgacatattaagatgtggttccaagttatatagattagaatgtattaaaaagaccaacactgtaacgcttgttaagatatccaggattagtggaaagcaaacaccaatcagcagcgataatattaaggcggttcgaacaaatgtttataaaacttttattttatctctgccagactggcagcaaaatgtgaaaggaatccagttcggtcctttaatcaagagaagagtaagatttaatttgcctttcttagcacacctcaagtcaagatgtgagtcatggccagttagctatcatggattgcgtgaatatgccatcgtatccagcttttccagggtggaaaaagacgacaggaattataatatctttgacgttgattttgaggatattccggatcatgtttttgcggcatataacctgtaccttagagaacaaatcagttctcagacagtttcctggttgaaccaggaaaggcctttaggattagaagggattctccaaggcacggccgggggggtcgcaggtatagtgaagaatctggtgattgacagagacggaagatcttacctaaacactataatcgagaaaggctctgacacgaactggttccttagttcgcagtgggaggacattaaaagaacactcgagaaatgggaagcggtgccaataagcatagttgacatgtcgtcaccaatagattccggcgagataagccaacaaagtgaaaggtgcgtgcacgggtcactgatcgatcacttccctggtggttgcgtctgctgtggagcgattagagaaagtggtcaatactgtgaaacttgccgtagtgacacaaactgcaaacacaggtgctttcatagctgcaaaggctggaaagaccacctttgcactaacatcaacgtaggcaaaacagtcactttaaaggataagctgccatgcggccacactgtaacgcagtgttcatgctgcggggtcttatcttgtcttgaaaaatgcatgaactgctttgactggaatagttatacagatgatctagaccaagctgtcgtgaacctactcaagagaagcaaatcccagcctactgaacaatcatacgcaaaaattgtcaaaaaagcaagaaaggactacgattatatgtctgaagaggagcaggaacaaccgaaagaaactagtaaacatgggggcaagccagatagcacaccatggggtgcccgggttaaatacaggaaaccatccttgaggaaggctcctgtccaggcacaaaaagtgaacctaccgtctgaacatgataaagctcaggggatatttgaagaatatcaacctattctaacgcatgataaagctgaagaggaaaaggacccttattctgcagatttcatggatgaaaacaaaagcccgaaacacacgtcggacgaagatgaaactcttagagaaaataagtcggaaagtatcgttgatgaggagcaaatagaaaaggaaaacgcaaatgttaacgagatgctagccagagcgtattgcttgagcctgacagacgaaacctacactggcctagtagtagacccgagcgcgacaaggtatcaggatcctaattcagatttctttaacatcaactattgttacaccggagatgttatcatagaccctgattctatccagtccgtagctggaatagactattcgtacacacccgggttctgtcttaaagacacgctggcatacttcaatccaggtataaccgaggagagatgggaggaggcatgtttaacaataggaagcccactctcatggtgtgattacaatgacattccgagatttgctgactactttgaaatgaatataatatacgtgcatatcattaataattctattattcaagtaagatgtttctgcagtgatcctacggccttattcagttgcattaaatttagcaccggagagatcgacgtagaaaattataacttgcttggacactttgaaccagccttgattaaattcagaaaagaacccattgtcccgcccgtttacttagataccttaaccagggaggacgtggacgaactgttttataatgtaacaggtgacaacatgctgtcgaactacttgcaaaagagcactctagaaaggttgactttctgcaatgcagcaaacaaaataacgagaatgacagatatatcagccgaagtacccgaactgaagttcaaggctagaaacaatggattcacagtctcaaacaactcgagaggtttaaatgatgccaagtgtggccacataaatacccacattccaggcgaattggctgggatgaacttttccttacccagaatttataacaggtatgacctggagcagtggtatatggaaaaccttatcaaagaagaagagctagatgatgaaaacaaagtgttcagacaacgcctactaatcctaatttcacagtacttggaattaatgcaatcggccaaagaagttgaaagcaacaagaagaatatgaacaatgcggtagcattcactttaaaaggaatcaggcccaggaaaaagaaaaaagttatgtatatcgaaaacctgtcaataacggaaaaggttaaaaatggtgacctagtgacaatcagggccggtcccaacttgaatactgtacaagttgggaaggacattaagaagctcgttcttcctaatgttatgaaaccgggattggaatttaaggtagacctcaccttttacaaaattagttacacttccttgatcatagagatgagctccataataaaccgacaagtatcgctggcgagagtcaaagaactcttaaagaacgccatatgtcttgttggatacccaggaactgggaaaactagaacactaattgagatgtggaaaagcaggaaaggcatgctagttggagtgactagaggtagccaaaacagccttaggtatgaggccggcagctccaaggaagcctacataatgtcggctgagaaatgctcgattaataatgctaactctgagattgtgtacatagatgaagctacgttactaaccctgcctagactttgcactatgctgggcccaagggttaataagctagtactctcaggtgacttgttgcaaatacctgccaaggaatttagccagatatgcggattcgaaaccaccaattgtctggaatatgcaatgcggtatagcaaagaaataacgaagttgaaggaaacatggcgattcggggcgcggctgtgtgaagctattaatgaggcatttgacacagagatggtgtctaaaaagacaactgataccccaatgcatttggaacatttagatggattaaccaaggtaggactggaaagaataatagaagaaagaggaattgataccgttctagtctttaccggagaaacggaaaaaaggataagaaacctgataggtgaatcgactggagtaaaaataactagagttcacagttctcaaggaaacagttataagcgaggactagtagtgcaagacttcaggaacggaccatacagaaattctgaagaaatacaattcaagagtgagtacatgatggtagcgatgacgagatgtgaactagaagtgactttattgtgtacttataaggcctgtaactgcagagaaaatacaataacaaacctagctaaacatatgaacagacaattagggatacccactctgatgatagggggtgataagccgcagtcagacttaattaaaaaaatatcattgttggcagaaacattcatgaataagctaagttcattagaacctaatgtgattctagattggtttgagaatatcaaatcattaataataagtaggaaggtgcatcatttcataaagtcaatacaaggcatgattgcaaacaatgatgaagcggccttgttcaatttgctcagtgatctgagtttccctttattggaatccgtgcaaatagagaacggcaaagcttttgcaattttggactataacaaaactaactggggcttcttcaagaagaaaattatgcaaactgcgtacaagcgccaggaaataaccattattaacggcgaagtaaacataggaggaataactcttgtgagtgaacaatcgtggacgacagtggaaattaatcccaaaggattccaggcatgggaacaaaccaagatgagcaaagtgcatttcaaaatacaagggttcaagtcgatcatcaacttgaacaacactcacaccataaacatgaacattaggctaattaatcatgctgcacaattggcatggcacggggtcaagagatatctgtgcataaagttcaacggcatggtgttttcgataagccctaccgtgggatgctcgctatgtggtggaatagaaatcaggaatgcaaagaaagaactgatagtattcatcaataatacatatgatgacacatccactagagaaatccaatacaaggatgagagcaaccctataacgcaatatttaattgaattatggaaacccgaaagagacgacgacacgttctgggaacttactcaactaatcagccctgatgttaacctaaatttactacattgtctaatgtgggtggaaaggatcgggaccggaataagagggttgtttaaaggcaaaagcattaaccctgacgaaggacacctcttcagaaacgacctggagaacaatgaaattgtacacacaagatacgttaaaagagctcaatccaaaggcatcaagataataggaattaatgatccatcgaacgcatacatgaagaacctgtctttcctatggctagcaaagcacggtgcaacagaacaactagtgtactttagcaggcacaaagatgttaaagtaataccgataaatacgtcgccagagaataacttgcagctactcaaaacgctgtggactcaagaactaatgagattgccatacaacttaagtgtattaacggcgaatactgatttcgaaatactaggaatcaaagaaatacttaattctctggaattagacatagaggagcacaagcgaagaaacactaagctggtgcctctaatagatcaggaattagtatcacttttggctaacagagggatcacctgcccagacttgtatatccctcaggaacttttcgatgacgctaagacgctaggcatacaacctcatttcaacctatccacagatagtacagtttcctgcggaggaatgtcgtacattactgatagctatttctgcaagatgtttagcttgaacacagccagagtgagaaaagcattccatagcagattcataaacataagcttgagacaagacattgagcagcatgtgaaaatgatacgcgcgtccgggccgctgatgaacttaatcacatctgaatgtgaagaagattgtttcaatagaattaagacaaaggtgagaacactgaaggaactggcggcaaacaagtctaatgaagacaaaagcaggcctgatcctaagtcaatagaagcacttgagaaaatgctaactgataaaaaattggattctttggtagagcccagtagcaaaaattatgaagtggacattctaggattcggaatgagcttcattgaacttactatgaatgaaattcgcaagatagctcacgacagaaatgctggatccaattttgtacttttcctcccagatttcaggaaggaaagtgtcaggtgcagctttaagaaaaaaggagatcacatagtaggagttggggagagcttagattacgtgattaacaaggagtggatacacctgataaatggactatttgaacatcaacctcatgaggtttggcaattaccagacagcgttaaagtgatcggcagcggagatctttacctgacaataacatcaaagacaaacaccaggaccggtcctaatgctaaagtaatggaaagaattagcaacatgatacccgtcaactaccgtaacgatgaaatgattgccaaagttcctagaatgaacagcattaaagcaatcaaagaaactggagagttattcaacagttgtgaggttgtgcttgataaagacaccgtaagccgcctagtgagaagagcaatgactcccggctgcaccttaaacacgttacaaaccatcgctagaaacaggatgcaaagctcagtaataacgaaaggaggaagaagaggggcaggaagaacagacttactaagagatatcaacttatgtgcccttgtagcacaatacatagcaaacaacaatgaaaaccagatcacgaagtacatggaaaaaattgacactttcttgatggacaataaggactggaaaagatccactggggctttatatcacatgttaaaactcgaaatgaacaccataattggacaggctctagacattaaaataccaatgagggacttgagcaatgttttaggcgacttgatctcagtgtctctaggaggaaatactggtctaaagagtagtactaaaataatggtgatgccccagcctcacagaataatattcggtgaatattacttttcaggatccaggtataaagttgatacttacataaccacgggactcgaagtcataggcaatataattaggaacacatttgggcaaattttcaagaggcctactattcgaaactactggaggaaacccgctcagaccaatgtcaaggagaaactggatgaactaatagaatcaggagatattcatgatttcgagataagagtgtatgaccttagtggagggattttcaacatgatagacaagacgatgaaaaaaaaatttaacatgaacaaggttccacatacttcggtggttatagacagagcagaaattagctatggaaatggcatcaccgtcaagagcaagtccactaaagatccagccgggtcttacaaatcaatcccactaaaatgcccgcaaattagcaagtcatcgatagtagcagtgttgaccaaggagcaagaatattttaatcccacagcatatagtcccattgggaaaaattgtaatttgttctccacacacttagcaagtgaaataggagctctagatgaattgttggagaattcagaggagttcaatgaaatagtggaaatagtaacaacagttagtgatatgggcaaaaagctcaatgatcgcattgttaaccatatattacgcgctgacaggaatgttaacggatctgaaagtctcacaaaaataatcaaaaaggcatttgatatcataaaaactaaacctagacccaagaacgtgactgagctgaaggatatcatatggttacagtaccagttactaaatcacgacgatgataaaacatactatgaggcagcgatgaatcagaacatttcatattctgaatctgatgaggatgaagatagggaagaaaaagaacaattccaaagaaaagaaggacgtggccaagacaagcatggtgaacctacgacccgggattcatgtgaccaggacactggagcgacgttggtatcaacggagcaaactagatcccacctcgccccggagagcaaggaattcagtaatattcctgaaactgcggaagacagaactaggcaattaatagcaaaattcaagaagttcgaaatcataaatgatgatatcattaaactagctaacaaatacagagaagtagcatcagcaggacacatcaaggaaaacatgaattacccggcactaatcaaactaagaaatgcatgctggctgttgcattgcgaactaagaaaagataatatactggagcaactgagaatagaaatggattatgagaaacatctcgatgatactgataaactatacgaagtagactcagaccaaataaacgatccaaataatgtatatttctcaatctctaaattatccagggttgttgataatgaagtgtctaaaagtatcatggattggatggataccaaagagtacaaaagcaacactattattaaacctcccggctatactaatgaaagaattattcacccaataccaccatccttatataaacagttcgtcgaaatgcaggacaaattgactgtactgatgaacgaatgggaaaagatatccattgatgggaaccttagtgagcaaagtaagggagaaagcatgcacaggctagtaacaacaatggaaaattgtttaacatcaattgataaaaacaatatcaaaccggacactgtcaccgtggttatccattcgtcaatgattaaaacattatacaacgaaatgattagcaagaagaagccaaaggacaaaggcaaacacgggttactaatgggaaagaagcatgatattgttagcgaagaaaacattagaaactcaatgataagagagggattgtacaagcacacttcggaactagacactagaattgacgagtcattgaattccatggtgtatcacattaaactagattcttatatcaacggcaaagaagacttaggaataaagtctggtattattaagaccactacagaaaacgtaaaattcgacttattattgcaggatgtcatcagcaaggttcgcaacaggacccgatccagattcttgattcaaacagtagatttattaaacactaaagaagggaccaatctcaataagctactcttagaaggatacatggaccctgaaactggcgataaaccagaagcaggtaaaagtgctgaggacctgaaggataccgggggaacgggcgttacgcaacaccaagctgagccaagtgtcatgcatattgaggaaatcgacgagcaggaggaagttttccatgatagccggactgagcacctggtggcagaatcaaccgagcagctagaggaattcccatttgatgcaagtgcgtcaagcactctttcagaggagaaagccggtgaagtaactgaagaaaaaccatccgagaaagagactgagaaggaaaaaatgattcctatggtaagcacgccagaagaaattgtgaactccatttgttccaagatcggcgacacagagaagctaggagtgaaaaaggagctatacagcattctgtgcaagtgtgtgactgacctgggtcttagcatgggagatttaatgagcgttaaggagacaagtgaaacaacgatcaatattaagaccatagcaaataattaccttaatgacgtagatcctaccctccaaactgaagaagctaacaagtttgacttccaggttcgcatgaagcatattaaatcaggcaatatacatgaaataggcaaagaactcaatggtattaaaattttactagtagcatatggcagtgccggagatacgataccaatacagtcggttgccgagaaactaaaacatctcggagcatggatctgcctaataacacaccctgacaacattaaggttaacaggaattgctacaacaaaatcatgtatttcgacataagccagcaggaaagcacaggaaatgccacgtacgatagcgtagaggaaaatgccagggcacatctaaaattcaactatgaaaccgcaacagttgtcaataaggccgtcaacaactacaatttcgacatagcattgaccagccctatagttcctgcaaccacagccatcacagtatcagctgggatagttacctgcgagatcttctgtactgcatgctgggaagttggtggtactgtgtcaactagtctattaaatattccagaaaatgactacgaaatcgtaaagagcatagcaaactacatcaatacctacacggcaccagtgctatggccagcaatgaggcaaacgttggcagacagaacattaaacttaatgggcaagaaaagtgcagtagtgaccaatgtgctcagggcactagtgagttctgaatacatacattcggacaaggtgctggatgacccgttgacaattgtgctggggtacgcttccagctatcaacccaccctagcaatgagaacggactataaattaagaataggattcttctttggcagtatgagaataagagacaaagttcaggaggacttaataaccctgattagtagcttaatagcttgggaagtttcaatgctagtgcatattcaagactgtaaaattaatcatgaatataggactaagctttctgcaatacaaggcgtagatgttctggaggggctgataaaccaaacagactacctagtaatgtgcgacgccgtttttacgcatggaggggctgggaccgttcaagaaatactgagatgcggagcggtaccgttcatttatccattgttcgctgatcaaccttacatcgcagagaacattgaacagaaaggattgggattctacgtacgcagaatggatactagcatattgcacaaattaaaacatgtaaatagatacaagaaaagaattctagaactgaaatgggggcaaaagaaagtaactcagaatctaattcaaatggtggtggacatgatgaataatgtcaagtcaaaaagtattgaacatttacaacaagatgaccagagcgtaattacagaagaaagactagtaataagagaccaggaaatattcagtccagtaagcatcagattcgaacccgggatcttcagcacgagaggcccctgtagtgaagaaactgtcattaaaatatcggattcttacaccggagaagactgccttaaacaggcattcttaaatgctctcgtatcgatggaaccagagagactggcaagaggaacttatatacttagatatcacaacatcaaactagcaagtgatctgccgactttgacatttatatcatattacacctattgtaacattcaactactagggaaagtaaaccaaactgtcatatttgacaagacgtggccattgatcagcatattcataactagaccccgtctggaatcaggcaggcacgttgcccatgcattcggaacagaccacagaatggatctagtaaggaaaaaacataccatggacagcagcattagcgtgctggacaaggttgataaactgtaccttctgcaaaggacaaaccatgcttacaggggtagccttagcgacatgctggataccatactgtataagacggggtcagacgacactcaaacctgggacaaatacggggggtatctaaacgcatgctcgagaatgaaatgccagaacctggacagcattatagaatcaaaccaaagactggttattccagtcattaaagcgaccaggatgcgagatggggtttggtacaagatgcagacagtaatgaacattaatataggagatctagcgttagtttgcacagtcaaaggcgacgtttgtggaataattgccggccagagaggagaggatgtgtacgtgtatacaggactaaccttagacgctttgccagtactgatatgcctaaggttgctaagaaccgcgagtcagagagtgctagaactaaacctaaggaacacaatacgcgaagttccgcaattgtacgtagcgttcaactcaacaacactgaacttaattaatcaggaatgccccggggctcatgtagcaacatggaggcccgggctagaggaacgttgtaaagttctatgttcacattttgacactagaccacatcacagtgacagatccaagttggaaagaaagtatttgctggagaacttggggaccaataagcttaaactcattccaaaagaactgccaatagccaaagtaagattggtcaaggaaagtcagaaagcatactttaattacgcagacggggtcatacagctaagcctagagtttagagacgcccgcgaatgtgaaatagcaaaaatgttcaccaagctactggttaaggctagatttacaacgatgaatcaaaggaaatgcttaagaataccagttgatgatgatttggaaataacagcactaatgaccgtgatagaaattctgtacaatgtagatgaaacagatttgattttaaaaagaagcaccacagagttacctggacaaacgaaggagatttccagaacatacctggaagaaaattttaagcttccggataacgccgtggttgagactgtccttagcactctattcaagaacaagccaactctcactgctacagtcatggaaccgactgaacatgctcacacgataacaaataccttgaagctgggaatacagctagacccaggacacaggtggttagttatcctaagcccatttactgtatattacatgaccgaactgaagggaggaggcatcgaaattggcagctcaatagccttacccgatttgatagaagaactagaagatgggacgggccattccaatttagaacctggcgacatgatgatggatcaaaatccttcgcaggtagccggtcctaaatttggcaaggagacatttaacaccttcagcaagtggataagacaaaacaaatggacagatttcaagctagcatcggctaaaaacatatcaaaagctgaattaacgaagaagaaaatggtatgggaagaaatgtaccattacgtagacatggatggggctaacgtagaaataggaggaggggaaggagctgactacctgcctctgcaaaacgaaattgagattgaaagtgctggatacacaagaactattatgaatgaagatgaaaccattaatgaacttgagaactatcaggtcatggatctgtggaaacagaatagggatattattgaccatgtggttgcacactgtcctaaaaatgaccagaggtacacagtcaaggatggattcttctccatacaggaagttctgaaaacaacgtttagcgaatacccggagagatgcaggccagtattccatactgaggcgtatgccagcttaaactctcttactgggaggttagggagaagtgctgtcataaggaacttcaaaacaaggccaagtgtaagtcagacaatacagtcaatgagctatttattcttcaggaaagactggaaagaatccgttgagaacttcaaagcagaaccaatagtgtacaacgaaaaggactttagaaactggatatatggacacaagaacgctcacaaggtaataacagagctagaatcattaagcgcggaagggcctctagtgaaccctttcaatttctttcgcagtcatgtcaaactagaaagcattaataaagaaaatcctataatggatttcaggcaagctgcaccacgagctatcgtgtggttgccgtactgcatgccagccttgtttagctacatgtttaaaatggcgagcaacaggttcaagcttatactaaggaaagaagtgcactatgcctcagggctggacgtaaacgatatcgaacaaatagtacgaaacacagacgacagtgatgttttcttttttgataacgacattagcaaaatggactctcagatagacaaagacttgatagaggttgagtgggaagtgctaagtctaatgggaatttcaccggacgtactcgaatcatataagaccctgaaacgaaactggcggatttctaacaaatatattagcgtgaccgggaaatggctaaggcattccggtgaaccaaccactgccctaggaaacgggataataaatctggcgataacggcattgtcaacgaccgaaacaaggagacaggaccttaaactatgtttattcatgggggacgacatggtaatgctaaccaagaaaaaggaagacgtattgcaggtgaagaagaaaggtaaacacctagctaactcactacttaaacctagaattagcaggacatgctcccctttttgcagttttatagtaggagtagacgaaacaacccaaaccgtagctatagtacccaatgtcgtgaggttggcctataaatgggaggtgcctaatgggcagcatgaaacgaccgaagacgcagtatttactaggcagctaagttacgcctgcgtgttgggacgcaatgatttcagtaaagatatcgagaagaaaatatcagtgaaaacaggtggcgaactggaagtacccacttactacaccacacagacaatgataaagcttaactgtgatttgcacaacatggaggaaatgcagatggtgcaaataatcagcaaattatactcaagcttgcagaaacccaaaacatattcttacactttcctaataacgagcgagaacctcaggaagggaattcgacttaggaaagaaagtgataccctgaacaccaccgaatcccgaattcatcacagactagacgaagaaaatcactaa

SEQ ID NO: 1150 - DNA, 4245 bp, Nansha Islands sediment alphaendornavirus 2
  source 1..4245: mol_type = other DNA
tgttacatgaagggtataaggcaatacatcttgccaggtatctggcctgatatggaaaattggatttatgccataagggacaagggtttattagcagggtgtttgcactctgaagaattgcatagtttagaagaaattatgaaacaaaacccaataagttatgatggggaaataccaaaagttaacagagaaaagtatttggacttgaccaaagtgtgtactactgccagcatacaaagagcagtatcaacaaggaaaaattacgtactgataccatacggtacaagtggcgacctaggcatttttgttaatttacagcgggaattgctaaggcgaggccacaaagcagtactactaaccgacccacaacagagtgaatcagagcaaacactgctaaacaatgtggctggcggaaattgggccggaattatcaactctatatctgattattgttcatcaattaaggaaaaattggacttgagcaatgtgagttcggttgtaattagcccaaatttgaatgaattaatcacacatatcgtatcacacaacataaaagtaatatgtatgtcacctaacggttatagtgccggagtcgatcatgagatatcatcagcaatgaagaacatgttacatggttggaactctgaaattgattgccataaagtagccctgtgtgacaaagagtttgtgttaaacggttatgaatcacttggatttgacgattcacagtgcataccgataacaggtgcgaaaaatcatttgctgttgtacttacgaccgaacaaatttgataaactgagagaaacatcagtagagctagcgaagaaattgaatttagcattggaggtgtacgaggcaggtaaggataagcggtcattgcatgaactaattgctaatgcggattccataatccatcacggaggaagtggaatggtacacctttctttatattacggaaagccacaattgatatacgatgataagattgatagaatgcataatttagaaaacttatacagattagtcggtgattgtaaatttagtagtgtgaatctagaaaatattatagcgataaagtcacaagaaaacttagacataaaagttcaaggtgatggtattacaaatgttagcaattttattgaatctgtcacctcaaggaattgttggttgcaaagtaaccagttaatggactggccagaacacaaactgagtttagaggatcaatacattactaactgtctaagtgttagcaaggtttacgatccccctgagtctagaggttgtgtgggttcatgcataatagcattttccaagagtcagaaaggacactccgcgaggtcaaaactactgaataagataaaagaagatgattatcacgtgcatgaaattaaaaccttgttggtagcaattgggttgaattatgcaataaagattggaccagttgtgcatgttcaaacctgtgatggatcaagaccaaccatacacttggaaatagagagcaaagggaggttgaaccattgtaagttggtagagctagaatatgatgaaaatgacacagacagatattgtgcaagtaacaatcaggttaaaaatataaatagtatagatttggtagattacttaactacagaccaattagaagtgtttgacaatgcagcaaacaagaagttgaattgggtagagaggataggcaggaaaaagaagatacacattgaacaaccattctacgatgaaagctcagccactataacggcaaaattgcgacgaccagaagtggcagctttgtttatagcaggatcagggtacctttgtatcctgaacccactaacaccagggactgccgaaataataactgggtccgggcaaattaaagatggttatgcattgatggtgctattgacgaatagcatgtcagacaatattgatgctaaacagactgacgtggttagttggaacaatgaaactgccacagcattgacatcagaaaatcaaaggtttgacagaataagtaacacaatcttaggatccaacacggtgagaatattatgctgggacaccatgaaacatgacaagcatgacattactgacatattgaagcacagagccaatgttgttgattatcaaaacatagagttaatagaacgacagttgagtaacaagcatgtgttctttaccagaactatggacggtgattacatgactattccagtgacaacaggacagatgtgtgagtacacacataacaatgtggatgttaaattattccagacatgcatagagatccatggaagcttagatgaattatttgccatagcggatttattggaaccttattgtaaaatagaaaaagagaggagaaagattaagtatatgtttgcttccattaactcaggattattggatgttgcatgcacgaccacttttatagaggatgcagcatacaagccaaataatgagttggcttattttggtttaagaccaaatagatcagggggtgacaacacagtagagacaacttggcacgagccaactatgtcaaccaatgacggaaagcacatgccacatatatggatgggggttaaacaagacaccctagacactaaagtcgaattgactggcaatccagaagatatagttatagatatggcacacactctacaagatacacaacacagggagaaaccaacaattgagactggtgacccatgcgtgcaagacgtatcaatggatatgaagataattaagatggagtcagttgatatgattgatgacagagtgaccgatgagataggtgagtactgggacaatgaggacgttgtagacaatcaaatactattttctagaaaagatggtggaaatttgaaatccagagctatggctgggaatcaagtaatttttaacaaaaccacaatgacaaaataccctgtaaggagccgtgaagtgttgaccaaacaattcggtgccgagcataatgccgtgtcagtaagactaggtggaaaagaagaattgcaaagaattaagactgatccaaagacaaccatcaaggacttatgtaatgcatgttttacaaatgactggagagatagagtggtggctatgtctaagcaaccaataaatatacaaaaagaagaagttgttaagtggctgcaaggtagaccaggggctactaatatagcaagagaatgtgataaaatattagaagaaggcttcgacttgcatggcttgaatgaggtaaaagttttcaacaagctggaatcattgttgaaatcgtctcccgttactgataggagggatggaaaagtaagaatcattgtatggcagaaaaaaggtatttgtgccctattcagtagtgtgttcatggaagcaaaagatagattcaagtcactgctaagagaaaatataatatatactgacgggttaacaccactaaacataaacaaacgatttggaggagtgtcgaacgccaactggttcttggaaaatgacttaagccagcaagacagacagaccacacatgaattaattgatgctgaatttgttttgtataggttgatgggagtgaatccaaatttgttagccatgtggagaaagatacacaatcattggagagctcaaggtcaacatgtctcaggcctgtttgatggcatgagattgactggtcaagccacaacggcattaggaaacgcaatagttaatttgatttgtcacactgaactgattcaatcaaacaagtcaaagatggtaatgtatttgttgttgggagatgatatgattatggccactaagacgaaacccaactgcaaagaccttgcaaccaatataagagtgaagagaaatatgattagcaaaccacatttatctaataaggtgggtacattttgtagtatgctagtgtacaagaatgacgaagggcatgtagaagtaggaccagatttttggagattggctgatagatttgacgttactaatggtgtgagtgatgcgacagataaaaacataacagcaagatcacaaagttacctatttatgcttgggagaaatgacatgacagaaagggtgaatagggaaaaacactggaacttggatttgccagattattacaacctgagcgctgcagtgagcgcttgtgcacataaatacagtgtcacagaattcgacgtattagccagaatcaattctttaataaaatcaatcgagaagcctatgccaaacactatatcagtgttggcacaagcttacgaatga

SEQ ID NO: 1151 - DNA, 13884 bp, Oryza rufipogon alphaendornavirus
  source 1..13884: mol_type = other DNA
atgtctgtgatgaccatttcaaaattatgtaatgtgaatgctgcaaccacagggggggggcggagacgcccccccccttttaaaaataaaaacgatcaaatcaagtacaaacttgatttgataaaaccaaaaaccccaaatacaattgggtttttgaaaagaatggacgacataaaacgtccaaatatgggaactacggctttagatcctctattcgggtggttcagattacctcgcaacgtaaattgtagaatgaacaagaacaagtttatcaccgacttcgacaacttatttgagcattacaaaggaaagaaattccatacatgtaaagaagtcagtgtagtttgcgtagaagctatgaggggagagttacaattaaaagagagacactacggtatcgctcaatcattttcaccacaggatgagagattaagcaaattttgtgttaaaaatatgtcatttggtttaattacacgattactatatttaatttatgtgaaaggagctgaaatctacattgatccgacagtaaatgtcgataatttactcaaaaccatgagccatgtaattaaaaagaaggataattctatggaagaggaatttgaagaagaagaagatttcgaggaaatggacttagacgatatgggatatttggatgataacataaaagaaaaaggagaatatttcgaaatagtaccatttggtaaaggaaattgcactgaaaaattgctaaaagccataaaatttcaaatgaaactgttcaaagggttgtttaactatatgtatcatcacatcatcaatttcaaagatgtaaacgaaggtttcgtagaaataaaaggaacaagagacgaggaagataattctatgaattatgaatcatcctcaggcaaattacctcccattaaattttgtccattgtgctcgtgccctaatgcatatacccaaatacctagacgaatgaaaacttgtcactatagtgttaaaaaatattaccctaacaataaaaccattgatgacaaatttgagacaaaagttaaagatggtgaggtgatgaaagaaataccttggaggtgtggtgtatgttatacggacctgaatttagaaatagaagagtttaggcaagcaaatgttatcatagatataattataacagagagcctatatgtgttgatgggtgatttagaaaatttgatgaaattaggttacactgacacatatgatgacttgaaaaatactgataaagaaaatattagacaacacgataaaatcttggttaacgagtattttttccatttacagaagcgaattgtcacagttggtcaagatttagatcctataattaatgaaaacgtaaagaaaattacaaaaggagtgaattttaggtatgatagcaagtttaatagcgtcaaaccagagtttgtctgcgaattatcggtttgcagagaagagatcaaatcgcatttgaggtctgatgctatcgcttgtataggtgatttattaccaagaactgacgacattaagttccatcaatggaaatacaatgattggttatttgagccgaataatttcgatggatgctgtgacgtcgattgttgcaaccataatgaaaaattcgtatgtttcttaggtatgggagcattaacattaagcttaccacaaattttaggaattgtaaataaacagcgccaattgtatgctgttgtccctagatttaaggacaacaaatgtctcagggataacactggcacagtaattactgaaggggataataccatgctgtttttagatgggtgtacaaatccattgttgatgaaaactgacactatagaaacactttgtcaattcaataccattgtgaataaaggtgtgtattatattatcaataaggtgtttgacttggaattatgtagcactatatgtatattgggtccttacacagatgtgaatgctttaccagatgaaaaaatcatcaaagatgacaatattatcacaacgataaccttaccacatattgactccctgatggggaggataataagtgtgaattttaggccctgcacgtttaaccctcacacatccatatttaaatatttatgtctccgccatttgtctggccaagtatctcacaacactttgaagccatatgcagtaggctttgcattgcgtccaattgttgtgcacaataaagttgtatcccatcccagtgttatgttcgaaatgatagatattcctgtcctattatcccgaatttgcatgatgcaattgaaaatggaatatgatctcagcataaaatacagcgacaaaaccaagtatttaggaccattaagatggatgccaaaagaattcgaaggtttaaccactaggtatgtgattaatgttatagtggaatatttaacagacaaatttagtgttacagagggggatataatgaaagtttttgagagcacacacctggctgctttcataacaaaattacatgataaccacttgtggaccgcattattaaaactaagcaaagggatcactacggagagactcaatgtcaggaatctaggtgatacagattgtgaagcattaagcaacaatatccatagatgctttcatcacaatcaagattgtattcatgatctccactcaactgaattagtatgcaaatgttgcggtgtttctatagagttaggattgctatgcaaatgttgtaggggtacaactcctatcacagccttccaaattgatcaacaaattaggaaagaagttgatgatgagaatgaagtttacaaacacagatttcaagaattggaaaccaaagctaaagagatcagatctaagattgatcacaatgaattacagtggcccgcactgagacccaaaccaagaacagttaaatttcaaccagcatcaaaacctagaattgccaaatctctgacttcacaagcgcccactgacaaattgcaaccaacaaaaaatattgaggaaataatagagaagaaagataaaacactaaccacaattagtaatttgagcgaattcaaagcattactggatgataacacacgcaagatccaaattgtggatgattatgatacagatgctaaccaagaaggagtgcaagtggtgcacacagaaaaaggcaaacaagatgtcagaaccgaagaaattaaaaaggaagagcaaacagttacaactaagactgacgatttgcaaagggagacaacagacataaccattaaaaagggtgcagaagatttagatttagctggggaaggctggagacaaatgttctcaaaatttgccaagaatattgtaccaagtgttcgcaagagaattactagattatccaatgatgctcatgagttattattagctgacaataaagagaaagctttaacacgtttgaaatacgatttttattctcacgtgactgaccctgttgaatttgaagctaaattaaatgacaagcattccacaatgtacacaatgccacatatagcggtcggatttgtcgcctggcagcaagatgaatttgaagtagttgaaacaatctcactacctaattccagttttaactcatgtggctatgaggcttttaattattctcttgataaaccaataccgtgggctgattttgtgtctataactggcacagataagaattggtcagatttggctctgatggatctagcggctgacctgggtattaacataatcatggttgaacccaggggcacattcgtgagcaagagcaatccagattgtgatgattttatgtgcatccattatgatttaccattgccagatgaaagcgaaaagttaattgatacagtaagcaacagaataggtcatttctcaccatgcatcatacgcagaatcagaagaggtggaacatattatgttcatgacttaaatcaaaacatcaatgacagaaataaaataatacaaactagacttggtccacataataattgtaatagggctcctgatatcactggagatgagaacattctatgtgagcttatattcaatttacatatatcggaagatttatctgatagcatatcgagatttccaacagtttatgaattggacggaaagatgtacataagtaacaacccggatacaaaattgttaaaatgggaaaccaatcttatacatgtggagattcgtaatgaatatcataatctggttgataaaatagcatctgccttagaaggatctttgaaactttctgagttaccagagatgagacataaaagttcagaattgcctaatgaaatggaaagtgaaatagcagaagagatcatggaggttttaaggaccttctctagaataaattcaatgtttaatgataaattgaacgcagcattgattaaggattccaaagattgtcgtgtcatcccatggtacggcagaagtaaaataatatttgagaaaaaatttaatcataaactaaagaaatttgacacgttatgtttgaaacaaggtaaagaattgtataaatgtgaagtaaccaacttcagtgagggagatccagttgtaaatttagaattatacagtgaacaaagattcaaagttatgattttaaaagagtcatcaggaagcgcaataaagtcattagtcagtttgatggccgatcacgtgacaatgacagaattcaaagaaatattgaaaagatccagtttaaccctgggaccagctggttatggaaaatcaactatgatttctcaagagataacaagtggagatttatgtgttgctatgaccagatcatctgtaatgagtatcgaggagaaaataaaggataaacatgttactgtatgttctctggagaaagcatcatgtagtatgatgaagtgtgcaaacacaatatttgtcgacgaagcaacaatggtagattggctcagattggcactattatgtgaacgacccaccacattgaagttgtacggtagtgagagtcaagtgggggctgtggatatgagcccaactcctggcatgaggcatgtgatgagaatacaagatctattattagaccatcaagtaaataggtttaacactactactaacagaatcggtgaagaactagctacttttataagacctatggaactcaagttagtttcacttgcaaagcacaaaaccacatacaatgtaacagtgttggaggacgcagacttcgaacgattaccaataatggttaaccgttgcaaccccgatgtaattataacaccatacaattataatagacaaagaattgaagccatgcatggaattagcgtccctgttgtgaccactcatagctatcaggggcaggaagtgaacaaatcattagtgatacttagggcagaccgtacaggaaaatgggatttgaacggtaatgagttgtacctaaactctgctttgaccagagcaaaatatcattgcgaaataattatatatggctatcccatttctaatattcaaacggtgagtgatttgtgtcattacgtaggtggagtgcagccagataatacgataaacgaagaattggaaccagaaaatgacgaccctgaacaagatatgaatgatgaattacctacagtgttgacaatacgaacaatgcatacattaaggaaaagtgacattgacaagttgaacgaattaagtattactcagcaaggtcattctgtaagttatttttatgtacaaaagaatcatattagttgcgttttaaaattcatgggaaaaaccgttgctgaaatagtcaacattgatggaaacgtcaccataacaggaccatggtactacaaacgtaaaataatggacaagttagaccaaaaattggatttgaatgatattagtggtataaccatttgtcccaaaggtactaaattggttaagattcgtacaaatcaaaggtttagaaataaagtgagagaattagcatggattgtagataagtgtcatgatggaaaattgataattaaaatcaatgatgttactataactgttactaaacatgtaggttgtccattgttcagcggattgaaattcaggacagaaaatgaatattttgagatttgccaattgaaatattttagtttaaggagagaattagtgatacatagatcaaaaaattatcgagagttgagttgcattatgaaatggttagatatagattttaactctatcaattatgatgatgaagttgaaattggttggttgacttcgttatcaggacacaatattagctcatggagacaatataaagaacgactatcaagtgtcagcatgtggttcattaatgcttgctttgatagtacatcagtgaaatgtaaggaattgagtgatcgaaataccacgatttttaataggtatatgttaacggaaaagagggatctgataaaatttcatcaatcaccgataaaacatgataaattgatatacaaaacaatagaaagaagagctttgaatttgtggaaaactgagaatgtttatgagttgttcaataaagaaaacttgattctaacagttaaagatagttccgatgaaatactttggagacaattcgttagggagtgtttattagacatggatcggagtgatctgatcaagggaacctcaggtttaaatcttgaaattccaggattatatttgccgctggagaaacactatcaattgggaaccgaattacgacagattgttggcactaatattaataaattattattgctgactagtccgggaattcatgatagcataaggttgaatataaatgacaatgatgagttcaagacatccatattagcaagatatcctaaattaactattcaagttggcaattataacttgttgaatacagggatggttggggtattggaacaaatcatgttgaatacgtacgctaagaccagtaaaaataacccacaaatagtcgtctatggcggcatgagtcccagttgtgtagcagtgcaaggcaaatactacgtgtcgctagatatacctgataataactcctcaacaaagcgttattatgatagggaaatgcccatagtgaatgctcttgtttatagattcaatgaggggagagatgatgaacacaaagttagcttaaattatgacggttcatatgcaagacggtatttattaggtgttagtttaaaccacgtcacagaagagtatatccaacaaaaattgaacaattgcgattatttatatggttggtcatatagaattgataatcagtcaagttggtattccctcagcactagaggtgataaaatatactaccatggagaggaatattccaatcaaattaaaaatcaattagctatcaagattggtaatggaactcccttatgggtagattatgataaacaagagtatgtggaaacaactatcgttaatgaattatttggtatgtacttggtcagattcactaaacgtaaatttcctaatagttacaaagttactagagtggcatttacagagcaaggttacaacagcacgacaaacatagaagtaccatggatcaacacacaaattgtggatataatgagaaccagaacatttttgactactaagaaattgacgataaataataacttgttaagaaatttacttctcaggttaattacgggcgatgactctgaagatagcttactggcatatgctagaactgtccagtccactcaggtcatcactgaacgaagcatacaagatttgtcaactgttgatttgcatatcactatgagcacgacgtggtttgctttatatgtacaccacaattatttatataaattggaacatattatatcattaatcaatttaggagaagataaggagattctgttcacattattacagcaaatagtaccaggtatcatgaaatgggtaggaattattgcggaaaatacttctgagttcatcgaaacctgcatgaaatatttgcaatttgataggagtttccttaccaatttgagagaagtttctgagaagattaaaaatacaaattgggctgttcagggatctagaggtaaaatttggaacttttcctttaagaagttgattgataatgacatagcaacgctggacaatggtgcaccccccgataacgatggagacgataaagtcgaccaaagtaaatcggaggatcatgtctctgataatgaatccttcactacgtgtgatagtaccaatagtgaattggaacacatagatgtatcaagtgagagtgatacaacagaacaccatgatactggtaatattaatgacgaacctgttattgttaatgctttagcaatgcccgacactaagaaccaaaatctcaataataaaatggacgttgacgtcaaacaaaacaccacaaatctgacctcaagtgaacaaaccatctctcaaatcgaaaacaaaaatgcagttagtacagttgataaggatgtattagtcccatttaaagaaattataaagccgatcacaaacttaccaacacctacgtgcataaaaggtgtttgtggtgaggtaccattaattatatggagttattggcagggttcagaaataaatcattttctaaccacatgtatcaggtcatggcaggaatacaaccctgagatgagaattgtgatacttactgatgcaaacttagggaatatgcataacatattaaattttgacgatatgaagcaaatgtctcatcaagcaaaatcagattggttaagatgttattgtttagctaattacggaggaatttggttaaatttaagtagtatatgtgctggttcactgactcctttaattactgcaaccaccaatcatgagagtgggctttttcaattaggcattcctggcggtgtaaacaaaatgaaatacgaaatgggagtgatgataagtaccacgaaaaacaaaatactacacgagtggttcaaattggttaacgagtttgtcatcctttctaatggtgatactacagttatgttggatttgatcaaggatagattcaaaactgttgcacatacatcaatattggcagtcggtgactatggcaagttttatttgtgggtatatgtgctacaaagaatagttttagattttcttaagactgaaccatgtcacatcaacgctgagaaccaaaaatgtctattgtatatgggtaaatacgcaatagaacctactaaaacttggatcactttatccactaaatcttggcaggatttaggcataaccgttccagttgtaaatctgatcagctcaatgaggaaaaatgttattgacaattatagtgataaattcgaaaagggaagcgtcattgcaatgcttaacaactgtggacatctaaaatataatccattatctttatctcatttaataccaaaggagttgaagataactgaatcaaaaccttcttcacacagaatgaaaaagcataatgttgattacattttaatagcttacgggagtttcggtgatttcataccaatactaaacatttataaatatttaacaggccgcggatctaattatgtatttatgatccaccaagattttgcaaattatataaataacgatgacttttatgatttgagaataaacacaaaagaaacatttaagttggccatggatctatccgacaaaggatggtctagttgtctctctggtagcataaatcaactgaaagaaatgatgattgcaatgaatgacatggtatacatgtataaaaacacacaatgtaccatcgttacaacacactctttttacttgtacaaaaattatagccaagtttttggcaaagagtggatcgtattggagacatttcctttacaaatgatgtccccagttgacaggtcaagaagttgggtagaacaattcattgggaagttttatgatattgacatgcctttgcctattccaattggccaaggtattccgaaaaatcagagaccagtaatatcaatgactaattgtttgccttggatggtttccaattataaaatcaaaaaccctattggacctttaaatctattaagtggttaccaaaaacctctgaatatcaagattcctatgaatagtatttttatcaatttcggcagttgtaccaatcaaaatgacgttgagtatatgtataagttagctaaagacatttgcactttaggctatgacacaatattgtatgataagctgcatgagtctagggtatccaatgacattcttcagattgtcaacgaatgtcctggtaggataatattactgaaacattttaattgcattgaaatgcaaggaaaagttttcttaactatttgtcacggaggacatggtaccgtgatggatagtttatatagtgaaatgtatatagtgattcaaccgaaaatattcgaccaatttcactgggtaaaaatattagagcaatttggaataggttgtgctttaaagaaagattacaataaagaagatttgtcgtccgtgataacgttggctaaagcaaatcataacaaattaaaagatgtaaaggccaatgtaagcattaacaatgtagatttgattaggcaattaaatccacgcaaagatttacatggcagaatatacccgaatgcgttaaagcaagcagggttgatacaaagcattgaatttataaatgatagatttagtgagaacttacccattggttatcacatactaaatgacattgttgacgtagaattatttaatccccctacacaaagtcactgtgtgagagagtgtataaattatgcttttagcaccaatactaaagatgccatactggcatgttctagtttaagtgtgtccaatttgtttaaacctggagttacagaatcagaactagaagacggtctattgtccataggcgttaactattgcttggtaaaaagaaagaatggacgtttgatgaacgccagaccaggtcctgtcttatgtttaaaaataggagacggaggtatatcacagcattgtatactaatcaaaatcataaattatggcaaatctatgtctctaagtggtactcctgcagtgatctcgatcaaggacaatgaattagaaaatcatatcactatgaggttggctaacaacaccagtctagagttatgcaacccccacataatgatgagtcaactaccaaataagtggatcaaaaactttatggctcgcacaagatctctaagcctgcatagcttaagtacaagacagcagttacatgtcactattacttctatgtgcaaatcaggaattacgtacataggtgacacacatcatggtgacaagtctttaggagttggttactgtagttgtaaagaaggttggcaattggtgaattttgaaatatttatgaacaaattgattgtatacacagatattccctgtgaaaaccctggtgtgataatcaatctacatttagattatcctgaagagagattgcacagaacaattgtcaaagatcatgaacgttgggtaagtttgaacaaaccaacagtcaattttaatgaaattaataaaccattaatcagatctaatgagcttgtatcccctcatttaagcaagttcaacttaatagtagcagattttgacaacagaactcatcataacggtgatgacatagggtatttaaagagagctaacaagttaattatttatagtgagcccgctatcactttgaatgacctactaactacacacaacaaaccttataaccgcttaatcattaaaatgggtcatgtaaaatattgccatgaattcaattggagtaacagcgctagactatttttatctttgacaaatggtatttttgaaggaaacagtattataacagataatagattgtcagatgatatcaaaacttatttaattcagtattataaaataattggattaaaagtgcacgcaaagttgtctgtctatgagaatcgtcccgtgattatagctgtttcagatctgattggaactttaaatcagatccctgatgtagaaccagaattaatcagtcaattgacagaattactaaagaaagaagacaccgtcaaattgacatggttgactcacaataactgtaaattaaaacagagagattgtataattcaaatttctgaggacatgataagcataccctgctgtgaaatgatcataattaaaagtttgaaaggtggtgcagatgcagaaaacagaataggttggaagttggattcctccaactattcgttcaaaaatgaagataaatggaatattaaacctgctttggaaaggaaaaatattcaatcaagttgtaaggatgtcatagcaatgaacactatggttataaataacgttgctgttagtcctgtaataagacatataactcattatcaaaattacgaaccaagtttagatatctacatagctccttatacaatgaattatactgccagcacgatagaaccattgtatgatatgcctgatatagcctccatgcaattgtggtcagatacggatctgactgactggttgaacatgtacgcgccatccaataaaactaccattaagagtcgtgaattacctggaaaaattataaacatggagaaaataaccatgactaaatatcctattaaatcaagaccggtattaaccaaaatatgttttgaagaaggcgggtccataactggtaggttattttctgtcgttaatctgcgcactgtcactccagatcctgagaaaatactttgggatgtttgtaatgcctattttcaacctggttgggaacacaatataccacattttaaaaatgatttgttgattataacaccagaagacgttaaaaactgggtggaagagaataaggattgttttggcgtggaaaaagagttaaatgatctattagctggggaattgttaataaaacctataaacgatgtgaacgtacatttaaaattagaatcattattgaaagaaaaacacatatctttgatgaaagagcaacaggccagaataatagtgtggcaaaggaaggcagtttgtggtctgtttgctaaactttttgtgagatgtaaggaaagattgaaaaccctactattggaccacatactctatgtagatggactaagaccagatgaaatatcagccaaactgagacaaatatccaatgtgtttggtttcttcgaaaatgatttaactaaacaagacagacagactgataaaccaatacttgaagtggaaatgttgatgtacttgatgttaggtgttcaccctaatattatcgctagctggcgtgcaagccatgaagattggagatttaaatcaacaaactactggggcaagagtacagccatgagactcactggacaagctaccacagcccttggaaattgtatcacaaacatgcaagttcactcgaagtttgtcattaagaataagtactggttaaaatttgctttatttcttggcgatgacatgtgtatgggtttttcacacaaaccaaacacacaacatttacgccaggacatagcttgcaaatttaatatgcaaagcaaggactcatgggtactcaatggggctactttttgtagtatggtagtttacaaaacaaatgatgacgtagttgaaattggtcctgatgtagtcaggatgaaattcaggtttgaagttactaatggtgtgcatgaagcaacgaaagaaaacttattaatgcggaaagcttcatatttgatgatgttagggaaaacaccagaagtggatcaactggtgaaggaattacaactacccataactccaatacattggtacaattatcatatgatgttgcaaggcgttgctgataaatggggtatgaatgtgcaacaagtggaagggtattatcacaatctacttcacatgatatcgagagaaaacatatatattcacagcttcagaggctttggcaatcgttga

SEQ ID NO: 1152 - DNA, 13719 bp, Oryza sativa alphaendornavirus
  source 1..13719: mol_type = other DNA
atggacgatatacaacgtccaaacttaggtacaactgcattagatcctttatttggatggttcagattgcctcgtaatgtccattgtaggatgaacaaaaacaaatttattgataattttgataatttatttgaacattataaaggtaaacaatttcataattgcaaagagatcagtatagtatgtgtagaagctatgaggggagagttacaattgaaagagcgacattatggcattgctcaatctttttctccagatgatgaacgattgagcaaatttagcgttaagaatatgtcatttggcttggtgactagattattatatttgatttatgtaaaaggagctgaaatttacttaaatcccacagttaatgtggatgatgtgcttaaaaacatgagccacttaattaaaaagaaacctgaaataattgaagaagattttgaagaagaagaagattttgaggaaatggatctagacgacatgggatttatagatgataaaatagaagaaaaaggagagtatttccaaatagtgccattcggtaaaggaaactgcacggaaaaattcttaaaaactttaaagtttcacatgaaaatatttaaaggattatttaattatatgtaccatcatatcaccaatttcaaggaagtaaatgatggatttgtagaaattaaaggaactagagatgaagatgataattctatgaattatgaatcttcatccggcaaattgcctcccattaagttttgtccattatgttcatgccccaatgcatatactcaaattcctagaagaatgaaaacttgtcattacagtgttaaacgatattacccaaataataaaactattgatgataaattcgaaacaaaagttaaagatggggaaataatgaaagaaattccctggagatgtggtgtatgttacacagatttaaacttggaaattgaagagttcagacaggctaacattattatagatgtgataataacagagagcttgtatgttttgatgggtgatctggaaaatttaatgaaattggggtatactgatacttatgatgatttaaagaacacagataaggaaaacatcaggcaacacgacaaaatattggtgaacgaatacttcttccatttacaaaaaagaatagtaacagtaggacaagatttagatcctataataaatgataacgttaagaaagtcattaagggtgtaaattttagacatgacagcaagtttaatagtgttaaaccagaatttgtctgtgaaatgtcagtttgcagagaggaaataaaatcacatttaagatccgatgctattgcctgtataggagatttgctaccaagaactgatgataacaaattccatcaatggaaatataatgattggttattcgaacctaacaacttcgatggatgctgtaataacaattgttgtgatcataatgaaaaattcacatgcttcttgggtatgggagcattggctctgagtttatcccaaatattaggaattgttaataaacaacgtcaattgtacgcaatcattcctagggttaaagacaataagcgtttaagggataatactggtacaataatctctgagggggatgataccatgatattcttggatggatgcactaacccgttactggtcaaaactgacacattagaaacacttagtaactttaatactattgtgaacaacggagaatactacgtcatcaataaggtatttgatttggaattatgtagcaccgtttgcatactgggcccttacactgatgctaattcattgcctgatgacaaaattgtcaaagatgacaacatcactactatatctttacctgatttagactcaatcatgggaagaattattggtttaaatttcaggcctagctcattcacattacatacatctctgtttaagtatttatgcctccggaatttatccggaaaagtgtctcacaatacattgagacaatacgctgttggatttgcacttagaaggtttgttgttcacaataaagtggtttcaaatccaagtgtgatgtatgaaatgatagatattcatgtcatgttatcacgtatttgtatgatgcaattaaaaatggaatatgatcttagtttgaactatagtgaaaaaacaaagtatttaggacctctaaggtggatgccaaaggaattggaaggtttaacaactagatacgtgataaatgctctcatagaatatataactgatagattcagcattactgaaatagacatcatgagagttttagaaagcacacacctttcagctttcataacaaaattacatgacaatcatttatggtcggctttgctaaaattaagcaaaggtattactacagaaaggcttactgttagaaatttgggagacagtcactgtgagataatatccaataacattgaaagatgcttccatcataatcaaaattgtgtgcatggtttgcttttaacagaacatatatgtaaatgttgtggtatatcgatagaatttggattattatgcaaatgttgtaaggggacgaccccaataacagcttttcaaattgatgagcaaattagaaaagaagtggatgacgagggtgaaaattataattatagatttaaagaattagagtctaaacggcacacaatcaaatctaaaataagccataacgagatgaaatggcctcctataaaacccaagcccagaactgtaaaatatcaacagattacagtagcaagacctgtcaaacaagatgtcaccgaaatgcctaccaacaaagccttaccaaccaaaacaatagatgaagttatagcgaaaagaggcaaacatgttgtgtcagtaagtaatttagatgagttcaaattgttactagacgaagacatgaagaagatccaaattattgacgacgtcgatagtggtgctaacaaagaggaagcattaatagtacacacaatagataatattaaggacacaaaaattataaaattaacggatgaaagccaagtgacttcaaagcaatcagacaggcttcaaactgatatagctgaaacacctccaacagaaggtgacaattctcctgatctatccggagaaagctggagacagatgttttctaaatttgcgtcaaaaatagttccaagtgtgcgtaagagaatcactaaattatcaaatgaggcacatgatttgttatctgctgataataaagaaaaagttctaaccagattgaaatatgatttttattctcacgtaactgatcctgtggaatttgaatccagattaaatggtgagcactcaacaatgtatatcatgccgcacataccagttggattcgtggcttggcaacaagatgaatttgaagtgatagagaaaatttcattatctaattcgagctttaattcttgcggatatgaagcgttcaattatgctcttgataaacctataccctggactgactttgtttcaataactggtacagacaaaaattggtccgatttggccttaatggacttagcttctgatctaggaattaatataatcatggtagaaccaagaggagtattcgttgggaaatacaaccccgaatgtgatgaattcatgtgcattcactacgatttacctttaccagatgaaaatgaaaagttaattgacacggtacaaaacagaataggtcacttttccccatgtgtaattcgcagaattagaagaggaggaacttattacgtacatgatctaaaccaaagcatcacagacaggaataaaattatacaatcgagacttggacctcataatcattgtaatagagcccctgatattactggtgatgaaaatatattatgtgaattgatattcaatttacatatatctgaagatttgtcagacagtatatcaaaatttcctacagtatttgaaatagacggaaaaatgtgcataagtaataatcctgacacaaaattattaaaatgggagaccaatctcatacatatagaaataccaaaggaatacagtactttagtagataaaatagcgtcagcattggaaggttctttaaaaatatcagaattacctgaaatgagacacacaagctccgaattacccaatgagctagaaagtgaaataacagaagaaataatagaggttttgagaatcttttctagaataaattctatgttcaatgataaattggatgctaaattaatcaaggacacaaaagaatgtcgcgtgattccttggtatggtaggagcaaaataatgttcgacaaaaaattcaatcacaagttgaagaaattcgacaccttgtgcttaaaacaaggaaaacaattatataagtgtgaagtcaccaatttcagtgaaggtgatcctgttatcaatctggagctttacagtgagcaaagattcaaggtaataatacttaaagagtcatctggtagtgcaattaaatcattagtcagcctaatgaccgaacatattactatgtcagaattcaaagaagtgctaaaaagatctaatttgacgttggggccagcgggatatggcaaatcaacaatgatatctaaagctataacacacggtgatttatgtgttgcaatgaccagatcatctgtaatgagcatagaagagaagacaaaggataaacacatcactgtttgctccttggagaaagcctcatcaagcatgatgaaatgtccaaacaccatatttgtagatgaggcgactatgatcgattggttgaagttagcgttgttatgtgaacccacaaccactttaagaatgtatggcagtgagagccaagtaggagcagtagacatgagtccaacacctggtttaagacatattacaagaatacaagatttattgttagaaaatcagataagtagattttactcaacttacagaatcggtgaaagccttgccacttttataagaccgatagaacccaaactcgtatcattggctgatcacaaaacaacgtacaacgtgactgtgttagaggatgcagaattcgaaaaattgccggtcattgtgcatcgatgcaaacctgatgtaattataacaccatacaattataatagacagagaattgagaatatgacggatgtcacaatacctgttgtgactacgcatagttatcaaggacaagaagttaacaaatctttagtgatactcagagcagatagaaccggcaagtgggatttgaacggaaatgctttgtatttaaattcagcgttaactagagccaagcaccattgtgagataatagtatacggttacccaatatccaacatacaaacagtaagcgatctatgtcagtatatgggtggagccccgcatgaaaacagtctggaagaaaacacagatattgtcaaagataacccagaagatgacatggtgaacgatgaattacccactgttttaaccatacgaacgatgcacactctaagaaaacaagacattgataaattaaatgaactcagtattgttcagcaagggcattcagtaagttatttttacattcataaaaatcacataagctgcaatttgaaattcatgggtaaaagtgtggcagaaataataaacattaatggaaatgtaaccgtaaatggaaattggtattataaacgcaaaattttagataaattggatgaaaaattggacttgaatgatgtgaaaggtataactatatgtccaagagggacaaaattagtgagaataaaaaccaatcaaaaatttagaaataaggtaagggaattagcctggatagtggacaaatgctatgatggtaaattcactatcaaaataaataatatcattataactataacaaagaacgcaggttgtcctttatttagtggattaaaattcaggacaaagaacgaatacttcgagatctgcaaactgaaatattttagtttgagaagagaattaataatacataagtcgaataattatagagaattgagttgtattttaaaatggttggacatagattacaattctattaattatgatgatgaggtggatattggttggctgaaaaccatgactggacataatataagctcatggagacaatataaggaaagattatctagtgtcagtttatggtttattaacgcttgttttgacagtacatcaagaaaatgtaaagagttaagtgaccgtaatactgccatatataatagatacatgttaacagaaaatagggagttgataaagttccatcagtctccgattcgacatgacaaattgatatacaaaaccactgaaaggagagctttgaatttatggagaactgaaaacgtttatgagttgtttaacaaagatgatttaatattaacagtgaaggaaggatctgatgaaacgctctggagacaatttgtaagagaatgtttactagatatggatagaagcgatttgatcaaaggaacaagcgggttggcactggacataccaggtttgtatttacctctggaaaaacattatcaattagggacggagataaaacagattattggcaccaatataaataaattactattattgactagtccaggcattcacgatagtatcagattaaatattaacgacaatgatgaattcagaacagctatactagctaggtatccaaaactcacaattcaaataggaaattataatctactcaattctggaatgataggtgtactggaacaaataatgttgaatacatatgcgaagacaagcaaacataaccctcaaatagttgtttatggtggaatgagccctagcagtgttgctgtacaaggaaaatattatgtatcattagatataccagatgaaagatccccaattaaaagattttatgatcgagaaatgccaattgttaatgcattagttcatagatttaatgaaggtagagatgatcaacacaaggtcagcttaaattatgatgggttattctcccgtaggtatttattgggagtgagtctaaatcacgtaacagaggattatattcaacaaaaactaaataattgtgattatttatatgggtggtcctatagggttgacaatcaatccaagtggtattccattagcaacagaggagataaaatttattatcatggggaggaatactccaatcaaataagaaatcaactagctattaaaattcaaaacggtaatccattgtgggtggattacgacaaatgtgagtacgttgaaaccacaatcgttaatgaattatttggaatgtatcttgtcaaatttacaaaacgaaaattcccaaatagtaacaaagttactagagtaacattcacagaacagggttataacagtacgaccgacgtagaagtgccgtggatcaatacacaaattatggacataatgagaaccagaacatttataaccactaagaaattaacaataaacaataacttattaaggaatctattattacggttaatgacaggggatgattcagaagatagcttattagcatatgctaggacagtgcaatctacacaagtgatcactgataaaggcattcaggatttatcaacagttgatttacatgttacaatgagtactacatggtttgctttgtatgtacaccataattatttatataaatttgaacacataatttcattaattaatttgggagaagatagagaagttttattcaccttattacaacaatttgttccaggcatcctgaagtgggtggggatagtagcagaaaatataactgattatatggaagtatgcatgaagtatttacaatttgataggagtttccttactaatttgaaaaatgttacggaaaagattaaaaatactaactgggctatacaagaaaacaaagggaaagtttggaatttttcttttaaacacccagacgacaataacatgcctatgttggataatgacatactcccagataaagatatagacagatacaaaaactctattagagaggaagattctacttgtgatcaaggacccgtcacaactcatgaagagtctgatttagagaatactcaggaaaaatcagaaactgacaaggaactaggagacaattcggaagccttaggtcttgacgatgaggttgatggggacaatcaacaatcatcgagtgaaaatgttgtttataacgttgaaaaagatatgaccaaagaaacagatgccacagagaagccggcctctaatgatgatcacaaatccgtaccgacctctgatacggagatcaaattaccatccgatgatggcacacaaatttcatttacagaactaactaagcctatcacaactttacccactcctatatgtgttcaaggggcatttggagaagttcctttaataatttggagttattggcaaggatctgagataagtccgtttttactcaattgtattagatcttggcaaaagtataaccctgaagttagaatagtgatactgactgacaataacttagggaacatacatagtatatttgactctagtgatactaaacaaatgtctccacaagccaaatctgactggttaagatgttattgtttatctaattatggaggaatttggttgaatttgagtagtatttgtgctgaatctctgatgccgttaattaaagcggcagtaaaccatgagagtggtttgttccagttaggaatgccaggtggagttgacaaaatgaaatatgaaatgggtgtgatgatttgcaccactagaaataaaatattacatgaatggttcagattaactaatgagttcgttattttatctggaggagacacaacaattatgttagatctgataaaagacagattcaaaaccaatgctcatactgccatattggcagtgggggattatggtaaattttacttatgggtttacgttttacaaagaatagttttagacttccttaaaattgaaccctgtcatattaatgttgaaaatcaaaaatgtctactatatatggggaaatatgcgatagattctgctcgaacgtggcacattttatccacacgttcttggcaagatcttcaaataacagtccctgttataaatctaataagtgcaatgcggaaaaatgtgattgataattacagtaataaattcgagaaaggtagcgtgatggagatgctagatacatgtgaaccactaaaatataacccattatccttggcaaatttaacacctaaggaattaaagagaatagatttagaggagacagacaatagacaaaagaaaaacaaaattgattatattttaatatcatatggaagttttggtgattttgtaccaatattaaacatatataaatatttgatcggacgaggatcaagttgtgtattggtcacccacaaggaatttgcaagttttataaataaagatgacttcttcgacttaaaaatagacacaaaggaaacatttaaattggctatgaacttttctgaaaaaggatggtctagttgcctatctggtagtttaaatcaattaaaagaaatggtaagttctatgaatgaattggttaatatgtataaaaattttaactgcactatcgtgaccacacattcattttatctatacaaaaattacagccagatatttggtaaagaatggatagtattggaaacgtttcctttagaaatgatgtcaccacttaataaaacaagtggttggatacaacaatttattggaaagttctataatttggacatgccactgccaattttaataggtcaaggtattgtgagaaaacaaagaccaattatatcaatgactaattgcctaccttggatggtttctaattataaaattaaaaaccctgttggaccgctgaatatgttaagtggtttccaacaacctttagggattaaaataccaaataacagtgtgttcataaatttcggtagttgcacaaaccaaaatgatgttgagtacatgtatgaattagcaaaggacatctgctctttaggttatgataccatattatatgataagttgcatgaatcacgagtatcaaacagaattctccaaatagttgaagaatgttcagggaaaataatactactaaaacatttcaattgctcggaaatgtatggtaaagtgttcttaacagtttgtcatggcgggcacggtacagtgttagatagtctattcaatgaaatgttcacagttgtgcaacccaaaatatttgaccaatttcattgggctacaatactagaacaatttggaattggttgctcactaaatagaaattacactaaagaagacttaacatctattatggctttagctaaagctagcaatcacaggttaaaagatacaaaagctagcatgaacataaataatttgggattaatcaaacagttgaacccacgtaaagatttacacggtagaatatatccaaacgctctacgacaagcaggattgatacaaaatatagaatttattgaaggcagattcagcaccaatctacctcttggttattatgtaatagacgatatagtggatgtcgaattaatgaaccctcccactcaaagccattgcgtaagagagtgcattaaatatgccttcaacagtctcactatggatgcaataacgtcatgttccagtctcagtatatccaatctttttaaaccaggggtaacagaatcagaattagaagatggtttattatctttaggggtaaattattgtttggtcaaaagaaaacaaggtcgtgtgatgaactcaaaaccaggaccgattttgagcttaaaaataggagacggtggcatttcacaacattgtgtgttgatcaagatatcaagttatggcaagaccgtttctttaagtggaagccccgctgtaatgccaatcaaagataatgaattgaaagatcatatatcaaacagattaactaacaatactagtatggaactatgcaatcctcatgtgatgatgagtttattaccaaacaaatgggttaaaaatttcatatcccgaactagatccataagaaagcatagtttgagtgccaggcaacaattgcacgtcacaattgcgtctatgtgcagatctgggatcgcatacataggagacacccaccataatgacaaagcattaggtattggttattgcagctgtaaagatggttggcaacttgtgaattttgaaatattcatgagtaaattgattatatacactgacattccatgtgaaaatccggtggtaattatcaatttacatctggaatacccaaaaagtatatcacgtagaactataattgatgacaaagagcgttgggtcagtctaaacaaaccaactgtaaacttcaatgaaataaacaaaccattaattagatccaatgaaatcgtgtccccacatttaaataagtttaatctaatagtagctgactttgataatcgaactcatcacaatagtgatgatattgggtacctaaagagagcaaacaaactggtcatttacagcacaccagaaattactttcaatgatatcttagcttcacataataaaccttacaatagactgataattaaaatgggtaacacaaaatattgtcatgaattcaattggggcaatagtgctagattgttcctgtcactaactaatggtatcttagaaggaaatagtattgtcaccgatgttagattgtcaaatgatgtaatgaactatatatttaaatattacaaaatagtgggtttgaaagtacacactagagtctctatttacgaagatcgtcctgttataatatcagtttcagatttactagatgagttcagtcgaaatgaagaaatggaacccgatttagtaacccaattgactactttattaaaagaagaagacactgtgaaattgtcttggctaacaaaaacaaattgcaaactaaatgacagtaacgatgtcatttgcatatcagatgacacattaagcataccttgttgtgagatgataataacaaagagtgttaaaggaggtgcaaattctgatgacagaattgggtggaaattagaagataaagatcaatctttcaaaagcgacgataagtggaatgtcaaaccatctcttgaaaagaagaacattcaatccagttgtaaagacgtcatagcattaaatgatatgaaaataaatgacgttcaagattctccatcaattaaaaatgtaaaatactactcaaactacgaaccaagtttagatatttacattgcaccttacactatgaattatactacaagcgtgatagagccattgtttgatatgcctgatataacatctatgcaattatggactgacacagatttgacggattggctcaatatgtatgctccatccaataaaactgtaatcaagagtcgtgaattacccggtaaaattatcaacatggagaaaataacaatgacaaaatatccaattaagtctagacctgtcttaacaaaaatatgttttgaggaaggacgttccattactggtagattgttttccgtggttaaccttcgcacagttacacctgatcctgagaaaatactttgggatgtctgcaatgcatactttaaacccggatgggagcacaatataccacattttaaaaatgatttattaatcataactccagaagatgttaaaaattggattgaagaaaataaagattgttttggtgttgaaaaagagctaaatgatttactagcaggcgaattattaatcaaaccattgaatgatgttaatgtgcatttgaaattggagtctttactaaaggacaagcatatctccattatgaaggaacagcaagctagaataatagtatggcaaaggaaagcagtttgtagtttatttgccaaattgtttgtaagatgcaaagacagactgaaaactttacttgtggatcatatactttacgtagatggattgagaccagatgaaatatcagccaaattaagacaaatatctgatgtatttggattttttgaaaacgacctgactaagcaagatagacaaactgacaaacccattttagaagtggaaatgttgatgtatcttatgttgggcgttcatcctaacatcatatctagttggcgttcaagtcatgatgattggagattcaaatctacaaattattggggtaagagcacggcaatgagattaacgggacaagctacaaccgcactaggaaattgtatcactaatatgcaagtacactcaaaatttgtaatcaaaaataaatattggttaaagtttgctttatttcttggggatgatatgtgtatgggtttctcacacaagccaaacacacagcacttacgccaggatatagcttgtaaatttaatatgcaaagtaaagattcttggatgaccaatggagcaacattctgtagcatggtagtttacaaaacgaatgataatgtagtagaattgggcccagatgtagtcaggatgaaatttaggtatgaagtcaccaatggtgtacacgaagcaactaaagagaacttaatgatgcgcaaggcatcttacttgatgatgttagggaaaacacctgaagttgataaattagtaaatgatctccaattacccatcaatcccgtacactggtacaattatcacacgatgttacagggcgttgctgacaaatgggacatgaacatacaacaagttgaggggtattatcataacttgatctacatgatatctaaagacgacatttatcaacataactttagaggattcggtaatagatga

SEQ ID NO: 1153 - DNA, 13182 bp, Persea americana alphaendornavirus 1
  source 1..13182: mol_type = other DNA
atggagaaatacaaatctcgttttactaagaataatgagttgccaatgatcccggccattcgtggtgagcggtatgctaaagatctacattatggtttagctgactcaaggccagagggcaaattgatggatgataaaattaacttaggcgagctgagtccgttggatgttgctagattgtattacaatgtactaagacttaaaagatgcatagtcaacgtatcaaagttctcaattgcagaactagaagctttagtcaagcatgaggcattgaacgatgatgaaatgatattcgaagaggattttgagctggaggacttgcctgtaatacagatttgcaagggcaaatcgaaagacacaataccagtactacagatgatcaagagagtggttatgaaatacggtggttatcgcgggtatttcacagctatgcaacagttggaaaccacagacatgccattacttgccgtggaggatggcagctatgaaatcaagaacaggcaattcaatcccattaaagtatgctcattgtgtgatagcatatgccattatagccaatatgagcgtggactcaaaacagtgcataagagcctgcagaagtataagcctaaaagtaaagtgttagaggatgaaatgcggacagtaatagacagcaaacaacacagtgtgccatggagatgcggactatgtttcactgatttgaatgtgcgcataatattcagcgaggagcgcaaaaccttggctattgagataataatgaaacacttatttgtcatagctggtaatcttgatgaattgctcaaactaggatatggtgattcatatgaagacttaaccaatgatgagaaatactccattaaaactaatgaccatatggttgtgaatgagtatttttaccatttacaaaggaaaataataccagttggtcaggacttggaaaaggtgagcgagcaagcaataagtgctgtgattaatggttgtcacttcaaggccttaagcaagtacaattcaattaaaccggaattgattgcagaagtgtcaacattaactcaattatgcaggcagttcatgcagggtacggaggtggtgtgtatcggagatatattaccaaccataacaaagaaaggataccatcaatggtacaaagatgaacatttttaccaattggaaggtggtactgcgtgtgctaacaaattaatatgtagtcatgcaggcccgttcaaagtgttcggttcattcggggcactgaaattgacgatatcacaaatcttgaatatggtagataaacagaggagcatgtcaattataatgccgattagggctgaaacaaatactctcaacgacaaaaccggcaagttcgtgaatgatgattgtaggaccatattgcacctagacggcgacacagttggctatgaacttaggaaggacacataccacttactgagcaattttgacattatttattgtaatcataattattacatggtcaacacaattaagaaattaccattaacacagcttgtaactgtgactggcccttaccatgattttaacaatatatcagcgctgagagtgagagtgatagaccggttgaccatcaaactaccattaccaaatatagatggttttatgggaaggtggttcggcttgaattttgaggagcacgagtttgacattaatgttccgttattcaaatatttatgtttgaggaacttatctggtaaaataacacatgatacattacgccaatatgctgtaggattcgcgttgcgcaggttcgttgtgcataacaaagtaatcagcaatccatcagtagtgtatgaaagtatagacattcatataatattgagcaggatatgcatgatgcaattatcacaccagtataacttatgttataacttcagtaacattattaagttgttaggaccattgaggtctttagtaactgatatcgaaatggctatgacaagtggtctattgagcttgttatcagagatgattaacaaaacttcaggcataagcattgagcaattgaccgagtggatggcaaatagcaatgtatcagttttcatgaatggaatctgtaaacatgacttttgggcacaattgttacgaatgtcacaagtgacagagatggagtcaatcagaatagttgacattgatagagacgtgttagctgatgatttggcagacataactacctgtgaccatcacacccgggcatgcaagcatgaagagaaaaagataatgactaggtgtgcatgttgcaatcttaaattatgtgcaaatgtgcagtattgtgagtgttgcaaaccaaaagaagcggacaattttatgaagcatagtagctgggcagagactgatcagccagtggatttcgcgataagcccagagacaacaataaaggcagaacgagcactcaagttggcgacacgccagataccggaaagcagcagacaagaggacataccgacagcaagcactaaggatgatacacaacgggatgaaccaacaaaaacaccaattccagtccccacacaagcccctaaaccatatgaagctagtgatggtgagtcatggcgtgaagtgattaatcgtgccgttaagcttaaagtggacaaagcaaaagccatgattttgccaataacagatagagtcatgcagcgacttaaagaagatgagcaggcagaattggtgagtaagctaggatttgaatttgtggagcacgtaatcaattgtgcagactttgagagattggttaatgacaaggatgataccatgtattacatgcctcattgcgctatggggcatagtttgctaccacggaatacatttgagatagttaaaagaattaacatcccgaatagtggcgtgaatacatgtgcgattgatgcgtataattacactgcaaccaaaccggtaacaagagacgaatgtttagctgtggtagacaaagagactgcattgtaccagactgatctactcgacctagctatgtcaagagaagataatttaatcatcgtagcggacagcaggtgctatgtttcccgcggggatcctaatagcgatagctatatatgcatagggttcaatgaaccgcaagaagcgagaggaatcggtcatatgatgccgattgtgataaaaagattggagaagaacaaccagtacttcttacatatgcaaccaggaaacataacagaccgaaatatgatacttgctactaggtacaaccaacatacaaaagtgcacactgcaacagaagttgacgaattcggaaatttagtgtgcgaattaatatacaactatactgtgacggagacaaaatcaagcaacctggcccaatcagtgaaggtgcaaacactaggtgatgatgtggttctgtcaaacaattcattgacaaagatacatgatccagataaagatcacatacacgtcacaatcccaaggtggatgcgcagatggacggacaaactgcaagcatgccttacaggaagttgccctcttagtgcactgccagactttagacacaccacgtcagaattaccattaaacatagaagaagcggttgaggacaggttattagaatgtatgcggtcgttgtgtaggattaatgaagcttgtaccacattacaatcaaaaacaataaaaaggaaaattaattgcacattaattccatggttcaaatatagtaagctattgataccgaatacaatgaagacaagcctaaagaaactggacatgtgtgctgtggtcgtggataacatcatgaccaaagcgactgtaatagggactgataaaaccaatttaattgttgacattcccataatagtagacaagagtgtcatagtatacgagatcaaagaatcatcaggaagccaaatcaggatgttatgtggattatgccagccgaccattgacatgcccactgtacgtgagaaattgcgcaatgctgaagtcgtattaggaccagcaggttttggtaagtccaccatgataggtaaccaagcaaaagcgggtgacctgtgtgttgcgatgacatcaacatccgtcaggtctttgcaagcaaaagtaactgcatctgcaagagtgatgagcatcgaaaaggcaaattacacacaccagaagaccaaaacaaatttgtttgtggacgaagctttaatggtggattggctaagtataatattattgtgcacaaaggatacaaagattaaaatgttcggggcagaacaccagataggcctattagatatgagtttaacccccggaatacgaacgattgaaccaataattaaacatgttagtgacaacaatattaagagaagtaaaattagttataggattggtgagccattaaggaccttcatagaaccactcgaacccgggatagtgagcggagggacacataagacaacgtacacggtgacatgcttgaatgacgaacaaatagagaatataggccaggccataaccagatcaagacctgacgtcatcattaccccttaccaatataacaaagcaaagattatgagtatagataaccgtgttccagttgagaccacacattcgttccaaggccaagaagtgatgcgaagtatggtagttctgagatcagatgtgacaggaaagtgggacttaaacggtaagccagactatctcaactctgcattaacacgagcaaaggagcatgttgacatactaatctatggatatccactactaaatgtgacaagaataacagacataatgacagtgattagtggaatgcaattgctggatgttagcacagcatataaaccggaggagaccaaacaaatcacaatagatgaggcgaaagagataccagaaaatataacattatctaatatgcatacgttgacagagaacaatatagatacgttaaacaaattgaagccagagatgaaaggtgtaaggattcattacaaaaagattaacagcggcgtagaaataactgctaataaattcggtttatcagtcgcgaaaattacaaatatagatggaaatgtaactatagacgcaaatgaattcgtaaaaaggcaaatccaatctaatctacacaccgcactgatagtaccagatgaggaattaggcagcttgactgggggtatgaataagaggatactgagactaaatattaggacagcaagtaaactcagagagttaaattgggtgcttgacaaaaccatagacggaacattacaaattaagatagatggtgggatattaataataaccaaaaccactgattgtccattatgtgccggcattaaggccgtatacaagaatgagaaactgataattacaaatggctggaaagatatattaacgagagatatgtacattacatatgacggccagttaagtgtgttgagcggcataattaactggttggaaataacaaccacagacattccgatggatgttggatatagtattgaacatttaagagatttgaggggtgacattatgcattctaagtggcaattggaagaaaggttgacccaggtttcgaaatggatactaaatgcaatattgatggacgaattcccaaagtgcaacacgaacaatttggcaaatgtcaacctatataatagtatagctagcaatttgggagctacgaaggtgacgcatcataactcagtgataccacataaacgactaataattaagaaacgttccctactacaatctgaccaatatgttctcgctgacaacaaaaggccaatagcagaagtacggccaggtaaccaagttgaaacatggcgggtattcatcattgcatgccttgcagatatgaaacaagaccagcagataaaagggattggtatggcagatattgatatacctggattgctattgccattatccaagcacttcgcgatcgggactgaaattaaatcattagtagcacgggaaattaacaacattaatagactggctgccacgaactcacatgacgcaatacggttaaccacagaatgttataacgcatataggaatgaaatcatgacgagattcccgaagttgaacatcaatcacggtaattatgaaatggtgcagtctcatatagaacagatattagagaacataattgtgaacatggtgagcaggattgacaaagacgctggtgagctggttgtgtactctggcccagtaccactggtaataagtatgcaagggaagtattacgtcaagattaagattccgaaagataatgacccggagttaatgtatcatgaccagcagatgataatggtcaaatcaatgttgagcttatttaatagttcgaggacaggtaataaagttgatatagtatggaacggccaagcagagtgcaacaggataatatgtggagttagcctattgagtaggacaaatgaagagcttaaagagctagtggatgaattcacaaatgtatatggttgggtaccaatagaggaaaagagtaattactttacaatcaatcataaggatagggtgataggttaccgtcacggaacattcaccaggcaaattagaaataatttgattgaacgcgtagctgatggtagaccgctattcacaaatcccaccactgcgcattatgtgcaatgcagaacaatattagagttcatggatcaccgactggtgagaatggagtatgttaaaataccagagagcaaggtagtgacacggtgcattggaacacaccaagacatattttcagaggaaacagtacgggtaccgtggctgaattttgacataccaagtgtgttgactgataagaaaatgatcataataaaggatctgaaaataaggcgtagcttgatgaggaatttgatgttgcggttattgacaggcgatgatagtagcgagagtctaatagcatatgcaagaactgtcgagtcgacacaattgataactgacaggggcatacgcgatgctaacacaagcgacttggtagtaacattaaacaccgcatggtacgcttattatattcacaataattataatgccaaattcaagatgctaatatcgctaataaacagtgcacaggcaaaaccaactttaatgagagtgttagaatgcattgtgccaggcctgatgaatattgcaggcaaagctaatcaattggtggaaggttattgcgaaaagctaatcacatacctgaattcaaacataaatattgttaatcaaatgaaagatgtactgagtgaagcgaaacgcatgaactggagtaatgattatgatgatagacggttaattaaatactatttcgatgatgaaggcggcgttggtggctggctggattataggccaccgccaagttttggcaaagaagatgacagtggcaatcgggaagagagcacagatagtgaatcaaataaagggaccgacgatgagttctttgatgctaatgctgatgacgatcatgatgaagagccacacgttgcagagcaacaggaaccaaaagaagtatctacagaggcagcagcagtagagccaacacagcaagaggagctaccagtggacgaaccaagcgtgggtgcaagagacagtgacgtagtgtcaagattgatggaccaagataggtttgccggattaagtagagatgtgataaatgatacaatacaggagctggcacagacgttaggtcaggaagcagataatataggccaggaaaagatagaatattacttagcggccaagtgggatagaagcatggtgcaagtgagattgacgcggccacaattcagcctgaaccgaggaagtgagccatcaccaccagtgatagaagtcaccactagacacacagtaccaaaactcatatggacgtattggaatagcatgtccgtggattacttaatatggtgcatgatcaatacttggcagcatcataatcctgattacagaatagtagtgctaacgcccgattccttaagacacgtgttaagtaaatcagaatgtgaaatattggcagcccagaccccacaattcgcctcggactggacgcggctaagaatactgaaggagtttggaggaatatggttagacatatcaacgatagtcacagactcacttgatggaatagtaactagatgttctaaatccaggtcaggtttatatcaaatatgtttaaacaataggcaagccgtgaataaggtatatgagagctggttaatagtggctagcagtaataataggttagttgatgagtggtacaacgtgactacacaaatgatgaattacagtaagcctaacggggatggagccctcgaatggttatgtaataagtatggagaagtgtttaagagagccgagcaaccgattgttcctaacctgaggaaatacctccgcctgtacataacggaaaggattgcatgtagtaatacatctctggaaccgataaccacatgtaatgacgaagcaaagttgactttatggcatgacgcaagtctgctgcaatggactgatatgtggggtgtatacgcaacaacagatgccgaggcaaatgaaatagagattgaaatcgtgaaaatgatcggaaaggtaagagatattatacttaatgagtacaacaaaggccgaccatacacagatgcgagttacattgggaggatgatgagtataatgaagacaccaggcaacgagacaggcgtcatcaaatacaatattttgtattgtgacaaattaccaatatacaagcagggtcaggctaggataccgcccacagtaatgccagctaaataccatagtgcacgggtcatgataatatgtattggtagtttaggtgacatcacgccaatgttagcgatgcgcacaatgtgtgaagcgcgggaggtaagcacagtgattgtgacacactgtgatttgatagaaaacctggcaattgatagggcacacggattacggtgcacgtcaaaggaactgatggatactgcaatgagattgtacaatgacagctcattagatgacaaattatccggagtagatataatgaacagaatagtggaagagactaagcagataattcacaactactcaagtgatgatatgaatgtgatcataaatgcaccattccctatgaaatcagcaatatcaaaggtactgaagggtaactggctggttgcaaatccattcccacccaattggtacagagaaccacttggcaatgatagtgattacactctcacaaccaaattcgtgttgaaggccagtgaagaattatacgagaccatggacgtaacaaagttagattgcaaatcagtcaagtcggtgttgttaacatatcaatggatggccgaagagactagtaatacaagtattgggccacttaccataaacaacgcttgtggcaatgttacaataccaatgacgtacaagaaaataatgattagcttcgggagttgtaaggacagtatagtatggtcggacttagccagtttaattaagaattgcgtattaacgggccataaagtaatagtaacttgcagtgctgagggatatcttaacaattataaattccggaaggtatgcacggacctagttggcaacctaagtataattgaaaattattcacacaatgacctacagaacgtggattacatgatcacccatggtggccatggcacaatactagattgcatatataacaatgtggtaccgattatttacccattatttgccgaccagtacgcatgggcgaacaggttgagcggaatgaatatggcaataagactcagatcgttgactgacacaagtgatctgcgtgaagcattatcaagaggtgagctggttcggaagacctgtgaaaagtgcagccggatgatgaacattaacctagatgatttcattaaatggctcaaaacaagcggattatggcttgaggacgtcaggtctttggagtacacgggtgtgctagataataagaagattttccatagatcaaagttcaacgacagaattggaatatatagtattaaaaaaatgatttaccgggtgttacatgaccctgaaacaccgagtcattgcgtcaaaagttgtatagtgaagtggctaggcaatgagaatagcgtaagattcaatttgtgcagtataccaccagtgatgaagttgcaacaagaaggagtcgattatgacactctgatagacggcatactatcactaggtatcaactgtgctataatagatgataataacacaggaactttggttaaattagacaacggtccgacaatagagctgttgatagacaggtcagatctgacatggcactgcaagttagtagaagtgctagaatatagtgtgagcaagaatatggcggtgaagtgtaggccggcggtggtaagcaccacaaacatgggtcctagtatcgaaaagttgaaacaggaatacacattgctagaattagctgacccaatgataatggtaatgaagcacggaaagaaattcgcaaacaacgtaagagagagactcaaatcaacaaatttgacagttttggcaccaaggagtgatatttacattaaattattatctggtgtacaaaactcgatattctatgtatgtgaggtgattatgccagataaaccactaagtattgggatgatcacaaccgaaacaggatggatgacagtcaattatttagtcgaggataacaaattgatagtgatgggagctggcacattttacgagacgtcagtattagtgaatatgcacctgagatatccaagcacaacaccaacgcggatagtgtcaaagcctcagcaaatgtacgcactgaacaaacaaacaagcactataaccctgacaagacgattaattccaagagcaagcgagataatgctagtacctcaaaaagaatacaccgtaatcgtagctgaatttgataaccggtcacaccacatgcatgatgagcttagtgtgatccaaaatgccacaaaagtagtagtgcacgacggaagaaatgggagaatcgaagactacatcacacagtatgatgcggccataaacaggccagttatcaaaatggctagcagactatatgtcacggaattccaagatattgctatacagatgaggatagaggagatgttcaattataagagcatgtcacgtgttaatttgtcactaaagcacctaatagagccgaaaattgtagagtatatgacaaaagtgcttagaattaagaagaataaagtaacactacggcaaggcatggaaatattaacaaaccaaatgggttcaaacgaattgcagactaaaataaccaatagtggattgagtaatgaagacaaattgatagtctcgatgtggttacggcaaaacccaaaactaatggtaagccatataaccgctccaatacagaattgggacggcagagacacaatgataagcaaaaccggtaatctaataatacacccaatgttgactgagctaataagttcacaagttgcgggtacggaacgactatcctggaaagtgggtacagataggtccgtgcccggcgactggtgggcgttgaggaacaagatgcaaggtaaaactgtcgaaaaagttaacgatgtaatggctattaattacctaaatatacatgaacaggaatcagtgacacaccacgcggaggaagtagattacacagagatgatagatttgtatatacctccgtatcaagtgatatatacaggtagcaaactggagccactgtatgattttccagatgtgacatcaatgcaattatgggacgacacagaccagacagattggttaaatatctacgcaccgatgaatgaatgtaaaatattcaccagggagttgccaggaaagataattgaagttgagaaggcaacaatgaccaggtggcctattaaatcacgggctgtgataactaaagtatgtttcgaagaaggacgtagcataattggtagactgaaatctgtgatgttagtgcgtacaaagaccataaacccaatttcatttctagaggatttttgtgacacctacttcaacccaaactggagaagccaagccgccatgtaccaagagaacaacttgattatcgaagagagtgatgtgagggcatggatagaagatagcaaagatagcaacaaaatagtaaaagaattaaaggaactgttagccggggagatgttgataaagcccatgaatgatgtcaacgtccacttaaaactagagagcttgctgaaagctaatccaattaatgtgactaaagaacagcaggcaagagtgatagtgtggcaaaggaagtgtgtatgcgccctgtatgctagattattccttaagatcaaatcacggctaaaagagatattgcatgagaaaattgtgtacgcggatggtctaacaccagatgacatatcagcaagagtcaggttgtgtaacaacgttaatggattcttcgagaatgatctgacaaagcaagacagacaaactgaccgagatatcatcaacatggaaatgcttgtgtatattgtgttgggagccaatccaagcattatatcttcatggagggagatgcacgaagtatggagattcaaatcggccaattactggggtgaaggaaaagagatgcgactatcaggccaagccacaacagcactcggaaacgtgataacgaatttacaggtgcattgcaaatttgtaaagaagaattcaatatccatgcagttgggactatttctaggtgatgacatgtgtatgttgttcagcgagaaaccatcaatcaaaaatttacgtaatgatatagcctgtgaattcaatatgcaaagtaaggatgaatggagctacaacggtgcaactttttgtagcatgatactagctaaaacgtcggacacaacagcagaggtagcggctgacgtggtacgactgaaattcaggtatgaagtaacaaacggagcgcatgaaatgaacaaagaaaatgtagcaatgcgaaaccaatcgtatttgatgatgataggtgacatgccaaagacaagagatataattatgaaacatggttatgttatcaaaccagtacaatggtacggctacgatacaatgttagcagcggtagctgaaaagtataatatgacccatatccaagtggagggttacctacacaatttattggaaatgatagataaatcgagagtgtacagtcataaatttagagtgtttagcaacaaaccgtaa

SEQ ID NO: 1154 - DNA, 3542 bp, Phaseolus leptostachyus alphaendornavirus
  source 1..3542: mol_type = other DNA
cacatagaataattgtaacaactagagatgagcaagtatttaaggctaacaaagttgacgggatataccagctcaaaggattcagttccaataaagcacttgaacttttcaatagtttatactgtcaagtcaacatacaagtagcagggaagatgaacactacggttgtgtttgactctagttggccaacgcggtctcttttcattactgagcccatcaaagtggggaactccagagaggcacattgttacccaatgcagacaagaactgacttggctcgtgtgaaacagaccatagacagcaacatcgaagtgcagaagaaaaccgactatgaatccatctgcagcaacttagaacttagaatagggatcagccctgaagacgtgatagagcgaattgttacaatgaatagaggtaacactgaatggggttgggagtgttacggtgggttcgcaaactacgaggcaaggatgagtaacttgaacatagactcactgatccaatcagacccgaagctgatcgtcaccgtaactcaagcattgaaagggaacaagtacattcaatacgagttgcatcatggaagaaatatccgagttggggaaatatgctttgtattcaccacgaacggaataatacctgggttagtggtgagatctgacagctcaaggctaatagtgagagtatcaagcgatgccgaccctttacctgtattactactagcgaggctcttgaggacagcgcagaaagggagaagggaaacgcttaaacgtgtagaggaaatgttgaagcatagcaaagaagcaatggtgtgcttgaacaaagaaacccgcagttacatagagtccatgaatccaggatccaatgtgagaatggcaacatctcaagaactgaaggaaggtgaaatacaaggggttttatgctccagttttgataccaggggacatcattccgaaaggagtggcctggaaaaagaattcctaatgaatgctcttaagaagaaaactataagagtagttccagctgacatcaacccagaccacatcaaattaattatgacgaacggagtcggttacttcaactacaccggaggagatctgtggtttaacgtagaaagttacagagtgagggttgtacttgctgcatcccagatcataaggcacattagcaaggaagatagtggttttttcaacagcgggcttaatttcagggttaaagtggtgcggtccagggagataatgatgataagaaccgtactatccagattcctgattgaagaaggaaatgacatcaacctcatagaggaaatgaaaagtgaaaacggaggaatgatagctttcaacaaagaagaatttattaagaccgtgaaacataacgattgcccgttgttcgaccgcctggtacagcaaattttcggtggtagagatagcgcaacattcgtggtgctaacagttgatgctccgatggaatacaccaccgaaaacatgctatgcggtctggactttgacgagaagaagaaaaccgtattgaccttgaacccatttgccaagctcaagctaattgaaatgaaaggagccggagagctggagaatctaaaagggtctaatgaacaggtggatccaatcttaacccatttagaccaaccctacgaaatgataataggaccaaagcttggtaaggagaactttggcagattcgacaaatggctattctcgaacaaatggctcgccgaaaaggaaaaaaccgccagtatagaatcaaaagagaaattgagcaaaatgaaattcatctgggaggagttgtacgcaagtatagaagcagacggtgaagcatacatagtgcgagggagttttgagaaaggatacggagtgaaggagaaaggagacgaaggagcaagcagcagcttcagcatagtgcagaatgaagagtatgaaaagagcctgacaaacctggaagacttcagggtcatagatttatgggaccaaaaccgggaccttgtggatcatgtcgtgatgcactgtcctaagaatgaccaagaatacacggcaaaggaagggtattactccattcaggaaataactaaaacgatttttagcaaatacccggtccaatgtcgcccagttttccacagcgaagtgtacgctagcctaaattctctaacaggcaggataggcaggtcaatgacaataagaaacctaagaacgaccccaacgacgaaccaggtaatagacaaaatcgccgggttgttttttgattctcagtggagggacatggtcgatgaattccagcaacatccaatagtattcaacgaggcagatttcaggagctggatagttggacacaaaaatgcccacaaggtgatttcagaattggaggtgctaagtgcggaggggttgctaacaaatcctttaaacaaatttagaagccatgtcaaactagaaagtattaacaagtcaaatcctataagtgactttagacagtcagcaccccgcgccatagtgtggctaccatactgcatgccagctattttcagctacctgtttaagcaggcaagcaacaggttcaaactgtttttgaggaactgcgttcactacgcatcgggtgttgatgtgtacgatcttagagatattgttgagtcggtcgaagaggaagacttttacttttttgacaacgacattagcaaaatggactcacagattgatgaagaaatgatcaaggttgaatgggaaatgtacaaacttctgggagtacatcctgaggtcatagagagttacaaggaacttaagaaaaactggattatatccaacaaatatgtgtccgttaaaggttcatggctaaggcacagtggtgaacctacaacggctcttggaaacggcataataaatctagctataacagcgctcagcacgtccaaaacgaaaaggcaggacatgaaactatgcttgttcatgggagatgatctgctaatggtaacgaccaagaaagaggacgtgagcgaagttaagagaaagggaaagagactagcaaactcgatactcaaaccgaacaccaacaaaacttgcggtccattctgtagctttctgatcggaagagatgaaagcaatgggagggtgtccattactcctaacctagtaagactggcattcaagtgggaagttccaaacggacagcacgagagcactgaagaagctattttgaccagacagctgagttatgcatgcatacttgggaagaatggcttctctaagcagctagaggacaggataaacaaactgacaaacggtgggcttctggtaccccattattacagtgattcgaatttactgaagttcaatgcctaccaccataatttgaccgagatggaaatagttgaagtggcaaacaacttgtacaatagcatcaacgaaccgagaacgtacaatgcgaagttcataatcccaagtgaggacatcaggaaaggcatcaagaagatgagctccattaagacaaccggagttggacgagaatcgttcacgcaccgcagactggagaacgaaagcctctga

SEQ ID NO: 1155 - DNA, 2878 bp, Phaseolus lunatus alphaendornavirus; identical to SEQ ID NO: 817
  source 1..2878: mol_type = other DNA

SEQ ID NO: 1156 - DNA, 13860 bp, Phaseolus vulgaris alphaendornavirus 1
  source 1..13860: mol_type = other DNA
atggctccaaagtttattacatgtcttaactcaaataaccaggcaaaactaacgggacctcgaaagaggtcccaaattttaaaatctaaacgaagaaaacatacatacggagatgctagacgcaaagtagttaacaaagtacttaaattaggttaccacagccaatatattaatccaataccacaacccaaacaaaccaagccttctatcaagcaattaggttgggtaggattaagtaaaaatagacagattaaacagaacgcgaacccttacgttagatcaataagaaaattgttcaggtcccataaaagacaattaatagatgagaacaggttggcttcattaccagcaaggaaggaagatctgactatgggttttatgttcatgtcagcactagaagacaaaatagctgtctgtgatctggatccaaagataattgggaaattgaattatttagtatgctgtatgggcatgggcttaatgaaagaccccagcgtttccctgaacactattaaaggaaacattaaacactcttacattacacctcttaatgggggaacgaggtataataaattcgaagattatatgtggtctgaagatcagactttaactattgtagaaggtgagggcaattgtacggaggattttctcaaattaattggagctgaaatgaacaaatttggtggaatcgagaattacattatggccaattgtaaagcaaggccagatgctatgagtaacattactagaaccaatactggtaaaagttataaatacgatgttgttccctgtggaatggtccctattaaagtttgtcagttgtgcggtcaaattaacacatactcacattatgaaggccacccaaacaaaggtcactattcaattatagacaaaaaattcccttcaggttacgaagcagatttagtggaacacgatgaaatgcgcactgaaatcagaggtggccaatgtgaagtgcaatggagatgttgtcattgtatgggagacctcaacttaggtgtcgttggattatttcttaattttgtcaatttaattaaaactgtgtatgactggatgttcgtcatcagaggtaatttggatgaattacttaagagtggttatggagacgtatacgatgacctagagttagatcagagacaattaataagaaatcatgacatgcaaatgattcatgaatatttctttcacctgaatcgtaagatcattccttgtggccatgacactacagaaatcatgaagtctagtattagagcaaaattagatgcttgtgaattcaagcattatagtaattacaactctattaagccagaattaattctagaagtctctgcactgacgactgtgtgtttatctaggtttaaagaatgcgcaacttacagcctgggggatatattaccgcacaatagaattaaaaattaccatcaatggtacaaatacgatggaatgttcccaatagataatggagaagaatgcacctgcaccacacagtgccaacaccatgagccaggcgtcatttttgggtccataatgacttgtggtctcaatttatcatacctattagctatcacggaaaaacaaggtcaattgggatttataataccaaaattaacatctaccaaaactatggcagatggaaccgggaaatacaatggggatggtgaatcattagaattgtttttggatggcaacccatgtccgttaatttttaagactgatacttttgtaacattatctaatagtaacattatagtacaaggcggaaagtactttatgattagtaaagtgattgatttagaattattggaactcaaaatgatcacgggaccatacgatgaactaagtgccttacctttgaataaaatcaacacatataatgaattaacagtcaccgtcaatttacccagtccagagaggttattaggcaaatgggttgggttgaatttccaacctatgcaagttaatattaatccgtcattgtttagagccttgtgtatcagaaatctatctggtaagatgtcacatgaaggattaaaagagtactcagtaggtttcgcgctaaggaaatttgtggtacataataaaactattagtaacccatctgtgcaatatgagttactagacatacatattatattgtcacgtatatgtatgatgattatgaaattggactatagtaattcccttaaatacacagaatggagtcagctcttgggacctttgagaggtttgaccaagtttatatctgaaaaattactgatcgtcataactgggtgcttcatggattatatgagtgctagtactggtttaacaagtagtatgttgattgaattacttaagaacagtcacatcagtacttgggtagaaggtttatgcaaagaccaattctgggacaatttgttgaagttggcaactgattattctgtagagcagctaaaagtaattaatgtacaagaggatgatgcaactatccctgacagcttccatgatgcatgtaaacaccacaaccaaagttgcaaacataaaatccagacaggcaaggcgtattgcaaatgttgtggcttgagctgcactaatccctattgtgagtgctgccaaccaaagccacatgataacactgtaatggaatggctacatagagacgtgatagacgaacctcaaaggaaacgaattgcacccttaaaagtgaacggaagagatttaaaagtaccaaaagaggacaaaatgctagatagattcgtacaagcttttgaagattataaacgagatcagccaattaaaagtgctgtagatgttgtcaaatcaatcaaagctagtcacaaaggtgctatagccgtaagcacagtagccaatcaatcacaaccatggcctggaattataagtaataaggaatcaactgaagagcagtcacaaccagctgtccaaacctctaccatcccaatcctggctgactccaacaaaattacagaaccttctcatcaaatccccactgaagataccggttcaattccacacgtagcagatcagttgagtttcatccaaacgattgaatcaattgacgctgaggatgcaaggatgaaatggttcaaacaaacaccattaaaagttccaaaacatgtcaaattaaacacacaattggaatcagtgaagtctaaggttaatgctgacttagaaatgggagattacctgagtgtagcattaaagttgggagaagaatttctggctcacgtcctcaaccctgtcaattttgaggcagaacgcaacgatcatacagggtatctatatattatgtcccacattttagttggtatcaatatacttaaccctaatgattttgaagttgtcggcactcctgctgccatacctaatactgatgatttatcttgtggttatgatgcattaagattggcaacgaatttggacatcactatgagtgaatttcaaatgatcacaggaaagaaacctccattttctgacggagacattaatgttatagctcagcactacaagcttaatataattctgaaaactgatcgtgatgttcaagtcatgaaatacgattctggatgtgacagctttgcatgcatggtgttagttaactctgaccatccggacgacattggtcatttttctgcttgcaaccttagacgagttaaatgcactaatcaatatttctgtcataaaaatgattatgacacattaggtcggaaagacatagttatctcatgtggtattgagccttcagagttatacttcccaacttccatcactaaaactgagaacattaagtgtgaggcagtgtactactacgccactgactccacaaatccagtcgttaatgtttccaagttgtcatgcataaaaataggtgacagttggtatctaaccactaacgaaaaatttaaagtccacaatatcaacaagaattccatatatttgagagtgcctgcatatttagaatccttatctaacagtattagtttagctttaaaaggagaattttcacaactgaatatcccagaaatgtaccacagtgatgccaatttgccaactactagtgaggaagttggagtgaatatggtgagtgaagtcctgcggtctatgcgtagaataatggcatgtgaagacaagttggatgccacaatgattaagcaaacagtcaatggaagagttagtccatggatggccaacaacatttttataccagaagatggagttcacctaaaattaaaattgtgggataaagttatactaagagtcggaaagaagttaatcatggcctcagtgcttggtattgacaagactaaagttactatagacactaagttcatcgtatccacacaagcgaaattatttgaattaaaggaatcatatggcagctgcatcagagcactagtagcttgttgtagacctctaatcagtatgtctgagttccaatctatattggacaaatcgactttaactctaggtccagcaggttttgggaaatcaactgctatagcagctaaatgtagcgacaatgatctgtgcgtagcaatgactagcacatctgttgaatcattgaaatccaagattaaaaacaaagtgcgcgtcatgacagtagaaaaggccctgtacagccatgctacaactgctagcacattgtacatagacgaagcaatgttggtgccatggcaagttatattactgttgtgtgctaaaggtactaccttaagtatgttcggcgccaaaaatcaaatagcgaatgtggatatgagcagttcaccaggaatcaggcatgtagtgaatatagataaattgatcaaagctagcaatataactgagcaatttactacttatcgcataggtactggtttgtttgaatttattaaaccactggagccgggtttgttacaaggaagtgatcacaggacaagcttctctgtaaccattttggatcctgaacaatttggaacactatccaatatatacaacaggaaacagtacgacgtggtcattactccctacaactataacaaaatggccataaccaacttgctcggcagtgccagtccagtagttaccacccattctttccaaggccaagaagtaaattcttcattggtagtgctcaaagctgacaaaactggaaaatgggaccttaacagcgaccctaggtatcttaacgccgctctaacaagagctaaatacaattgtgatatagtaatatttagtcacatgctcggccaacccaatagcgttaacgatttattgagtcaagtaggtggtagggaataccatgatgaaaatgttattgaattcaccgagttggcggtagaagacgtaattgtgcgaagtgatgacagtcctattaacatagacgcagtgactcatttgtctataagttcaatgcatcagttatctgatcatgacattcaattattgaatgagttggatttggagcaacaaggtgtcaaccttaaatataagaaacttggggctgctgtgatatgtgaagccaccaaggccggcatgttacttgccaaagtcactaacaaaggtggaaatataaccatagaggcctccaatatgattaaatctttaattaacaacaatttacataaacaggtcaagatcccaatggagaggttgttaagtagaactggtatggccaaaactcataaggtaaccttgagtacacagtctgcttgcaagttgagagaattattgtggatcgtagataagaccaaagatggtacactgaccttgcccctgaatgatggcttgataacaatcactaaaacttcaggttgcccactattcgcaggatgcaaaatgcaaatcgatgatgagtggatctacataactgacgcatggcaagccattacatcccgcactataacttacaatttttccgcttcaccctgtaaattgaatgacattttgatatggatgcaattagaactacccaatattcatttaatacctcataatggcaccacatggctggatgttattaaaggtaatctggttaccacatactggcaagccactgagaggctgacacaagttaaatattggatgcttaacgccttagccttttcagagaatccaaaatgctacggcaataatttaaggaatgtcagcaagactaataaattcatgaggaaactcaagatcaaaggggcaattgattatcaccagtctgtcattaatcacaaaactctgattctactggaacagggttggttcaagagttatgtcaccttgtgttcagaagatggaagtcttatcagtatacataaaaattcaaaagatttggagatcaaagagtttattgtagaagcattacaagacatccagcaatcagaggaggctgacaaaatcaaagggaatgacataggggagatggacataccaggtctattaatgccaatgtctttgcacaagcaaaaacgaaccccagtataccaatatgcagttaatgaactaggtaaggtcatttctcacttaggtaaggtgtctcacgatctaataagagttaacagggtctgcaatcaattatttcgccatgacatcactgacaaatatcctcaattgactatatccattgcaaattaccacacagtattatcagatgtcgaacaaatattggagcaagtcctgattaatttcgttgggaaagctattaaaggttcggaagaattaatagtttatgggggaactttcccattaggagtagcaatttgtggaaggtattatgtccaattgagattgcccaaaaattctgatcaattcaaatatcattacaatgaacaactaccggagtttcatgatttaaaagcaaggtttgtcaagaataagactcacgaccaacatgaaactaattgggatgaagagcattctgtggatcgattgttacttggcctatccctttaccaaataccagagaatgagttactagagttgttaaataaatctactagtactattgggtgggtacctgcaaccaattccagtggaagtaaatttatcaaatggcatggaaataactcaattatgtatcgaggtgcagaatattcagtcaaggtgaataattcccttgttaatagagctagaaatggagcacctatgtttgtagatccaattacgagaaccttctatgagatcaacgtactatcagaattcatggatcacaagctgttgttgatagtcaagaggcaattccctacttgcaattacgtcaatagatgtatagggagtatgcagccagccactggttacagaacaataacagtgccatgggttaacacaaacatatctagcataatttcaaccggagttttattacacgataaagtccttcgtatatccgaaaagttgttgaggagtatgttgatgagattggctacaggagatgactcggaggaatcaatattggcctacgctcgttctttagaaacaacacaaattataactgacaagagtatgcatgacatgtatggtacagagattccagtgttactcagcactgcctggtacgccctatacatacaccgaggttacaattacaaatttaaattcctagtgcaaactattaatatggcttccaataacccacttgtgctacagtttgtgagtcaattactgccaggtgtgatatcgatgatgggtaaagttggtaagttagtagaagatattgcgcagactctattatctgcaatcgaggagagacttaaggtgaataacgtgttttgcaattgcaaaatgacagatgtggattttggttggcaactattagagcacaaaccacacatcattaaatatgatttactcaaatctgatcattatgctgcgttttataatgatgatgatggaggagatgaccctgatgattattggttatcatcacgaaccatttatgaggcacaacccaaagatgaggtggaagactcagaacaacaagcgaatcttaatattagctcaaaacaacatgtggagcaaagtggtgaaaacaaacctacggaatcaaacctccctgaaaacccatctaatatcgttgaatcagatttcgatgagttccatgacgcacctgcagaattaggtccagacaacccgttaataaacgacattggaccaaactacattgaattggaacaacaacatatagaaaaagtttggaatgaaaatcacagtaagaaagaagaattcctcaaaagatgtcattatgaaggggtggaaaacctcaatgatatcaaatacctttggagtatagaatgtgggaaacactttgtcaatgaacaagccaatgatgtccaatgtaacaattattataaaattaaaccaccaaccaataccatattgaatcatgccggtaaatctgtacaacgtatcatatggtgttactgggccgatggcaacccatctaaattcgttagtcaatgtatattctcaatggcaaataacaatccgaattacagattggtattaattgacgacaacatgatcaaatccttagtaaagggtgaaacgtttgaatgcttcatgcatagcactgctgcttttagatctgacttgctgagactctatttattaagtaaattttctggcgtatggattgatgcatccacaataatagaaattgatattgaggaatactgcaaattggcatgcgaacacgacagtggagttttccaatttagtctgtgctccaggtcagatcagaataaaacttatgaaagttggtttttggtagccacccaagagaataaattactaaggaaatggtatgaaattacgttagatatgcacatgaatacgtacaaatttaatcggtcaactatgtcttatcttgccgaaaaatacggacaggatttagtgacacattgtagtggggcagttaacatcaacctgcgagagtacttacgagtgtatataactgaaaagattgcattacatttgacagatttacattctgtcaattgtatttgtgacgatgaagcaaaactaactatatggcataaaaataatttaaaagattggttacaattttggaacaccgtggccaatacaaccattaatgacttaaccctgtctattggtctgtacaagttcattggtagcaccagagcaattgttaacaacggaatgaactataaaactataactaaaggtagcttactatctaaattgctaacttacatgcctgttaaatacaacatcaagacaatggagagaataatttttaacgcacccagtttaccaatcaacttaccacccaaagccagtttgtatcaaaagacgaattgtgtactattatgccttgggagtactggtgatatgataccatatttggtgtgttatgattacttagcaggccatggtaactacccattactaatcagtcacaaagatcatgaagtgttagtcaagggtcgcagattccatggactctctatcaagagtgaggatgtgatgggaatcgctatgaatttattgtatgaaaaggagattacaagttctattctaggttatcatttaatgcggaatattgccaaagaaactatagaaattttaaccctatataagagtcacaatatcaagttgtacgtctataatcctctatatccagctatacaagctatgaaatctaactccttggcctcatgggtaatgttgaacccttttccacccgagtggatagtcggggacaaaccagagtctacttggaataaatttaaaaccaatgtagccaaatggattgtcaatttatctgatacaataattagggtcgatcttaatttgccagagcatcaaagtggaacttatcaagagttaacccctatggtatgttgtccagctgaattgttaccaattaatgacatatcaaacgtgatttgttgtggaagtttaactatgcttaattattacactgatgagaattttaaaaccaatttcgatagtaaggccgtgttagtgtcatttggaagttgtaatattggagtggatacacaattgataatcaagatattattgatctgtatcaagcagggttacaaagtgatcttccatgatggtactaatagagctaagttcggaaccaccatcaaccaatttctgacagattacagaggcaatgtgttaataacaaaaagtgtcaattatgcaaatgtgcgagagatggttaattgctgcataatccatggaggaattggcacgctaacagaggcacttgctaatgacataacaccgattatttacccaattatagcagatcagcattactgggctaataaggtcaaagaattgggttacggaggtgtgatcaacaaggaaaattatgaattagaattacctaaattgttaaccctatcaagtaagtttaaagtcaatagagcacgtgacaacttcaacataagtatgctatcagagaaattggataatgttgtattgagcagcaacattaataataatatttatacgttaacagaatacaattgcagtcgagctttaatgagatttgactttgatggggtcaagcactgtttaaaagttgatctaaatagtattggttacattagaagttgtgattttaattactccatcctttatgatccccctactacttctcattgcatcagagcttgtatggaatacatttttgattctaaggcctttaagaccatagaattatgtaaagatcgtagtgtgcaattgttgcttggtgttggttgtagcaaggccgatttagtgaatggtatattatcattgggcttgaacctggcgatagtagaaagtgatgttagattagacgtctacaaatattttgagtctccgacagtgacgctgcgtattaagaagacaggggctaatcatcattgtcaagttgttaatgtcacagttattaacaatttagaatacctaacaacattaagtcgagttgttaattctgatgaaattcattcccgcatcatacgcacaattaatgataacaagttaagttattcacatatgattaacattcacatgctattaggtttacaaaaagagatagtgagacgagatgtcaacattaggttaagattagacaatcttcaacatttaatgagtcgaggcgacctaaacgtagtatggttacctgttcataaacataggagtacttacttctccgacatgatgatgccagacaagcctttgagcttggctattgtaactggtaccaacaagtgggaggtggtggttttcaatataatggataatgtcttactaatacatacatccgcggatttaccgtcacaattgatatttgtcaatttacataaaacattgattgaatctaagaaacctgcaaccaagataacatatgatattgatgaaataagtttaaataaagaaactgtagattactgctataggaatcttctggttccacgcagtcaaagaatgagtcataatacgtttgcaaagtacagtgtcatagttagcagttatgataataggagtcatcacatgcacgatgaattgtctatactgaagcaggccttacaagtcaaatttcacagtaaacgagaagtaactcttgaccagtttttaattagttacaatgaaccaattaataggctagtattgatcaacgctgagctatactacaattgtgaatttgagaattttgaagacgcaaatttaatgtgtcaatatctaaatggtatactgcataatagaaacaatgtattgcttaaatcagcagccacagatcatcaggtcaaatttcttgacattaattttaaaaggcaagaccgaaagttggtcaggcggttgcatattgatgaaaattttgtagatcaggagataacgtctgaaactcttaaaggtcttttaatgaatttaagggaacatgatagcataatcagttcgcaaatcaatgaaatgtttagtaatttgccgtgcagtttgcatatatccagacccccgcttgaagtcaaattattaactgataccccagaaatgaatttaatagctctcaagactcaagcccagcagctcatattccctgcaatatatttgttaatcagaaaggtaaagcatggtggggcaactattaaccaaccagttatagaccatgacagggactcatggcaagatcctaaatcgaaacaattaagtaaaccagggaattggtggaatttgacttcaaccagtgccaacaagaaatatactcgtgtatcaacttttgaagatgtgatgtgtatgaattatttatggattcatgacccagtggaatacgactatcatcctacaaaggatagtgacccaggaataatgaatgtttacatcgccccatacacatccacatatactggcaccgtgttagaacctttatccgatctgccagatttcaatgctattaatttgtggtctaacaatgatttaactgattggctttcactatacagcccaatcaatcattgcacaattaagatgagggaaatacctactaagattaagactgtggagaaagtagcactgacaaaatatcctatacgctctagagctgtgctcactaaagtatgcttcgaagaaggtcgcagtattataggtagacttaaatcggtggcattcatacgtacgataacaccagcaccgaaacaagtggctatagatctagctaacacatatttccgtagtgattggagagcaattgttaatcagtaccagtgtgaaagactgatcatcaaacgaagagacgttgaacaatggattgatgataacaaggactgtccaaagattgttaaggagttgttacagttgttatctggtgagttgtgtgtcaagcacataagtaatgtcaatgtacatcttaagttggaatcgttgttgaaagataatcccatagattactggagacaacagcaggcacgtataattgtttggcaacgtaaggctgtgtgcgcagtgtacactagtgtattcgtggaggcaaaaagacggttgaaagctattttgcatgacaaaattgtatatgccgatggcttgcggccagatgagttatcagcacgattaagactatgcaattctgtagctgggttctttgagaatgatttaaccaaacaagaccgacaaacggacaaaccaattatagacgctgagatgataatttatgatatgttaggagtacacgcaaatgtaatcgcttcatggagagaaatgcatgaaacatggatgttcaaatcagataactattggggcacaggccaagccatgcgattaacaggacaagcaacaactgccattgggaatgtattaactaacatgcaagtgcacgctaaattcatacacaaacactggaatactttggaagttggtctgttcttgggagatgatatgtgtctagtgttcaaacataaaccttcttaccaccatttgaagaatgacatcgcaaccatgtttaatatgcaaagcaaagaatcatggaatagcaactatgggactttttgtagtatgctatgtactaaattgccacaatgcaaagccgaaatgtgtcccgacttcgtgcgattgaaatttaggtatgaggtgactaatggagtgcatgaatgtaccaataataatatcatcatgaggaaagctagttatctaatgatgttaggtgatttacctgaagtccgaaacttgatcagagagctagaattgcctattaagcctgtcaaatggtataattatcattgtgccctaaccgcagctggacacaaatatgacatgcacccagaccaagttgaaggtaccttacatcaattactgcacttaatcaaagaagggaaattgcacaagtacacgtttagattatttgaaagtgggaagcatcattaa

SEQ ID NO: 1157 - DNA, 14763 bp, Phaseolus vulgaris alphaendornavirus 2
  source 1..14763: mol_type = other DNA
atggctagaaaacttgacaaggtctcgtttttaaagtctttgggtggttcacaccacccgaaaattcaagcttctcatgagcacacgagcaatcgtgtgctcatgagaaaattaaataaaagaaatgaatgctctgcaagaaacgtatacagacagagcaattataaagtaaaactacactcaagcaagaccgttgtgccagcggttatggcagccagacaaggggaagaattagaattcttggaatttggttacgaagaatgtgtgccggacctcaacaaaatagacatacgcacaattcgatctatgatgcaattatttgaacaaggacattgccacatagatatcacaccggaggaagttcaggcaacgttacacaattgtcaactacaaagcacagaaccgtattatggtgcccctggaaaactgtattacaagcattgtcggcctttgttaactccaagatccaaagaagacggaacaacaaccgaagctgccagggacctgttactgggcataattaagaaatttggcggatccgttttaggaatgctgtatcaggactgcgccaacaatgccaacatgacgccccacgtttaccggcagggaaatcgttatgggttcaaagccatggaaatggcacagcccgacgcagcaacactgtgttgctactgcaaaactgtcaattttgtttggttgtatggtgagaccgacggtcttcaaaaatcacgatgtggggtttgcatgaccccactgctattagaacacgcagtgcctgaacacataatgtggcccatactaacagtccacgacatcacgcaattgcatgttggggcaacagagttgcaaaatgcagcaatcaccttgcaactagacggacaaccaccaataacgaccaaaacaatgagtaagttgatagaacaggatttcaaaaacatgaggtcaatcatgtcaagggctatggccaaaactgtgtacgtcccaaacggtatgactgattttcagcacaaccatctgaccggccaagtgccagcctacaagttgattagaaccaatgcgatgcccaatccgcatgccatgttggcagcggagcgtagaattgcaacaatcatgtttgcagataaacgtgggcccggacagacaatattggacgtcggatccaggaaaaacttgactgggctgaaggagtggcacggcatgggaccaataatggactggcgtgacgtggaacggtacaatgacaaaccactgagcacaaatatttgcgaccacaccgtgagaacttgcgaatgtatgcaagggaagaagccaatggtgatgtgcatagattccatttatgacattgatccgtgtgacgtactgaaattaatgcatactgtccagaccaatcaactgttcttctgtgtgagtacagcagaagtcgatttcgaatccactagcggactattggcacacgggcaaggaatgtggtctagacacaaagataagctagtcacaagtctacgaggcgatgacagaccttatgtcaatagctggaaattgaccaaactgtggtcgaccgccgatctcattcagattaaccaagtggaactaaatctgcagaccattaaagtgctcgggaaccatcttttgagggtgctaaccatagtcccgagcggaatggactgtttacggactcggcaattggatcacaggacgatgacacaagtggacttggtggccccagtgatagatgttgaaagctggctcaatgtgttcggggtaccaaaaataagctacaagctaaccaaactggatttgcaactgtaccgcgcattgtattcccgcaatttaacagggagtctgtcattcaataaattgatagaatttggacttggttacgctcatgtgaagtacaccacaagaacatccaccataacacatcaccacattagtgcggatgacatcaggttacatgcaatgcttgcatgtgtggcaacgagacgcaaatttgcttgggtcaaggcagtcacagcgttaaacaccacatcaaacgcgttcggcttggacccggtagaagtagttaagctcatgtctattgatctagcagggaagttggtgaacgaaatttggggtgccttgttgcccgatggtgcactcaaatcaaaattgagtggcatggtggatactgtaaaagcatggatcaatgaccccttctgggatgccctcgagcagttgaacgaaggatcaaaacgctttgaacccaatgtagtggtctggcccatgttaactgccgagactagcgtggaatccgactatgtgtgttgtcaccacaacctgtggtgtgaacacgaggccaaactggaagagctgtgcgaatgctgcagattggccacaaaattgagtgatagtcagtattgtttgtgctgccgacctcaggcacccaaacataaatgcgcgcaccactgctatggaaatcatggagatgtgaaacagaagggcgagataaactgtacttgctgtgggctacgcacaataaatggagtgtgcaagtgttgtgtgaataaattaggtaaatggcccgcacagcaggaaggtggcattccactcaagtaccgccgagaggaaatcaacaaagcagaaaaaattgtcaagtcgcgcactaccacacaagagccaccccaaacagcccaaaaaacgccaccggctggggcagcaagcgaaagtggcccaacagcgcacgctaacaaaccaagtgatgagcaaaaacattctgaaagagtaacggaggaaagtcaagcagaactcacgatactcgacaaatggaaacaaggtcaggccagttcatcaggcacaaaaacagacgtggcccaaggcatgtcaagcccgaaccaacaaccaaaaaaaaatgatgagcaagtagatcaacacgccatgtctactgaagatgaggtcgtgttcaatgaactaaaaacattaactaccttggattatgcttgtaatgtgaggtacgggtacacatatacagtgactgagcacttgggtgtgccaaatgagtgcaacccattgaatctgatcgggattagtgaactcaaatatttgccgatcgggaaaaaattgcaccctccctcatggttaactgtaatggacagggcgagtgtgccaggggatggcatatgtggctttcatgcaatcaatagagtgctagggggaaatttatcacttgtggagatgcagagggtgaccaggcggcagacggaattttctgccgacgagttattggactatctggcttatttgggaaaaaatggaattattctgacaaaagacacaatagccagtaacaagattgatcctttttcagatcaatatgtgtgtgtgcgtcactgtgaaaccgatccgaatcccaaaaaccactgggagccgtgcaccgtcatacagacggaagacatggagtacacaccatgctttaacggtttgttcaaacagtcccaagtcaacacaaaacagttgtggatgacaacggcgacaacggaaattgagcacaaaaaccaggtgatgcgaattgtgctggaactgattaaaagagcccagcccaaacagagtgcagcagctgccagtgaattgaacctcaagttaattgacaccctacatgacacatggatgtccaacaatgcaacaatggtaaatgatcctgcagcagggttattccattataaaatacgagctgaagactacgagtacctggcatgcctcgtaaacagaaaaatgactgcggacattaaggacgacttaattgacccactgaacatagggttaatgcacgacacggacattgaccagttacggagcgcgttattgcgaaatgtggtgtaccagtgctgtctcatgttgaatgaaggtgacggtacagagcgcatgactgcagaactgtggactagcatgtcaattgagaccaccaaagtggcggggggactgcgcatgctacagttgggagacaccaaggtgaaaactggtgatgtaatatctgtgaacacgataagtggacctcaacataggctagtctggaaacacaacggaagatatttctgcaaagaatggatgcccccaaaccacgaaaagttgagaacaacattgcacatatgcaggcaaagctttaagagtgccatgatccaaatgtactgcctatcacgaaatcacattgagtttaacaaattcaaacaattagtggagacggcagtgtgcacattgggaccagcagggagtggcaaaacaacaaaaatagcaagagattggactaccgatgatttggcaattgcgagaacgacagtggcggtaacatcactgagggaaaaattgaactcaccaaaacaattggtgatgagtcacgaaaaatacagttttactcaaccaccaacacacaggttagtgatagatgagtgcaccatgtttccatggtatgagttatatttttctttaaccacgctgcctacatctttggtaatgtacggtgatccaaaccaaataagtactatagacacatacatgctgggtggggagcggatactggacaacattgcagattacgtaccaaacaagacgctgctcaagtccacgtatagatacgggcccaagttgtgtggaatactcaattcgatcgtaggtgagatagttagcaatgctccacatgacacaatggtattagatctgaacctgcccacgtgggatgacagcaaactgatatccattatacacgatgcaaaaccagatgtggtgttggtgcaccacaacgtcacaaaacgaaggattggcaaactactaactaccatcaaggtcgagacaatacattcttaccaatcaaaagaggccaacgcagtgttagtagtgcagtacaatgaggggggcaattcccagatctacatgaacaaaaattacgcggtttccgcagcaactaggtgcaaaaccaagttggtgtgggtaagcgttggattgcccgacgggatgaaactagtagacaaactaaaagggtcatcactggaccaccgtggcgaaggtttgcaagacgccattgaattaactccaaacaccaggcatataatacgccaagcaattgacaatggtacaatttctccagctaccctaaccatattacagaccacccagttgaggcgggaacagatcgaaatcaaacccgaagagcagcggatcgaacgagacttattcacaatggaagatgtagagaagttagtgcaggaattggacatctacaaccaaagagtttggacacccatggattggggggaattcaaaaataggtggagggcatctgtcccaccagggaccaaactggaagtggacgatgaccggcgcgtcttgacagccaaagtatgggggtgcacagtcacggtgacagttcagcaagacatgtcaaaatttacaatggacttacaaatatcgtttctgatgcgacttgctaaatcaaaaattgaaaaacaatttaaacaacattataaagacctctggataagcgaagcaatgggcagagactgcaagtcaatcatcatggacctaaggccagagtacagggatgattttgcacgcattgtaagaccagcgctcatgaccaacatggttagaccaataccggacacacaaccgtcgacttcaaccctaaacaaagacaaagtaatagtgatagattggcaagtaactgacgatgaaagtagtggtggaacacaatcgaccccacgacacgctgagattgaggactgtgacgataacacactaggtgacgtggaaagatcggggttgataggagcgtcggacatcagattcttatacccagtaacaaacaatatgacaccaaagcaggcatcactaattgcagatgatacaaacccccatttgttacctgttaaaagcattgaattgttggcgttggtgcgagcggcattgcccacaataaggttaaccgtgctgttcgaagaatgcgacaatggctacaatctagatttagtgagtgaggaaagcaaggtggccatgtttgaagtgacgcagcacaacatggtggtcaggtcaattggggggacgatgaaactgagaatggggcagttgctccttgacgcaaagttgaaagtatttgccacgcagacaaagcgtggtggtatttggaaccgtagtccaatgttgacagatgaacaaacccaaatcgtgttagcagcatacccctggatgcaagtttatctggatctggacaaagcacaggacgaaaatgttctaatcaaacacatcagtcaactggacagctatgattacactgccagggtggcagagtttaaaaacgttttggctagatatgacgaattgtctcaaatttactcgcaaacaggcgaattggttgatgttagcggtgttaagtgctgcgggccgcttttaaatgaaagcatgatagatgcattcggcaacgcaaacacggtgatgaccctcaacctagatgtggggccaacgtccaacagaataattagattactgagcgaatggacagagacacagtatgacatgggtcagatggcaaagttagatgttctggggagcagtgttgtgatggcgacttacgggggttgcacgttatgcgctggaattaagttttcatctcgtggcgtagatttgatgaaagtgggtaggcaaagcacagccatcagcaatagatgcattactatataccaccacccggacatgtccgtgacggccgctctgtgtcacgggttacacctcaatgacaaattgaacctggtgaccctcggacctctggactatccaccagatctgttagcagatttagacgacaccatgaaagaaccatggtttgaactgggtatgatttttgaaaggatgtcacacatgaacaaatggcttggctccaagataactggtgcggatagtgaacacacatgtgatttgtacggagacacgaaccatgggctactcaatgacttagcaaaacagcaaccgaaattggaaattccgctgcgtaatagtgttcccacacaccggagcctgttgaacagaccattcaaagctataataaagggccaccaagtggtcatggcgagttatgagggaattatgtattgctcaaacactatgtgggccatgagaatgagcatgaggtttatgccactagatgttatggtacaaaggagttacacatacaaagccaacagctggccctggagactggcaaggttcgtaacattgaacggatcactggctaacatgatggtgggttacgacgatgaaacaccaacaggggccttgaatttgccactagagtatcacgaaaataacaagaccattgtgcataggtttttgtgcgaaaagcgcgaagaagtagttttgtccaccatgaagaaaacacatcacgtggtgttcgtcagcaggagtcaactgcaaaattatggatctatgattagccgggactgcgcgggtctcccagtcgaagagcaggggtgtgacacaattgaccaagggtttgatttattggtggaacaaatgtgcctaaaatactactataactcgatagaaaaaggtgaagggagcgtgatggtgaccgactttccttatttatcactactcacatcaagttggggaaatttctgcataccgggaacaaatggcggaggatttagatattaccaaaatttagtggattgcaacaacatgatggaaaaaatgagtcacgtgtactgcatagacgagagagttaatgaagaaaacagagaccaaagcgcatactacaaagagatgcaggaggcaatagacactcagataagaacaggcaccgggccttggttcaccaatagcaacagcaacgaaccagcacgtataacaccaaaaaacttaatgggattggtgattgccaaattgccatgtcaggagattgcgagcatgatgagagccaacaacttaacttcgatgaatataatactgccacaaaatgtgcagagtgacaatcagttatttggtatagcaaccgaaacacaacgggagtatcagttttggtaccacaattcgaaccatttgacaacaataaacaaggagttgttgcacatgttcatgacagggaagtgcattacaactaagtatggtaccctagtcagtcatggagccaatcgagtgcttggacattgcatagtgaaattgacgttgttgcaaaatgcggaaatggcacccaagtacgtgcgccccatagtgcacgacaaccaaacgaagcaagtggtgtttaaactacccgtaatagccaattttaaaatgtttctgaacggtggggaggcactgatttacaaagaagtggacatgtcattaaagatgtacagagcactgtcactcagaatgttgaggcctgacacaacaatagatgatttgttgtcctatgccagaacttacagtcacaccgtcgcttattcaattagcaaaatgacaagccagcaaccccaaatgataacaaaattgatggagtgttgtgtgtgtgtcttcttagagagcaccaggttgaacaatgccactacacgattaactgagttaatcaacagtactgagttcccactcacaaaactgtcaggactcaaagacatggcctggtttgcaactatcaaaatggtcactgacgtttataagtggctgggtgttgacgtcggaattgagcagttactagaaatggtgagtaccgtagcaaaggaggcagcaggcagaataatcaacaacattgacaaattgaaggcagtgagagtgagcaaagtggaacacaccgacccattgattatgtatgatgcgtcagccgatcagacagtaatatcggaccatgggccatccaaacccgtacaattcgtccagggggtaataaagactttaaagctcgggaaagcagctggatatggcatggccaggtcagcacagaacctgcgggatccaagagttgataacttggtggccaaaccattggcaatatccaaagtggtcaagcagttggaagagcacataggggagaacaaggccgaagcgctgcgggaagtgatgcaagatctgcattatgattaccccaatagtcaattaatggaggcattgataaaggtaatggaaaacatagatgataaactgaaatggagggatatgtgttatttcggccagatcatgggaggtgaatggcacaccgttggtgcaaatttagccaaaaaatcaaagaagccagtcaacacatgcatcacattgaaccagttagacaaagaaattaaagagttgcaatggatgtatccaactgaatgcaaccattggaaagggaagaaaattgtatttagtacaataggcagtagaggggacatcgaaccctacattgcatgggcacaagttgtggccaaactagggagtgagtgcaagtttttggtaccaaaagactacgttgattatgtgaacagctacggatttgaggcattggggttgcaggtagattctagcaaactaatcaacagctgcatacaaatggagaagcacaaatggaacccgctacaactctataatgaattgaacgagatgtttgaaataatagaaggcatgttcaaactgaacaccaccaaactcttacagttttgcgaaggtgtcaacatgatgattgaaacaccattcacccacgtgggagtgcaagtggcacaaaaactgagggcgccttgcttgttcagtacagcttacccctgggaacagcaagccggcatgacaacaagggcagacagcgccactataatagagatgttaacgggtatagcggcatttaccccgtttcgcaagcacattgaacaatggcgtcacagaacattgcaattgcacaatccgcgtggaataatggcgcacggcagcggtaacccgctggtgtacctacatcctaagttaaccacatggtggaaaacatccaacacttcagcatgcgtgggttatgcaaacagttgtgtaaagcaagtcagcgagcaagatgtggagctaactaaatgggcagcagaagccaaaacaattgcagtgtgttttggatcaatgacgggggatcgcagaagcagcatgacaaccaaattgatgttatccatgcaatcacaatacagatttttagtggtggatgggcagaccagttatgatcaaattaaatttccaaacatgaggcaggtatccagttgcaattacaacctgttgttcaacgcggtggaaatcgtggtcacccatggcggcagtggcaccacacacaatgcattgcagcacggctgcggtgtggtaattgacccccattttggcgaccaattcgcttggctaaaatcagtggaacagcttggctgtggaaccagcttagaaaaacttctgaaattggacgtcaatgaacaaacaagtaaactgcaacagtacactgacacagcccaaactctgggtggaacagtacgcgccgagaacttcatggtaaacctaatcacaaacagtgaagtgctgtggcaggcggcgtccgaccacaccaccaatttactcgccaacgtagtcgaaccactggtcagcttagatttaaattgtaaaaacatcaacaaccaactggcaagcggcggtttgggtaagtgggcagacgtggaagacacaacagtggtcatcacagcagaagggcccaaatttgacaaaaatcacattaaacggtccaaccaaatggaaaaaggcacaggtcctcagcataatcaaggttcgagcacgactgtgcacccacagacaggaaggaatccagagatgggaaggaactataaagagcaccaatcatcacatgcactaacatacgtgcctaccaatgatgacttgcaattggctgccaaagcgcgagaggaaagaaaagaacaaaaaaaacaggccgacgccacaagacgcaagattgcagtgcagctagccgaggaccggaataggagaaaagaagccaaagaagaaaagaaggaagcaacgcaactacgtctcgaacaaagtgaacccagcaaagaactggagacagcagcatcgttagcagttgaaaccaacccggaagggaagccggatggaacacatacactcagtaaaaaatcgaaagaaccaaagtatccatggggaatgtcaaaagacgaagacgcaagagggaaagagataatcagtgaatgcgtggcaacagcgatcacagaaccaccagcagcggtttacgtaacaacaacggacactacaattgaacctgaaagtatggaatcccaaggagagcggcaagcggggccattgagaaaggcacacgaacaatgcggaactatggattcgaaaaagctgtacaccaggaccaacctcatctatgacttgtttgaagtggagcacaccgggataaattatgcaccattcaaaatcatgtcaccaacagggcaatcggtggtattaaatcccaatgagggaacggattgcgtttttgaatgtctcagaatggcactgacagatgagtatacaaacgatgaagacaaatcaaccatcatcctcagaacctgttatcaatggatgaacattcaaaccatgccaaccacccgtcagttagaggggttggtgagagcattacatttgcatattggagtccagttgcccagttgcagcatcaatttcccaattgggagtgcaaccattgagcaagtcacttatttggagatcatagagggagtgctcgctgcacactgtgtcttgaagaaagtttcgaagccaagtgtggagttctacacagcgtcaaatgccccccagatgtcattttcaattaatgtaatgaatgctgaaaatgctgctatagacgatgggttagagccaaaattgactatgtccagctgggcactggacttgtttaatgacagcaaatgtgagagatggtgggctatgatgcgcaccaactatacttatgcggaattcatgcacaaactagaatcaaaaaacctagtccacactgccaaacgcatgcatgcagccatgtctgtgactaattgtacccagtcagaaaatatcttaacagttgatgagaaagtagtggcgaacaaatggtattgggtaacggacggagccgagtggtatggggcaatatccagacgggtgggtgaaaggagtttattgataacaacagcctcacattataaatggggcgaattggttgtgatggtgcggacggataaccacttgggttggccaattggactaactgtgagagagcggttggcacgcaagattatagtgcccgggaatcaagatgtcacggcgttaaacaagtccacattgtacgaaagtaggtgcaaaaattacggggtccaattaaaaggggtgcaagacaccagctgtgagtatgtagcagtgtttgactatgataaccggtcacaccacaagtacgacgacgctgcctttttggtcagcaagggtccaagtaagagcatcggattgggtttcgacctgaccggagacatgtgggccaaaataaccaaccgcacaagtgccgtcaggcacatgctgaacagaggaaaactgacattgtgtatggagtttgtagaccaccaacaacgaaatacatttgcaagcgttcttgacgctagtagagtaaaatacactctggaaggtggcagtgtttatttggcaacggaagaagtgtcgcatgcacactcaaatttaatacaagagtgggctgtgtatatgaatgccagcaacgggttagtaattccagatagaacattaatggaaagattgaaagtgggagtaccattgcaagagttagtggaccaaatttgcccagacatcaacatcaagtcagcattcggtaaaaggcaccctagtaaacacacagcggtgttgactaatgaccatgcaagggtaaaaatgccgttgacaacaatagtgaaaacagaaatggaaacccaagacaaatatttagtgttaaggtccaactgcatcatttgtgaattgctcccactaactagaggtggtggagaagaagaaccccttttctggagacacggggaagagttaaaagtgaactctgtgacccgctggtggaatcaaccggaaaccgaggcacctaaaactggattcaataaagataagtatttgcaaatcaatagcgaggctttaacaaactggaaagcagaaaatacatcagtggtgcaaattagtaccaatccatttaaccaagctggggatagcacaaaaatgcactatgtgggagtgacacaatgggcaaatgtcattgactcacaattgggttcaccagagatagtagactatgacataatgagcatgtgggatgacaccgactttacggattggaatgaacgatttgcaccgaagaacgacgtggttatcaaatcaaaagccacagcaacagaaatgcgagtaacaacaaaatatacaatggtagagtatccaacccacagtagaccagttttgactaaggcggcaaatcaagagttcaatgctgttagtgggagactgcacaacataaccacatacaggttaaaaaaatacgatcttacaagagaagtgcgcaaatttgtagacatgtactttgatagttcaaaacgtgacaagttgaaggtttatcaaactcagcaattaacatttaatgacgcaaaagtgctagattggttaagggatcgtccggatagtaataaaatagcagaagaactgaacaatattttagctgagggtatgcaactgcacccaatcaacaaattaaacgtgcacttgaaattggagtcgctgttgaaatcagagccagcgtcaaatttgaaacaagttaaggctagagctttagtttggcagtgtaaaggatattgcgccatatttagtcacgtgttcaaagaagttaaagttagactcaaagatttgttgcgaccagaaattgtgtattcagatggcttaagagcggatgaattggctgcaagagtaaggttgaccacaaatgtcaaatttttgctggaaaatgacttggcccaacaagacaaacaaaccgatcatgagataatcaaggttgaaatggaaatttataaattgttaggcgtgtgtcctcacctagtagatttatggaaaaattgtcaccatagttgggcctacaagtctaggactgtagcaggtgtaggtgacgctatgcgactcactggccaagccaccactgctatagggaacgccatcactaatatgctggtgcataggcggttggttaaaacgttgggccacaacctaagattgtttttggtgttgggtgatgatggattaatgttcacaacaacatgggtggataccactaagttgaataacgagctgaaaaccaaccataacatgatgtgcaaaccaagtttaagtcagactcatggtgtgttttgctgcatgatggcagcaataactgatgaaggtaattgcacactgggaccagatgtggtgcgattaagacgcagattcgagtgtccaaatggggtgagtgaaatgactcccgacaatgtacaagcgagatgcatggcgtattacatgatgctcggggctacacctgaagtgacacgagcaatacagcaacaacagttgcccatacaaccaattaaatggtatgatgcggacagtatacgtagtgcaaccatgagtaaatacaacatggatgccaaccaagttttgaacgaagagagattgttgctaggcatgttaagtgaacccaacagctttgcacacaaaatactacattggcacgaaggtcaatag

SEQ ID NO: 1158 - DNA, 14799 bp, Phaseolus vulgaris alphaendornavirus 3
  source 1..14799: mol_type = other DNA
atgggtgagttcttatcaatcacgtatgatggattagcatgggattgtgcaaacgctttcggactaaacctatttatgcttggggtgttacagggtggacgcgtgctgggccccaaggggatcaaggcagagtcctttaaatcttcataccgggcattcacggagaaactgatgactctagacaaggaagagtttagtagtaagaacgatgctatcaaaataagctcaatgctaaaaagggaactcaacttaagactcgaccacagaggaatcagcgaagtagcagaatatctaggcttcgacttcatgtgtcctgatcccgaatcatatggatctatgataccagaaaattgcactcatgacttcacggaggctttcctaatacatacttgtcagttttcacagccaggcgatttttcacgccttataggtgaagcaatatacactgagtacatacccgtagaaaaacgcaataagaatggaaacctaaggaatgactgttttgtttgccctgcttgtggaactctaaactcaaagtgtgatccggaagtttttacttgcgggaaatgtttaagcgtaaacgtagaaatttcaatagacataactgaactctcacggtatgacgaaagcttgtaccctataagcgcatacgaccatgaccttacgattaatgggccgttggcaaacttaaccatacagaattacttggatggcgggctattaaagttgagcaaactatctagcgaactcattaaccaggatgtccttagatttgttaaggcccggtcaaggcttcaggtgaaaaaccaacatgtatgctccagcttaactgatgaggaagtttttagcttgagataccacttcaagaatctggagattataaagcgtaaaacttggaatgacacttacggcatgcttgggagtgaaagtcattgtttgctagccagcctactcaccaaaaggtccaggataggagtggtcaagggattcaacccttcgtttgttaatagtcagaaacatgaattgatatttggaagacccacccatttgctgaactggtcagaaactggacttccggatattttaggagcacaggtgtttaattacaactcaatacctgaggttggacacctgatcagggctgcaaccaaagatgaaattttcgtcatagtgccgaacattctggatcagtataatggatttgggagttcaaacgcatttgaagtgagcactgaaagaggtatcacgacgatactattcaacgggagtaataaagtgatagtacggcccatcaaagattacatgaccctactgtgcaacgactacattaaagtgggcgataaggttttctccgtcgacagactggataaagcgagcacgtgcacattggtgagaatcaaaagggtcactagaatagaaaaaatggatgttgcagtgggctccaagagtgtagaatcgaacaatttcaaatgcgtcacactgaatttgcctgattggcaacagaacgtcaaaggattgcagttcggcccgctacttaaaagaagaataaggttcaatgttaaattcctgaggcacctggtttccaggtgcgaagcctggccggttagcttccacggattgagggagtacgccattatttctagcttttcaagaattgaaagagatgacaaagtaaacttactattttccgttccatttgaggatatcccggaccatgttttctgtgcttacaacttgtacttgcggaaacagctaagcacccaggttgcatccttgttaaccaacgagcgcaccatgggactggagcatatagtccaagctctcgcaggagggataggtaacgtcttaataaatcttgttgatagccaagtactcgatactaactacgctaaatgtcttattaacgataacgaaacagtgaactggcttctaagttcgcaatgggcagtcgttgaggaatctattaaggagtgggaagttgggaaaatccaagttgtggagctggataataccgagatagggctagagtacatggttcccgatgcttgcgaacatggatctgaaatgaatccaataggccacggttgtccgtgctgtggacaacctacggatttggctggacgctattgctcaaaatgttctgttgactccccttgcgaacataaatgcctccatcaatgcaggtcgaaaagggatcatttttgcagtgggatcctcataaacggatcagtgagcgaaggtactaaaatgccatgcgggcataaagcagtaacatgtaattgttgtagagttatttcttgctatcccacttgtcaaaattgctttaactgggctgactacgataatgaaatggataacctggttaaggtccaaattaaagtccaagaaggagaggcacctggaatggctgtcaataggataatcagccaggctaggtcggaggacgtctccggctaccaagatggagaagaaaacggagatgagaaaaaggttgccgacagtaatttggatggtaaggcctttcctgttctcaaaagcaataggaggaaaggtaggaaaaatagggatgactacaaacagaaggtattcaagccgcggttagtcacagcggaagctagaaataacgatgaaaaggaaaaaaaaaataaaggtgacttgatcccagaacaaaaaccagacgaaggaaaaacgactgactgcagggccgaagttgaattggcaagtcaagcaactgatgaggccaatatcaaattgttagaaatgaaagtcttcaatcaaatttccgcgtcatcaagcagccaggctgcaagtgaatcatcgcagtcagatgaggacgagaaaagtgaggaggaggcgaatgaagaagagaacattgccgaaaaatttaaactcatgataatgatcgacaagctcagatcggctactgacgacagttatactgagttaatactgaattcaggcaaagctcccagactagaagttagagcagccacgtcaacccttagctacattcaccaaggtgaggttgctgtgaatcttaccaacataagggccgtgaatggcattaatgcagactacgaagggggttattgcttgagggattcgttcgcttattacaatgctgaaatcaatgaagttagctggagagatgcttgcgatgatctaaacctaccagcaacttggtgcttgtacactgaaatatccaagtacgcccagtacttctcaatgaatgtgttggtggtacatcaagcccgtgatgagctactcagcgcgaacatgtggatttcagaccctaatcaagacgtcaatttcataagatacataactgagatgccgacagaagagacgtacgagctgaatggacattaccaaccctgcgaattaacaatgtcaggttgtgtttcgtgcgtcccctgctacactatcgatgtaaccagggacgacgtggacatgatatatgccaacgttacagggagaggcgatataaataaattcatggacctgactttagaacagagagttgcgattgggttggcaataaatgaaaacaaaggagttggcctctttaaagttggattcccaaacatagaatacgaaacaaaaccgaggggattcttcttgtgcaacaatgcaaacaaggagaataatccacgtggtggtaaactggccatattcatacctgatgttaatgtgggtcctagttttcacattcctaacctgcagacggaattcgagctaaccgagtgggttctcaagaatcagttagattcagagtatctttctgatgaattaggaatcgcgaaagacaggattaatatggccgttggacagtatttgcaattaaaattgcaggtggagagtcttgcttctggagataagaaatttgtccagcaaatagccaatagaattaaaaatattaagttccacaaaaggaaaaattattggttcgttataaccaaccctcagctagaaaaattaaaaaccggggacgtagttctgataagacaaggaccttcctattattgttgccaagtattgcgacacttaaggaagttgatcttcccggtgattgatgatagtgggtttaatttccaaagcgaaatggtaactttcaagacgagctacgcatcccttttgatagaattggactccgcagcaaaaccaggcatgcccatgcacagactaaaacaaataatggctgacagtgtagccatatcaggttatccagggactgggaagacccgaagattaatacagatgagtcagttagagcccggagtcataataggagtgactagaggtagccaaaactcattaagggccgaggccatgggagccaaagtgaggataatatccgcagaaagggctttaactgagagggccaactcatcttgtgtgtacatagatgaaggaacgcttctcacagtgcagaggatacttagtatgcttggcccgaatgtcaaaaaacttgtcgtgtccggagatccttctcaaataccagctaaggaatattctcctatttgtgcctatgaacctaccaaccttttagaatttgccagaaacaatggagctgaggtcgtgtctctgctggagacctggcggttcgggcctagggtctgtggaattctcaatgaggcattcggcacggaccttaaatcggtcaaaccaaatgatactcccttccatctggaacacagtgatggactcaataaaaaagaattaaattctataatcgagaagaggagaattgatacagtattggtgttcaccacagccgtcgaaagacaggtgaacgccttgctgggcccggagaatagagtaagagtggcacgggtccatagctcgcaaggtgatagcagagatagggttctaattgtccaagactataggaagggaccggcccagagttcactagaagttcaatttaaaagggagtacatgatagttgctgtgacaagatgcgttaaagaggtcacactaatgtgcacttacgagacttgtaagcacagagaatcatcaaacaccaatatagctaggcacctgaacagggagttagaggtgcaatatttggcaagtggcggtgcttccgaaactagcatactcaatcagattattggagggctttcagatcagttcaacgccgagttaaaatccttggagccatcattcatgaaggactgggcctccgtgataatcggttatgtaaacgggaaaatcaataatgctaaatatagtcacatagctgaattagtacgaaccaagaatgttggtaaactgcatgacaacttggttcaggcagggtttccgctaattacggaggttagtacagaggatggtaagatttacgcaaccatggactatgaacagactgactggaaccctttgaagaaaatgttcatgatgaatttcagtcggaaacaggaaatattagtcaaggataacaaaatctacctggggggaataatgattttgtctaaagccaacgaaaatctgatagaggtagaagccggtgattttgatgcctggaaatacactaagaacgaagggtgtctattttacatcaaaaattttcatgaagtagttaacgaaggtgagtgtcaaacaataaacatgaatgtaaggttgctgaatcattcagctcagttgacctggaatgcggctaaggctcctttagtgatagattatgcgggtaaaaaatattacgtgaaaccgacaactgggtgttcattatgcggtggtttggaaatccggactaagaaaaataagttaatcgtgttcgtcaacaacgcgtacagaacatggacgagccgatcattacaatataagtcagaaaataacaaactggttagattgctaattggaaagtgggataagcaatacaatgacggccacctttgggaaatcctgtgcccactaattcccaatgttaaacatcatatgttgcatgctatgttgtggggagaaagagtcttaagcggcctaagaggacttttaagaggcaaaacagtgaaccctgtagaaggacatttgtttagaaatgaattggagttcaatgagagggtcttaatacggtataagaacgaagccgccagaagaggaataaccttgatctggaaaaacgacccttccctggcttattttaggtgttcatctttcctttttagtgccaaccagaagggcaaagaaggatatgtgtactttgagaagcattctaatccagtttttgtcaaggaaggttgggtcaaaaacaaccaatataagttggttttagaactatggaggaatgagctgtacagatttccatacaacctggcaaagatcacgggccctagcgacattaaagtagaagggtatggagagttgtcgcgaatgctagagctggacttagagaagcatgggaaatcaaacagtaaattgatatccatgttagatgaggatctgaccagacaagctaaggataggctgttcgcaaatccagaaatccagattccgtgcgacttcttagaagatgctagagatctaatgatacatcataagtacatactagctccagatcttcaaagtttttgctgtggcatttcctacttattggactcagttgcagttaagcagtactgtgccaatgtaactgtcaaaagtaaagggttcgtgactaggtttcctaatttaagcctgcggctagatgttgagcgatacaccaggatactaatcccggaaaacctaggttctcaaagaatgtacgacaatctcattgaagactgctttgctagacttgaagttaaaataaaggtacttcaagatatgattcctgctgaaaactcccgggaggccaaaatggcaggccgggggaaaaatgggaaggatagatattctgagcctagggcgattgccggggttatacaaaacatgataaatagaagagatttggcaacgctagttgacggactaggaaactgtactgaaataggttctctggcctttggagttagtgcgttggaacttagttttgaagaacttaggaaaataaaaacgaacaacactaatgacagtcttttgatgatgattccagacttcaggaatgaaaatatcaaggtcaaaacagccgtacaggggaataggctagtattcaaaggggaagtagtagactatgaaatcaatccggattggtgtgaactggtaagtaggcttatcaacgccaaaaggtgggagacggtcgaatgccctgacggcctggaatgtgtaggtcaggaggatcttttcttagtgttcacggtttgtgataagccccaggacatagttaggaaactgccggtgaacatgagaaatgatgagagcatttgctctgtacctcaactcaattcaatcactgagatgaaacgaaccaaatcacttttccggctggctgaattctcattagacaccgaattgctaggtagactggtgagaagggcaatgataccgggttgttcgttggaaacacttcagaccatagccaggaacagaatgcatagtacgactattagcaaactaggcaggaaaagtagtaataaagacccgaccacagatgcgtctttgtgcgctctggtggccatgaatcttgctaaccatcatgacaatcagataacccggtatatggagaagatagaggatttcttgcttgataacaaggactggaaacgggctaacgctgccttgatacacaccattaaaatggaaatgaacacgattcttggtaaggtcctgaatcttaggatttcgattaaagagttgagcgaagtggcagggaactgtctgtacactgtgctcactgatgacaacaacctgagagctcttccgagactgacgattaaagaacaaccccacaggattatgtatggacagtttttccaccataaactggatgttaaaaacccagacggtttcaactttggaccaaacatagccaataaggtactaaccaacactgtcaaggctgttctgaagatggcaaacgaagttaaagaaggatattgggttaaaaaagaaaataatacgttcagctccaccttgtatggcaaaatacaagaaggaactgaagtgaaagtagttttgcatagatatgatttggcaggcggactctgggacgtgctttccaaaaggttagaaatatcttcaagaaacagcatgataacgcatagttctgtaagaatcgggaatctagaagtcagttacggaaacggaattaaggtaactgaagtcggaaagcaaagcaatggattacaacattcagagatattaatcggtactgttaggataagtgaggagatactgagggacatagatgaatccggaaaaagaatttttgttccaaaaaaatacagtccaataggaataaactgcaatctgtttagtctttggctattaattaagctcggattcctttggaaaattagagttgatagacaatcttctgaacagttaggggatgtagcctccctggtgcctgagttcgggtccaacgtaccacgcataatactggacacgttcttagataataattcgaagatactaaaagattcagagatagtcagaagaatcgaggactgcctgagatatacgatggaaactagtagacccgtggggaattcggagttattttgctttataattacgcaactgactattctgacggggctagaagaagaaaggctattcaggaacattgaagagatgagagagagcatgaaaatggtggagggtggaattgcagcctcaacgagagcctctgtaattgagagggatggaaatgagagtgacctgtgtgcagtcaacgtagcaggagacccagtagagaacgaaagaaaatttagggccttggaaatagctgacgggcccttcttcttggttgagcaaagcaaaatgaaacagttcaatgccgcataccaaaaccaggatgaggacgaaattacaggtttgacagtcatctacccggtcatggaaaagttaacggatatggcaaaaatggatgaacagaaggatgatgtaaaacacgtcgccaggtcaataatactgggattaatatgccagttggttagcggcctgagtgtgtcagaatttgctgccgctcttgaaggaattaacaatgagaagatagctaggaaagttaaaagaattgctgtgaaaattacgtgcggggacaaaccggcaactacagtgcaaactgaacccgcggacgatgcagataaagaccctgaagacggcgatggagatgtcaaaggaaaggattcagggaaaattggaaaaatgattgatgaatccaataaagaaaatccgaacacggccatggataagagtactggtgggctggatcagaacggagatgaatccgagaaacataaggaatgcagaaaaagtgaacgggtttcacaccaatcagaagaaaagaagagtggtcaacgaatggcaaatgaaaaggaagccgagcggaaggttacttgccaagcgccccaggaaacggctgaagatggggaagcacataaagggatgagttttaaactcgcacggtacaatgggtcagagacggtaagccaactaatcaaggacgtaatagaatctagagatttgaacagaaatgagttcaccgttgaactggcgaccaacactttagttaaatacttcttggaggcaggagtagacccaaccatcaacactatatctaacttgaccgagagcgccatacaggacgtgatggcattagcggacaaactgacatctgattttgtttttgggattgacgatataaacagattgatggccaataaagtgagattcaatatgtacaactccagatccaaagtatcagggggtaacaagttaagaggaatcaaggtaggaattctagcggtggggagctttggtgacacgctcccagttataagagccgctcagattctcaaaaaccaaggggcctgggtcgctttagttacacatgctgactcgccaggattggatggagccaacatagacaagttttatccaataaacaaaagtcaagaattcactacaggaaacatacataacgttggccccacgaggaaactggaccacgcactaagtcataacgaagaagcagtagcgccagtaataaaagccttaaaggaacacgaatttgatgtttttttaagtacccctctttgtccggcggcaactgcccatttagtcaacaagggaataccaacggcagacttcttttgtacttattgctggcaagtcccagaatccgcgatggacttgcctttaggcgaaggggttatgacagcggtgaaagataaggtagttgactgggtttttagccatgggtatccaatagcaaagcaaacagttgcggaactagtccttcagaatttcaatctggaatcagccgatatatccaacacaccgagacttgtgttgagttggagcttcttgcattcacaacaagcgagggatgacaatctctgtcttttcttgggttacaccagcccatgtgaaaaattaaacgctttcgaagtagcacgtaagaaacttaagatattggtaggattcggaagcatgagtgttaatttggacatagcaaataaagtaattgagatactcagaactatggatccgaaacttttccaactaacactacactcccaatacgaacacaaaaccagggccttaagaagttctcttgttgcaaacggcttcaagttcaaagaactgacggggtatcagaacacaggacaaatggccgtaaaccaccatgtgatgatctgccacggcgggataggaactgttcaggagtgtctcaaagccacctgcattccaattatagtacctgtatttgctgatcaaccatacgtagcgaataacataagtgaaagaaaatttggaatttggtacaaaggagatcctagttctctgttggcgtctgtcaaaaagatatccgagtatcaaaaaagggtgatagatttgaaactggataccaagacggtggagaataacctggttgattccattctggatctgtgcgttgccaccccggacaaagaaactgacgcaaaatccaaggaagttgggaatttggcacacgaaggaaaaactgttccaataaacccatacttgataaggaatgtgctcgaattaccttgccccgacccaacaaaccaactacccggcgaatatgaatgctcgctcaaaatcgaagaagggctcatagaaaaaatcggggagagttatactggtgatgactgtctaatggaggccatgaagcaaggaataaccaaaacccagcaggccagtggtagggcgaggctagtacacagtttgagtttattccacattaccaggatttcggagttaggtaaattgtttgccatggcatactacaaccgggtcaatctacaggtgctaggcttcaaaaataggactacaatatttgacagtaggtggcccttagtatcgatattcatagttccagtgaacaataaaacaggcctcaacaacttgcatgcatacttggtgaacccaataatacagctaagcaagaaaatcaataggaaaaatacaaacgaagacgccgccaataatgaggatgtcacgaatcttgggaaaataataggactccctattggcatcaacccaatggggttgttggaaagtttagtcactgcgaaaaacctattagtagaatgggattgggctgcatatggtagttatgaaaactttgaatctaggctccatggcacgaatatcgattcgcttctagagtcagataccggcctaataatgcctgttgacaaggctaatccaattcaaaatggcgtgactatagaaaccagaatcgattaccagagcaaaatcggggagatagtgtttctaggaacggaggaaggtttaataccaactatgataactaacgccaagaatggcaaggtttacttgtacaccggaagagagaccaaacctctagggctggcattcagagcaaggttgataagaagcaagaaggaacgaataagcaaacggatgttacaagacaatgtgatggaaggaaaagtgtgtagtctaaacaaagaaactattaataaacttagagaaaccagcccaggtttgaacttagaattagtgacagaggacctaattaactcatgtcctgaaatcaaaatattagccaccagctttgatacgagaggacaccattctgaacgctcagaaatggagagagcaataatcattaaacacgccggcacgcagaagctgaagacccttccagtagacctgggcgagggactagtgcgggcaatcaagtatagtaaaatagcttatttcaattaccagaacggacacacttggttcaacattgaaactgcaagtaaggacgtaaccatgtttctttccaagattgtcactaaaatgagctcagaaaaagggggtttttttaatcaaggaaccagtttcagattagacgtaacgaacatgagagatgttgacagtctggttagattgtttaacaatcatttcaaactagcgggtcataaaatagaatttttcaaggatgaaaactactgcaaggaaggcatcatgacagtgaggaaagacgacattgtgaaaaagaccgtgacctttgatagctccgttttagatcaactaatcttagattggttcgaaggtgaggaggagatcccagcctgcgccattcatgatttgaatgaacatgattggatattggacacggtcaagtatggaatatgcttggactctaccaggacaaaattgttagtgataacccctctaatcgcactgagtaagattttattaaaaggagctggtttcgtcgacgaagcaaatccgactggtggggatggaagcagagttaacataaacgccaaggacttggtaatggaccagccgtctgaagctgtgatcgggccacagttcggcaaggacaatttcggcaggttcgacaagtggttgcaagcaaacaaacatttgaaggaaattgacaattcagttaataacaaggcaaaggtcgagcttacaaggaagaagtttgtatgggaagaaatttatggttgtctgcaagcagatggacagttacaagtggatgctgatattagcaccaaaaactacaggattgcagaggacctggacttccaggcagaaatgggatttgcaccggcaaggaggagcacgagtgatgttggaaacatcgaggatcatagaataatagacctatgggaggaaggacttgacttgattgatcacgtagttatccactgtccgactaacgagcaaaaatacgtaataagagaaggtaattactcgataataaacaccgtgaagacgattttttcgaaatatcctgttcaatgtagacctatttttcatgacgaaacctacgccagtcttaactctctaactggtaggttgggaaggggattgagtattagatccatgctagccagaccgaaaactcatgaggtgatcgataaaatagcactttacttcttcgacctacgttggaaggagcttaccaacacctttcagtctaatcccataatgtacaatgaaaaagattttctagattgggtttcaaagcacaaaaatccaggcaaagttatcaaggaattagagaaaatgtcggctgaaggtatactgctgaatcctttcaatcaatttagaagtcatgttaaacttgagagtattaacaaaaataatcccgtaatggattttagacagtcggctccgagagccatagtttggctgccttacttcatgccagcgatatttagttacatgttcaaaatggcaagtgacaggttcaaattgttgcttagaaataacgttcactacacctcgggcgtcgacgtcattgatttgtcgaaaatagttaacgaagttgataccggcttttacttgttcgacaatgacattagcaagatggactcgcagattgacgaggacatggtacgagttgaatgggaagttctcagactcctgggaatagatgccgaggtcatggaggtttacaaactattaaagaacaactggaggattagcaataaattcctgagcgttaggggggattggcttagacatagtggagaaccaacgacagcgttgggaaatggaataatcaatttagccataacgagtttggtacttgaaaacacgtgtagatccaacattaaactatgcctctttgtcggtgatgacctaataatagcaaatgaagtgtctgaagatttgcaaatgattaaaaggaaaggtagagaattagcaaacgctatattaaaacctaatcaaagcaggaccaatgggcctttctgtagtttcataataggtgccagcgaaacttctgaccgactttgcgtagtacccaacgtcccgcgattggcatataagtgggaagtaccgaatggccagcatgagacgactgaggatgcagtcttcaccagacaactaagctactcttgcattttgggttctaacgaatttagtaaaagagtggagaaattgataaaagataaactaggaggggaattgcaagttccttcttattatgacggcagtgaaatgattcaactaaattgcaagtatcacaaattggaagagatggaagtcgtggaatgcttgaatacgctttatcagagaatagaaaaaccgaccacgaggcaagttacggctctgataactagtgagaacataagaaagggcgtcaaatcaatgagcagaatcaaggagctaacaggagattcggaccaatttgaacacaggagactaatagacgactag

SEQ ID NO: 1159 - DNA, 13839 bp, Phytophthora alphaendornavirus 1
  source 1..13839: mol_type = other DNA
atgagttccacaatcagcaattaccaaaagctacaaagcagaaaaaccctcaggggaggccgccggaccggggtaggcggcctcccagttgctttaaatcaagaacagattctaactctaaggaagaaattgaatctgaaagtgaccaaacgatttaactatctcaagagtattgacaagaaatataaagagatggtcaagaccagtaaataccccgggcgtttggtaccaattagtaaggctttaaacaaaaaagccatgcagagaatgactaggaatatcatcatcccagattgtatgcatccatcacaactattagccgtgaaggttgccatagccaataacactgacaaatggtttatcacaagagatgcatttttggagttgaagaacctgagtgagttagctaatggtagtcaacaagaagtacgtctcagtgtgttgcgctctaagttatacaagtacacctctataggaaaagaagtaattcctggggaagcgaactatttcaggacttggttcaagtggctaagttcaaattataacaacagtatgtattggatgtgggccaagtatcaaacagcagccaccattctatgtgacagaattgttgaaacagccgcaggatgtgttatgtacattgattgtgagccagcccccgccgagacagtagtagagtgtgcttattgtggtatgcttaaccacatgacgagtgccgacaacgtaatgtgtggatcctgttacggggatttagaagtaactattgaatcagctatccctggcgagccgattattgagctagtactcaacatgttgcaaggacatttcggaatggccatgttagaacaattatctttgtccaattatttggacttgtcagcactagcagagtctggtatcggaccctccatcatcaatcatgacctaatgatagtgaaacaaattttgtcccgatcaatgaatatggcagtaaaagtgccgagcaacctgtccttgaaggagttgtccaccctccgattcactctaggtacggatatgtgttgccccatccacccgaatacctccggagcgagaaaatcctcagcggaagtttcatgggttgtcactcaactacgacagttaactagtagtaaagggaagataattgtggttgactctatgaatgtgttacagtgcttagaactacaggacggtgtgatagaggttgtcaatgatattgccgaggctgacattgcttggggtcaggtggagcatgtcgtgatttacttaccaaatgcacttgaattatcttgcatattcagtgcggcaccgatcaatgtctgcgtcacaacgctacaactcgaccccaaagacccggaaatgttgacagagtgggacacccagcaaataggtgaaaccgtttggtggtcaccagtttacagcaatttggctgctagtcaagatgttggagacgttacgttactactaggagatcactatactgtcaacaatcataacaccatattgaacgcgagcaagatcaacaaaatcgggtattttaccagatgtgaaattcacagatctgaaggactgccagttgaactgttgacagacgtcattggtagtctgatagaagaagaacgagaatttaagatacccactgtggatatggatgctttggtaacaagattcggcggtgcagtaattaagacaaaaaccatcgctctggaccgcgtgtttctccgctacttactcaataagaccatgttgggaaacatgggatacaatcaaactgttgaatacgccatcagtctttgctactctagatatgtaatggatggaagggaaatgaacttttcccgtatatcagcagagagctgcagggatcatgcttacgttgccgtgatgrttacaggactaacaagtactgaatttaaaaccggagagactgttttggggcccaacaatggggctcagcaagtgatcaaygtactttctttaggggcaatgcaaggtttgtgggcggttggtcttgatctgtgtgagcaacttttaccggaacctatttcagaggcggtgaaaaagaccataacttggttgaaacaaggtaacacttctgactaccaaaccacagacatatgggagaagttacgcgattgggtttacggaaatacatttgacagytgcaaatactacgtggaaacaaaatggaagtaccaagaaccagaatccaattgcgaccatcacagccctgattgtgatgacgaacaagtgggtgtggatgatcaggacacgctaaggtgcttatgttgtctgttatttaaggcttccccagtaaccaagctttgcaaatgttgtacgttgtcttccaaatgtaaccacaagtgtagccacacatgcacctcagaacttgaccatatttgcaataagaaatgtaaacatcagaaaatattgtgtgactgttgtggagttcctacatgtttcgatgaatgcccagtatgtcaaacgcccgtgacatgggtactccctatttccctcgcagctaaggaaatttccaatgcttcaagacgcaatagaccagtacatatggccaaaccgaggaagattgacagagaaaaaatcgaagaccaagaatttaccgtgaagggagaacctgtttccagagtgccagtatttaagacccatggattgactctaggactgacaggttgcaacatccaagaggtcatggaaaaccaagctgaaattcaagcaaaggtgaatgaattgaaattggaagacgtagaagtgtacgatcctgacacccttgaatctatagggttgttcttgctgattgaccacacactgatcagtgaaccggcgaaacctggtgaacacacaattagcgagctggtggaggaggcagaacaacgaaatgctagcacatctgttgacaccactcctagagagcatcaggataaacctgtggctctagatgtacctgctgacaaacagtctcacgaccgactcagtatgttggcacctgtggtgcgacgagcttgtctgaatggcttgatgaaaaactggggagaagtgcaaccgtacttcaagactacagacgccgatgaagccggaaccacacaattggttttgttggctgaaggattcagtagttacgtcaccaatgattggttggcagttgtggccacgcacagcatatcggctgaagacaacctgtgcgggttccacgcgttaaaccttggttttgagggtgcttctttgaggagactcagagaagtgtctaagaaagatgattggttcgaattgaccgatttagttaattacatgagagaagaagatagaaacctgttggtaatgaaagacgagatggtagatgtatacacctttgatccatataattccgtatacgttagtgtagagcacactggtagtacatcttctggacattggagccctatctccatggttcaaattaagccggccccatctctacctaactggaccggagtaactgacagaaacactatgagtcagatactcttaagttggggtctgtccgtagacaccgagtttgatgatctctccgtgtcacaacgaataacttactcttggatgcaatacaatgaagaagtgggcaggtctaaagcgatcgttagtcagacattgagtttaagttcagaaaatggtgtcgggtacttacacagtggaaccaatactaagaatgacattaggagtggagaagtattcttggaaattcctcaacagtacgtcccgagtatgagtatgctgaactcgagttggtcactggtgcaaaatagttttgagtacaatcaacctcactcatactcagataccatcccactgaattgctcacaacgtctggtgcaagaggtacgagaacagattaagacactcgttcagcttggatttacattggacaattatttacctgaaataccccctggatactataatttgcaccaaaaaggtcgagcccaaaccatcagcgaaggcgttgtgaggtgtagactgaccaaagaaaatattaagacaggtgatagtattctggtagtggttagtggtaagggttactctgttagacgtatcaccagagaaggggcatggatgattttcccgtttgtgaccacccagcgaagaacaactatcaagtttttgaaccctagatcatcgtgtacgtcaactcttcttcgactgcaagcgttacttcaaactaacccagatacaagcaggactctacagctactgcaagcctctgagtgcactttggctgttccaggctggggtaagtcaaccaagatcgttaaagagtttgacacagacaccacagtcacttgcgtgacaagcgaggcagttaaaaatttggtggctatggggctgcctcgaaacaaggtcacatcagtggagagagcggtggagtccaaaatccacacaaagaagctagctattgatgagtgcacacaggtagattggcttatggtgcacatgatgtgcggagatgaagtggaaatcattacactagcaggggattccttccaaataggagctgtagatttctcagcttcaactggtgaaagaacgatcacttcttgcaatatgttttcactgcaccaaaacacctacaataatagtcatagatttggccaaccactctgcagtcaattgacagtgcttaacccccgtttaaccactgacgcattgcatcaaacttcatacagtgtgcacaacctgagttctttagacttgaatgtgctgggttctgtgatagctcaagaacgaccaggcgtaatacttaccttccaccagatcactaagtcacagatacagagagcgtttggacgcaccataaagacgtctctaaccactggtgatgtcaaaacagtacacagctatcaaggtaaagagagtagtagagtaatggtcattcaagatttcctaagcccagcaggagtgcacacagacagacgctatttgatgagtgctgcttctagagcttccaatcatctgatatgggtgacaattcaatcgccaattaattcattggtgttatccgaccatctcaaaacaaacatcctagttggcggtcatctatcagatataattgacaacacagtgataaccctatgtaacaggttcaaattcgagatgtcactagaaacaatgagaaatgtggtcgaatatttattcggagagtacgaatcaacacatagtgatgaaatcaccttaaagacaatccacataacaggtccaactgaaaatgaatatcaacgtggatacattaaattcagtcaaccagaagaggaattcttaagacgcgggagaacttatttagtcacgaaacccaacctggggtcaccctctgaggaacctgaagttgtatacattgccgaagactggaaaccagaagggaaaattgatgaacgatatgaactcaacgattatgccgtcagcaatcagaaaacacaagtagtattcggaactaaacgagcactgtctacattaatattacctatgtcaatcaacacagcaggttggaagattacattgagtaaacaagaggcaaatgtactagttaccattgagaaatacggcaagaccctaaacttcatttgggacaaccaattaggtggcgtagatcttaccaaccataaggctttgcaggtgggactacggttgctgataaacactgggttgctagaaagggtactgccggaggaattgcacaatttgaatttgtttgagcttactttaaatgaagaccgggtgatgtctaacgccgaattggaagaaatcgctgaaatgggttcagtaattcatatggatgaattgatggactcagaggctataatggagccaagtgtgagacagggttggacccacctgataaacattactaatggtcgattgagttctgagatacaacaagagttgatagtggagagtaaaaatgcgccaaatgaatccttttacactcacaagacaggaatgaccttagtgaattatagcagattatccaagttagctgacgcggctagacgaaccagtttagaagaattacccctgcccttgcgcaccccgtttggatgggtggacgttaagcgacacaacggatgtaacccctgtgcaggaatatccttgagacaccatgatagttggtggttgatagataacgattattacagaaagggttcgagaagggtgcagttcaacgaagagagtactagagatgaagcgataatctacgtgctcaagggactacaattagaacacacattagaagacgttgtggacccgcaagaatcgtcgcatccattcttctgtgtggatgggcccggccacgaagtgtggtgcagtaaccatgagtccttggatttctgtgatactctaatggatagaatctcctgtttcaagacctacactgaaagcaaatttgagtacaaggatttcactgagaacaacctgacttggttgcaagatgtggcggataagatggaagtgttcggtatgtacaacatcaccaaaccaggtggggacaagaattccaagtggaacgagtctttactacaagtgttaaacgcagacggaagccgattcttcgtattgtactgggatagcgttttctactatgttgactgcgataatgatgatgggtacatacaacaattccatagttgggtgaaggtggatctcgtagagatggccaacaaattgtttgaagttggtttagaagctaggagatcgaggttatcaacgttgttattgtcagctcgtgacaccgtattcggagcgggagtcaatgaagacggactcatattggatttagatcaacacaaatttaataagactgctgtgtacaatcatctagtccagagaatgggagagatgaaactcaagcaatcagcgctgtcaagaagaccgttcttccatggaaaaattgctatcgaaaccctcaagaatcaggtcaagaccacgttaagaggcggggtagtagaggaatgccctatttgtaccggcagtagtgttggttcagaattggttactttgatcattgctcacagcactgacgaacctaccaccttgatgttgaataatccacaattgcttctgagtaacagtttgtggcatcacaaggtgagatcaagtgaagaatctttattcaacacaaccttcccttcagtcagagccactttctcgcgccacgcaaacaaagtgttggggaaaatcacacactctatgaaaaagtacgcaatgggtgaagatttaaagagtgcaggaagactgctcgctgcgtcaaatgtattgaagaaagcgagtaacagcgaacgagggttcgaagtgtttgagcatccaaccaatacgtgtgacaacttgatagtaggacctttactactggctgaaccggacagcttagcagagatctgggggaatgaaagaattcaagttaccattattgtaccggctgtaatcaacagccacagcccatggtataaagttaactcaacaggtggaaatattcaaatcatggaatgtggatctggattgactgttaaaatccgtagtgaaatctacaacagcgtgttgaataagcccaatttgacgttatttggacatacgaggtgcactgaagtagtagggacattatttgactacctaatcgtcaacactagaggcgccagtgaggccagaccgcagaaagtatggttaagacacccgttgcatgaggtgattaaagtccctattttgagtgttaacttaggagaagatatagctaacaaaagtatagtcaagtggaaggagttccgctgtgacccagttgttttaagaagattggaattgcgcgtcaataggccaggaacaaatttcaaagatttatgtgagtacgctaggacattattgcacacaagagattacacgagattgggatcgtgggatacagttaaactggacgatctggacatgctcagccattgtcaatacgcctattaccacaacaaattaggcaataaatccattagtcaaatgatagaactgttaaatgtattcgatcaaagtgggaaaaacatacccttttacagttggttgaagggtttaggtgtttccaaacttctggatgtcacctactccacctacgcaggagttatgagagacacaggtttagatttggggttatctcagacattgatggagttctgtggattcatagacgaactagtcaaaaatgataccgtcaagaatagtgttgtggagctttggaacaactatgagccgaccatgtacaagcgacatgtcagttttattacttggagagcgcaacctactgcaactggcgaggtgggaaggttggcgtatcgtttgttaaaagaattcatatgggaacctcattttgagggagatgacgtgttgagagatttaataccccgcggtgccaaagatgatgggaaaagtgagaacagtcacacagaagaagactttgaacaagaacatagtgatttcaaacatgcagtgtttaccagtcagggtactagaggagatgtggaaccagtagttaaatttatcaacaaaatcaagcatggatacgatttggtgacattggtgtgtaatcaggggaatggagaaggagttcaattcccggatgatatcagagtagtttatatagatatggatggaagtaagttggctaccttagcttctgtgggaacaggagaagggctggctgaagttttgagtaaactctgtgaatttgagggcagtatgcgtgatactttagagaaactgttgtctggaccccccgtcaccactgtctacgcaaccagcaattgtcacttaggttacgycttagccgacctagttcaatgtaagttggtagaactgcaactgttcccttggccatttaaccccactactaagctagagaaattcgtggccggggtaacagagcgagtattgaccacgaccgttgacactagtggactgaacagggtgaagaagaccagacaacaacacaagtgtttgttgctttttgcacccatagtgttaaaagacatcgatcatcatttctctgatgatttgaaattggtaaaaattgattgcagtgtgttgaagccgacaggtgttaagaaggaagctttggttgtgactatgggatccttggtaggtgctggagcaatagccagatacaaagcaagtttgcaatgggccacaaagatgaagttcagtcatatttacctagttggcaatcaatttagagcagactatatgtgtgatgccagtgcagtcctgagtcctaccattaaacaccttaacagagagggggtggttgtagagattgaatcttacttgccatacgtcgaaatctgcagtaaagacaccatttgcatccaccacggtggtgcaggcacaacaaattggttcatgagactgtccatgagacaaattatattaccactctttaatgaccagtggatctgggcaaactgtgtatcaaagctaggttgtgccatcactgcatcaccaattaccttaccgcacataactgagaaagaattgagtaaactcacagggaagtcaggttcatggagtttcgaaaatagacaattgcaaggtgcacatggcattaattctagtagaatccctgattggactaaatcagaacccaccgagcgcggatacattaatatgttaccgtatcttaaagaaggtgtgatgtccgcagcaaacgacgtgagcataaagatgatgaatttcggacccctacagttagcgaatgaaatctgcgcattgttccaattagcggatagcgcatttgattggcatgagaaagataattctagtagtggggaagaagtggatccagaggatgtgatgcaagaagagggagaagaagttgtccctgatctagagtcagaggaatcagattcatatgtatcagcaaaccccgaaatcgcggctagtcatacaacaaaggagttagaagagtcggctagtcaacttgcagaacaaagatcacttgccagtcaccgtatagaggtgggtgattcaaaaccaagtcaagcttcgacaccatgtgtagacttggtggtttaccagacaccagttgtcgcttattctaatcttgcaactgaaacctcaaccgattacccagaaatggagccaacagttctgaacgaattggaattggagaggagccatgcttacagacaagatgatagagaaggtactctgatttcttcattgagtaaacctcctgcatctatatcaaacgtgatcaactggaggagccttgtgaacgtagaagatagtagatgtgaggcaaaccaaatctgtgacaccatcgatttggccaccaatatggacgactctcccttgacgacaacaaccttagaaaattatcacacagtatatgatcctggacacaattctcctggaacatgtgtatttgattgtttgagttggctgtttccgaatgacaaaggagatgtagtaatacaatgggcatcaatgttaggttgtaggagttgggccacaaagaaggacatcatagtgttcactaatttgattggggtaagtctactcctaagacaggaagagaagacggagttattcggtcgccagagtttgtctttaatatgcctaaatttggttgaacgaggaggaattgggcattgcacggtaattcacccagactgggatgagttgctgtccaagaggtggaatgcaagtcaaactccattcagtcgcattgatttgaaaaatgctgcgcgttgccccaaaactggaatgcacatgatagggcgcgtgccttgcgggagtcacacgcatatcagtgatgctgatttaacgtctttgtcaatgtctgtcagctactggtcctcgaacaaaaccactttggacttcattgagacttgtgctaagttgactggtaaaccgaagaaagacatagcagcaagattgcaaggtacaaattggcatcatttgtttcacagacggaaaatgcaagtggtgaccacattccagcattcctataagaatggttgttcatgggagaaaactggatgcaatttcaaacctggtgatttagtcaccatttgttttgacagaggatgtgtggtaggtgttgttctagagagggccagggactatgtagttcagtatgagaccaggacgagcactcccttatatgcaattagtttgagtatgaacgtgaatgtgaagcacactactcttcgtagggccgtgacactcaaaggagtacaagaggaagcgtttttaaatgttaaaactatgcattattgccattcaattggattgagaaatgacattagtgaggtggctgaacgagagaaaaagtacgatagtttaattgtgtcagattttgataatcggatacatcaccaatttaatgagaaggatatcctcaagtaccaagaagcagacgccatcactatagttagtggcaagagtagagctgtgatggtgacctggattatgactgaaagtgacctgagattgacaatgtggcatggaaaaccgtatatcgagttgaaaactaaggacaccatattaatgtccattttggacagcgcgggtgaacgcattgctttaggaaatgacgaataccgttggatcccggagggagatgacactaggatgttgcgcgtatgtgacaccattccgcggttgcaaaaactgctcaataaaacagatgaaggattggtagaattgaaatggttgaccatgaacccacgattaaacccgattaaggttgttaagaagcacatgctcagcgagggtttaagtgaagaaggtgaaatggatgtagaggaattaaatctgttgttggccgtacccttaagtgaattagtcattctaacctcacgatcagaaatagcagagtggttatcaattagtaggcatatgtttgggtacaaattggacggtatttaccatagcggtgcaggcggcatgattaatttggcaggacctatagtggtatacaagaaaaagttgcttccaccttctatgaccggcggacatcttgtattggacataggcgatcaacactggaataaagtgcgagagcagtattcagagaataacttacgaggccttgttaagcatggttttaaagttactagcccggaatcagctcaacaacgagcgacgagcaatatggaacgattgaaacagtcaccattatacccaatgctagatgctgttagagatatgacccaagggagctatagtaagacccccctgacttttaccaacgtgagagcgcatgaagttgacaaggagatgggtgatctgattataccaaaaattctagtggacaccaacatgggatgggaactggagactgcccatttagaagaggtacccattcacgtcagacagatgtgggatgaaacggacttacttgattggaatgcaagctatgcaccatctaatcaattaaggttgaagactacactacccacaggtaagcgacgcaccgagagaaagatgatttacactaagtaccccattcaatccagagtcgtcttgacgaaagcggccaatcaagaatttaatgccgtcacaggtagaataggraatgcttctattattagaaagtataaccttaacatccagtatgagttgaagaatatgtgtcgtgaattattcgtcgctaattggcaatccatatgtgcagggtatcaagccgaccaagtaagccctagccctgaaaatatattagagtggttaagtgagaaaccagacggagtgaacattggagaagaattgcaatcatatattgaggacggattccaaacacatccaatttctgatgtcaatgttcacttaaagctagaggctttgctcaaagatcaaccagtggagagtaaccaggcacttaaagcgagaattattgtgtggcaggctaagggtatctgcgccatgtatagcggtacttttatccagattaagaaaagattgaagaaactattaagagctgaaattgtttacacagatggattagaaccaactgagatcgctgatgtagtaaggggaattaaagactttagtgttttgattgaagacgacctaactaggcaggatagtcaaactgattcagacaccattaatgtagaattcggagtgtatgacttattaggactcgataggagggtggctgcctcttggagaagagtgcacgagttgtggcgattcaaaggtaaagatgtccgaggagtgtggcaagaaatgaggcttaccggtcaagctaccacagcacttgggaatgcggttgttaatttggccgtacattggagactagtgtcgcagttgggaccggctatgaaaatgtatttgttgttgggtgatgacagtcttttcttctctagaaccactatagatgccaccagcctacggaggaacatagcagattactataacatgaagtcaaaggcgtttgtatataaagaccatggaacgttttgtagtatgatggcgtacaaaaatcctcaaggaggagctggaataggtccagattttgtgaggcttaagagacgtttcgaggttcccagtggagttagtgaaacaaacctgaccaatactgtcgccagaaagatgagttactgtttaatgcttggtaatttgcctatagtaaagaaattggtagaagatatgggctggccgatagagttacaacaatggtacgatccaagcccactgatagattctatttgtgacaagtacaatatgtcaagcgcagaagtagagagccatataacagctctagtggacatgataaggtccagaacaatgtatgaaattgattttgatgttatttcccaacggtaa

SEQ ID NO: 1160 - DNA, 1212 bp, Phytophthora cactorum alphaendornavirus 1; identical to SEQ ID NO: 822
  source 1..1212: mol_type = other DNA

SEQ ID NO: 1161 - DNA, 13298 bp, Phytophthora cactorum alphaendornavirus 1
  source 1..13298: mol_type = other DNA
ttgaatttgaaaataacgcgcgaatacaaaaatttggaaaatgtcaaccaattctacaagaatagaatgagaatgaataagacaccctatgacattataccaatttgtaaagccttgccaaagaataagctggagaaagacagaggttctatcatgatggcagacttcttgaatccctcctcctttttaggtattaaatgggctttagctaataacacggccaagtggtttattacacaagaagctttccatgaactcaaagagactagcggattgtaccgaggcagtgaacaagacaatagaatcacccagatgaggtcccaatggtacaaattcttgcaaattgggaaaacagtggttgaaggtgagaaaaatttctttaagacttggtacaagtggttcaccagacaattcgggaacagtttgtatgagatgtgggcacaatataatcaaagtcccacgatcatgagtgacagaatttttgaaacgtttactggagttaaaatgttcatagattgtgagcaaacggaggaggaacaagtgtgtatatgtgcatactgtggaatgctcaaccacaaagagcgagacgatcaagttaaatgtggagcatgttttggagatctagaattgacaatcgagacagccactgaaggagaaccgattactgaattaatcttgaatatgttacaaggacacttcggtgccgcaatgctggaacaattagcactatgccaatacttggacttaggagcattaaccagctcagccattggtcccgcaatcatcaatcacgatttgatgattgttaaacaggtattggcaagagcaatgaacagagtgttcaaaagcccctctaatttatctaaccatcagattggtcaaatgaaatttgatttaggcagtgatttggctgtatttgcggagccttgtttgcatggagcatctcaaaccattacagagatttcctgggtgaccagtcaactactgatggatttgcatgaagacactggcgggctagtcatactagatagtatcgacttgttgagttgtctacgattggaatctagaagttgcatcgtaataaggaatattgaagaacaaattgttgctaaatgtcgtaagttactattaattaaccctaacggacctgaactgtcttacgccattggattgatgcaacacggagttgaagtaaccgtagttcaactcaatcatgatagtaaggatcttgatagtgagtgggatgtgattaacaaacaccaaactactactgtatcacctatcttctctagcgtagttagtcaacaatcaaacacgcaagtagaattctgctctggcaacaagtacacatcagaagaaggcgttttggtcatctcggaactaatcaagacttacaagttcattacggaagtagagttgatgataatgccatacatgactaaccatgtactggaaactgtcattacaagtcaaaataaatcaattaaagaatttgaaatccctatcataaacgaggaagcaatattgactaaaattggcatgcccattttatcggaagttgtagtacacatcgataggacatttatgaagatgctgttaaacaagaatattactggtaacatgacctatgaacaactcaatgaatatgccatctctgtatgtcattcacgttacgtattggatggaaaagagcacaatttcaagcatatcacctctctggaatgtcgccagcatagttatgtcagcttgatggtttctagattaactcacacagaggtttcaagtgcagtctctaccttggccaacaacaacaacctacaacaattattgagtacactagggttgacagccatgcaaggcatgttccactatcttttggaacaacttgctcggcctgggctgctagaactggaggaagctatcacgcaaacaatcaggctgttgaaaaccagcagcttgagtggggaagataatctagatgtttgggaagcgataaagaactggatcttcaatccagtgtcagagcactcaggttactatgttaagtccgattgggacatctctgtggagtatttcaattgcggacaccactatctcaattgtggtgacgtgaggatcttggatgtcaacgtagaaacatgtgaatgttgcaacatcatgagacccacccaagattcaaaattctgtaaatgctgtaaggtggagtcagaatgcaagcataactgtacccatgaatgttccgggaaagataatcacatttgtaacccggactgcaaacacaaaaagattaagtgtaattgctgtggtgtagacacttgctttgatgtatgtccggtgtgcaacaatgacgtaaaatggtttatcccatggaatcacccgggtccgttcaagctgctgcaaggaaaaccccacagacaagttagaaagaccaataagtttgtttctaataaaccagttgaagtggaacccaaacctttgtccaagcaaatttctgtaaagaaagaagagcccttgacattcaagtgtcatggagttccactaggtttgaggggttgtgatgaaaacacagtcagagataacgctaaagaaatccacgagttcctcaagacagttccaaagagtagaatagacaaatcagagttagaggtattatccactttaggattatatctgttgactcctgaagagttagtcacagcccctgagttgccagcaacattgactattggcgacaaattgggcccgatgttcgatggaaaagaacattctcgcgagccagagaatagtgtgagcccacctgagggtgcggaagacctggtgaacatcgaccatgagtacttgaacagagcttctgaagttcataaacgagccataattaagggattaagtgccgaatggccttacttttacaactatttcaaatccaatgatttagaacgacaaggagtcagtcacatcgtactggtaccattctcagagtcagtgcagtatacatctgaatggctgtcagttgcgtttgaaggaacagcttcaggaaaggacgctctatgtgggtacgaagccatcagattgggttgcccagaagtatcattgagagaattgagagattcttcaggaaaacaaaattggttcaccaatgaagatctcagtcgttatttgagtggattagacaaaaacttattgatattgagaaataatcaagtacaaatttataataatgacccgtacagttcagaattcgtatcaattaagtttactatggatgcagatgctggacattgggatcctatcactgtgattcagatcggaccttgtccgggacttcccaattggacaggaacaagtgactcggacaccaacgaacgttggttgagatctcaatcctgtgatattgatacatcatttgacaatctgacgatcaatcaaagactagaatttacgaagtttttgttgaatgaggaggttagcatgtctaaaaatgcactgtcggataaaatagtgttatctgaggacggaacaggttggatgatgcatggcaccactgatcgaagacatgatttaagagctgggaacgtgatgatgaatatcaaatcggatctcgctggcaccttcagtatgttaaacaacaccatcgaagccgtagaaaatagctttgagttcaatgcatggaacacctacactagagatataccatcagattgtacagctagggtacaccaggagatacgcgagtgcgtcaaaggtatggtaatgctaggaatgactacagaccgcagattccacgggattcctagaggctactacccataccatgttaaacacagcttccagagaatttcggacagattagtacgaattagaaatcccaaagaaactattaagaccggtgactctttgttattgctaacggtcgacaaaaattacaaggttgtgagagtagtcaggaagaaaaactgggtgaccttccccctggagggtgagagtaaacggggagtggtgaaattgctattacccaaaacttctttaacttccatcttgctgagggttgaaaagcttttggtagtgcagccggataccaccaagacaaaacagttattaatgcagtccaaatgtgtcttggctgcacccggttggggcaagtctacaaagattgcagcggaaatcgacgtcgaaactactgtggtgtgttgtacttctgaagctgtaaaaagtctcaaaaccatgggtgtgccatctaaccaagtaatgtcagtagaacgggcaatagagtctcaggtagcaaagaaaacattggtaattgatgagtgcacacaggttgattggttaactgtacacttacttgttacatcaagaaccgaagaaattaagttgtacggagacacgttccagataggatctgtagatttctcgggctccagtggagaccgcgaattgacatcttgtgattactacagcctcaacaaggaaatattccacaccacgagacgatttgggagacctcttgtggaagttctacaaatcctcaaccccaatttggacaccttggcctcacacaacaccacatattccgtgatcaatgtagctgaactcacggttgaagatttagctgatagcattaaaattgccaagccaaatgtggtgctaactttccatcaacacactaagtcgcaaatccaaaaattgattacgaaggcatctgaaggtaagttgcatgctaaggacgtcaagacggtacacagcttccaaggaaaagaagccagtagagtcttggtaatccaggatttcatcagcccttcaggcgtacatacagacaagaaatatttgatgagtgcactatctcgagctagcaaccacctaactttgttaacagtcaattcaccaatcaactcaaagaacttgaaggaccatttggagaaattgacgatcacaggaggaatgaaggacacactgacatctaaggtatcagggttggtcacggacttaggtagggcgtcactgggtctatctacttgcagaaccatagtggagtggttgatggggagctacgaagacaaccatccaactacactgagggtcaagtacctgccaaaacaacaacccacatgttcaagtcaatccatcagaacaattgatttgtgtactgaggatcgatcctaccgtctagaggataaattgttagctatcaacttttccccaatcccatccataactaatagtgtggaaactcaagtaatggatgaacaaccaatttccaaattcggtccgttaccaccgcttaagacctcaaccagagaagtcgaaactggctggtacctaatgctacataatcagatttctacacatgtgttaccaattaacatcaccagtagacatgccaacgtgcacataattgaagacggaaatgtcatccgactaaccattagcactcaactcttctctattagttcaacttataaaccagaattacaaggattcctgctagaatttacaggagttaagaaatttttcgcagacaccacactcaacttatttgcggaccgtctgaatgagcaggtgattaacaacattggagaactggttaaactagagaccaactatgttattgatgatctggtggatgtgccggacaatctgcaacaatacaacaactctaacacagacactaggagtgaatacgagtggaaaccgatgattgacagcgtttgcagcataagtcggataggagagtcgccaacttcagctgaccctgagaaggtgcaatacctgggtcacatggttgacaactgtactatccatagcatcaaaatagggatgacgtgggctaattatgccaaggtgtctcaaatcgtcgacttggcaagacgattttgttgcgaatcggagccacttcccttgatcaccaggtacggagtaattagtacaaccagatacaatggatgcaacccatgcgccgggctgttactcgtgaacgatgatgactggtggttgttagaaaatgattacgctaggatgggttctcgcagagtgacctttagtgaaaactgtgtgtttaacaagtgtattagactattggtaaactatttgggattagggcactgctttaactcgtttacgtcacaagatttggaattagaggaatttgatgtttatccttctggcgatgaaggatggtacacgaaccaagataaccttttattcatgagtttgttatgggagagagtcaaatgtgcagaatggagtagttcttcaaacaatcacttatcatgtgccgacgaatctgaggctaatcaaaaggttttaactgctgaaaaatcaagattagaaagtgaaggaatgatgctgcacaatacaacaatggaagataatctgtctagtgttagtggcagcattttcagttgccgtgatgcaggaggcaacgatctttactacatagattgtggagagacaatctatttcacaccagaagaggatgacagtgaagttatcgtcccttccaattggacacaaatcatgtttgacgaattgattgcccacagcgtgaggaagggtaagacaatgcgcataccattgtataacctcttacaaagcaggccacttaatttcggtgctgacgagttaaatgaaggactcattttgacattggatcaacataaatttgagaagactgcagtgtttgaccatctaacacaacgactgggtgagctcaaactcaagcagtcaaaactagccagagcccccatttacattggtgatttggactccagagaacgatcgcaacaactcagaaatgtctgccgcggtagaatcattgaaacttgtcccgaaacacgagggtacacaacaggtacagaagttctcaccttgttgcttggtcattacttggaggaaccatgtacattagtgctcaacaagacagggttgttattgagcaatagtttgtggcaacacagtgtggtagactccacagaattgatggctaacggtattaacaccctggccagaaccaaatttgctaaacactctgagaaaattatcgccaagatggagtataatttaacaaactttactcgcaatttggataaggacaaacttctcaagagcaagaaattggttgctagattgacattgaatgaggcagattctaccaatgcaaaccgcatgttcttggaagtaccttcaaaggaacaaacccttatctgtggataccatattttactagaaccgcccaaactggaagaaaaatggaagcacaatggtagctgtgtttacatcgtgttaccgatcgtggaattcaaacactcccaatggtacagttccacagaacacagtaattctgagatgatcttagaagaatacccagtaggcaagtctatgaagataaataaaataaatttggcagaggtgtttaatcaaacaacactaacactctatgggcataccagacccattaccattgttgggcacttgttagattacgtggtaatcaaggtaatcaatcatgctaccccttcagtgcggaagtattggactgtgcacccagtctgtgaacgcattagggtacccctattgtcgaccaatttggaggaagtgatgcatgaaaagcgattgctgaagtggagagagttcaattttgattctactgtgctacgtagactggagctcagatgtatgcgtccaggatgtaatttcaaagacctagttgaatatggcaaaactatgcttcacaccagggaatacacccgcctaggatcttgggataaagtcaaattggacagtttagatatgttaagccactgtcagtatgcatactacgttactaaacaaggagataagtcattgagaggcgtaatagggatgttgagtcaaatgactggtaacaatggatctttatacacatgggtgaacagattgggtttggataagttacttgactctacaattttggcttacggcaaattgattaaagaaaccggattggacatatcactaccagatttgggtccagagttggtgagcttggtgagagaattgataggcaaccatgagtggatttcagcagctgaagacgtgttggtacattacaaaccagagaaattttgccgccaagtctctctactgaagttcaacgtgagacaacaccaaggaggggccataggtgcgacttttggaaagatgattaagactacgttaaataatagttttggtcaacccaagaggacacacgaagtcaaatctgaaaatttgtcagagtctaagggtcctaaaacagaatactctgaatttacaaagcaacttacggataaatccagcacccaatctagaaataaacgagtattggtggtgagtcagggaacgagaggcgatgttgaacccttttattctattatgaatcattatagtgaaagagatgttgatgttgctttgtgttgtaacaccggttcttacaataaatccaaactcgacagccgcattaaattgatcagtctgaatatggatggaccagagctcgcatctttaatttctgaaggaagtgggatgacgtcatccaagaccatagaattgattaacaagtacgtggacacggtgacggaaggattccacaaattaaataagttggaaaaacctgacattgtcatgtttaccccccaaacccggtttgctaaatattattgcaaaaccatgggcattcaaggagtatcgtgtcaattgttcccatggccagtcgaacccaaagaaactttgaacaaattcacgacttatgtttcggaattggctttggagtcagtagtggaagtcgccatacaagaacgatttgttaaattcaagggcacgacgccaccccttaagcatttactgatgtacccgaaaattggattgtcaggtatcaattggtccagcgggtctgatatgaaattccttagtagtcctattgctgaaccaatccaacccagtactaacgcagattcagctttggtatcattcggctctttggttggctctaaagttatcaaacgtaccatcaatgctttgaactggctggaaggccaagaagttaaaaagatttatttggtggggttgctgtacgacaattggttgtcaggaaaacttgatcaaaaaattcaaaagaagattgccttgatggaagagcgaggtaaaaaattcgtcatccaggcttatgttgattacaaatctattgggaatgagttgtcattagtaattcaccatggtggagcaggcacgactaagatttgggcggaattaggagttagacagctaatttaccctttgtttgcagaccagtggttgtgggcaagaattgtgacggaatcgaatattggaatggttatcaccggttctacacttaaattgttgactatgccagacgttaactcaatctcacccaatccagtttcatgggcaaaggcaaatgctatcaatccagtagattcgattagtgtagaagagattttcgattggctgaatctggagaccaacacacacggttacattgacatggacccctatgtttgggtacatttaaggagtgttattcatgagtcattggacaaaatgactgatcaaggcatagtgaagaccataatgtctatagttaagttaatgagacccagcgaatcacacactacatcacctgaatcgtccagtgtcgtagagcaacccaaagtgccgcagaccaagaagagaattgtgagagtggtccgcaaggtaaccagaactaccaaatcagtggaaccatcaaagatcgtagaaatcataaaacaaccaaaattgcttggtgacaataaatccgagattccggagccgctggtggcgatcaagccacaccaaaagccaatgtccgaccaaggaatgagactaccacgtgtcactggaatttggggaaatcacatggagttttgctcaaagcacaacgtgggttttatggattgggaacaattgtcaattggcaactatcgcggggtcaagtacacatctagtcgagttttgtacgatccctccagtgagacacaaaatgagtgtgtttacttttgcctgaagtacttgtttaacggaagtaatgaattcctagatgaatggtcatccatactacactgtagaagctgggccaccatcacagatgtgaaagctctggcagttttgttaggagtcaattgtttgattgaaactgatgataaaatgcttctctcttacattgggtcagattacaccctacctctacgcatgaccactgtaggcagagtgggacactgtgtggttacagattaccatattgacttaactgataatgcgctgttgccggaggaaccagaaccaatgtcacagttgatcagaagtcacttccccatgtgtaaacgagttaacatgcctagattaggaggacctttatgcacgagtcatacacatatatcagaaaatgactacctgctactgaccagtccaatttctgaacttttgaagtctgatcaaattgtgagctggtttgaggtggctgcgcgcataagtggcaaatcggttatagatatacgcacacgttgtgaaggaaaaaatctagtgcatttgttcaatagaagaaaaatgcaaatggtaaccagtcgaccaaacgcgtataagaatgctgttagctggcacaagcaattttgtggatttaagccaggtgatctagtagtaagtgttggacccaatagtgttgatatatctgtcgcttttgaaaggaaggacaccatttgtttaatgttgtctgattctggagaacgttacactttgtgggtgagtttatcattaaatttgaacaacaaatgtgggccttcaaaacacgtaagcacccctactgaactcacagaggtgtttttaaatgttggttccatgaattattgtcactcgctaggcttaaggactgatataaccaaactcctctcaccaagtcaaactccagatactctggtggttgcggactatgacaatagggtgcaccacatgtttaaccacacagaaataattaaagcaattgacggcgacaaactcttaatcgtgacagaccgcacaagaggtctatctattaattggattaaacatcacgggccgattagaacaagtctcaggaaaggaaagctaacgatcgaattagagtccaaagatgaattgcttataaatataattagtataggacaacacaagatcgcacaaactgaaacttcattcatctggtacttgcggcaaaatgacgagaatagtttgagaacgttagacactatcatgaaattgaataaaatttgtcaagaaaatgaacattttgtgaacttgaagagattcactcttgataagagaaaacacccagcgaaggctctaaaacaattgttgctagaatttgatctgtcacaagagggtgagacggtcattgacgagttaacaacactaactagctgggataaagaagatttcaatctaataactgaccaggacgtgatcacgacctggatagctgaacacatggttgacacgcaatattggttagaggacgttgtttataccaccaagaattggatgctcagtctggttggtcctgtcctctttaccaagaggaccaaagcggaacgattggtgggtggtcacatcaaagtggtgctaccaagtcaacaatggagcaacgttgtaaagttccaagagtcgaataattccactccacagatagtgaagcacggattcaagatggctagggaatcttcatccacacccaacatggagaaattgatgaaacatgacattatgaacttgcttcccggagtgagagacatgatcgaaggtcactacacttcggaggaagtgacagacgttaatgtgagtgggtacagttgtatggaagaagaacaagatctcatcgtgatgaagcctaacatagacacacaacttggttggactctggattcagggttcgaagaggacatacccatgcatgtgaggcatatgtgggatgacactgaattacttgattggaacaatagttacgcaccaagcaatgatctaagactagccagtacactagccagtgggaagcggagaacagagaagaaggtcatcatgacgaaataccccgtgcaatctagggtggtgttaaccaaggctgctaatcaagaattcaacgccgtgactggcagaataggtaatgccaccatcatacgtaaacacaatcttaacgtggagtacgaggttaaaaatatgtgtgagacgtacttcaagccaggttggcaaagaatcgtggcaggatacaaatccaaccaattaaatttcgatgaggcaggattactacaatggctcagtgaaaaaccagattgcatcaaaattgctgatgagttgttgaaatatctggatgaaggatttatgattaatcctatctcggatgtgaatgtccacttaaaactagagtctcttttaaaagatgatccagtgcaagataacagagcattgaaggcaagaattattgtgtggcaggccaagggaatttgtgccatgtatagttttgtgtttattgaggcaaagaagaggcttaaaagtttactcaaatcagaggttgtttacacagatggattggaaccatcggacattgttgctgaattagcaactgttgatcaatttacacatttcattgaggatgatttgacccgccaggatagtcaaacggacaagaacaccattgatgtagaattcgccatttatgcattgttgggtgtccctatggacattcttaaatcctggaggaaagtccatgaacactggaggttcaaaggtaaagatgttagaggtgtgtggaaagagatgagattaacgggacaagccaccacagctctagggaatgcaatagttaatttggccgtacattggagattatccaaacaattgtccagcagcctcaagaagtacttactgttgggtgacgacggattattcttcacctcctcttccattgatgccacactgttaaggaggtcaattgctgactactacaatatgaaatccaaagccttcacttataaaaattatggcacgttttgttccatggttagttataagcactctacaggtcaaccaggaataggacctgactttgttaggctaaagaggagatttgaggttccaaatggtgtgtctcaggccactttatcgaatgtcgtggcacgaaaaatgagttattgcatgatgctaggagatttgaagcccgtcagagaattgatagccaaatacaactggccaattgcgcctaccatgtggtacgattatggaggcct

SEQ ID NO: 1162 - DNA, 1192 bp, Phytophthora cactorum alphaendornavirus 2; identical to SEQ ID NO: 824
  source 1..1192: mol_type = other DNA

SEQ ID NO: 1163 - DNA, 12491 bp, Phytophthora cactorum alphaendornavirus 2
  source 1..12491: mol_type = other DNA
atgtttattggtagcatgtataggaattattttgatcctggacatgcaaaccatatgggactcatgcaggtgagcgacatatacaattacaaacatgtattgcacacagatagaccattcaatcctaaactgttcgttgccgatcaaattcgatggcgtacatcgtttgatccagaagatcacagtaaattcattcgcacttatggtgcgccaacagaattgaccaaaccagctgcaacttcttatccattccacaagtttagacgtgaatttatcaagtatgtgaaaaaacaatcacgcaaattttcaatcacacgttcaaaagttcgtgcggacctacttggctggttgtcatcacgttcagactacataatgccaggtatgccaagagctaggatcttcaatggccaagaacaatttagcaagggtttctacacgaaatgcaattgctgtggcgccataagtcacatgccaatagatgactggttatcaaacattacccttggcgaaatgccaaccagagaacaagtgtgtgaaactatcgaacaaatgtacaatgcagaaggaaatggtatcactattaatcaagtggatagggttgaggatcatatcaaatgcggcctcggattggaatgtttcaattgtggtgaaaacatcatacagatgaactcactgccaccctacgattatgtccaaacaaagtttattgaagactatggtatcaatggtacaaatatcgaagaatttaagaaaatgttgtacttggataaccctcctccagacgagttatcagcttccgcgacagcatatgacatcactaaaaataaggatattgccgcatatttacaacgggcggacagaaaatatgctaactcagcatttgctatcaacgcagaattaatggcgcgcatgtctcaacgattcactacgactcaatttgctcgcaatcaacacatttctaacaaaacattatcacaagttgaactggaagaagcattcatgttgaccgaagccagtgcacttttcaatcatgctgtttatatccaaccaagtgctattaacgttttccatgctttggcagatggattcgagtgtattacaaactccccgtggttcacaaatgcgaatatcaatttgtctaatactaacagtaacttaatgtacactattatttctgcatttagcaatgttgatttggacaacatttttgtagatcaaaatttcgtattagtgccaaattttgattcattgaatgcagaattcgttcacaataatatcgttcatttcgatgtcactggtagcgatctgccatctgaatggaatttgcaagcttcaaaacttatttgcaaatcatcaagagtgtcgcacaatagtgtcaactacctgattaaaactgtgagaactactaaatatttccaactagtgtacatcaaacaccacacgaagggtgaagtgcacacaggtaggctcacagctggtttaggtgaacttgaagtgaagttacccacaattgacgcaaacagtatgctcaatactttgggaatttatggttcaaaatggacaatgcaaacaattaacaccgatctagtatacagaatcttgataaatgcaatcaccggtaaaaaatccatcgaatctattttgacatacgttgcaggcactgcaacaacaaagtacagcgttggtggtaaaatcgtcgacatttcttccacagccattgttgaaggtattcctgagttgacgtatgtattattggtcctacaagatcaagagagaatcaaccgatggtgcgcatggaactacattggacatgtaaacttgtatgatctgcagcaagaactacacagagcagtgttctctaaaattcttaattggttgagattgtatcaaccaacaattttcaaaaatgttgaagatttcaccacaaccaaacatcaagccactttctccagagatagcgttctattaagaactggtatggtgccttctttggaaaaaatccaaccatttaatctcattttgaaaacgaatgataccaagcatttcggaacgtcaattaagtccaaagcgtgtgttcatcatactagcatctgcaagcacaagatggcattaaattcgtgcgtttgctgtggtatggaatcacaaccaaacagtaggttctgcaattgttgcgtaaacacagttgtggaaaaacacgactgttatcatgaatgcttacatgaacatagatgcacagttttcaatgacacaggtaagtgtgaccatttcaactattgcaattgctgtgagagagaatactgtggtgatatctgtaaatgttgtgaaaagcaaaatgcgatcacagtaaaagagattgttcaaaaaccacacagacatgagaagaaaaaagtgcaaatgacaacacaaccaaatcagactcgattggataacgccattaagcatacgaaatcgaagtcaaaattcgccacaactatcaagcactttaaatttgaagaagacaactttaagttaagaaatattcatgatcttaaaaccgctaaagaattgctactcgtttctactgacggaacatgtctgtgtccgtatgttagcatttgtggtgtctaccattgtttgcgcgagccatttgaaggtatacaaattgtggacgccatcgttcaagagaattattgtgggatggaatgtatttcgagacaaactgacgtcacggtggaacaacagttcaaagcagtgggtaccaagagttctactagcttgcaagatctgtatgacatctgtgaatatttctacttaaacgcactcattaattatggtaataaccagactagtattgtaaggtacggtaatctgttggacccatatatcatcatcacacacagcgaatctatcgatagtacaagacagcgtggacattggtgcatcactgtgccacctaccattacaacattcccgaatggctatttcaacaacatggatctggattgtcaaactacgcgtaaaatgcgtctcattgatacgttttcagtaagcataacagaacagataagttttacgcaaaaactgagatcagcattacaagcagatatcggtattgatctaatgcaaaaattagaaatgccaaaattggtgttcaaatcagacaaatattatcttacgaatgccatgaccactaatatcagaagtggagccatcaacgccattgtacctaagaaattttcttcctactgtgaaatgtgctttaacaatgacaagatgcctacagaattgttggcattgactgctttccattcggcaactagcagcgcagaagaaataatcgaaaatagaattttagatactatacgtgaaattgctagatacaagtcagacattgatacaggtaaagcaaccatagaggcagttatgcagtgtgacaccacaggaccagtcctgcagctcagtccacaattgcgtgttttcaagtcattggaattagtgcaagtggaattcagtagcgggaaaaaagaactagcatgcactagaaaactgcaacgcgattctttcattgcaggttttgaaggtagaatcatatctgttacctcatacaggtcatcatttggttcattggtgcgtagattgatttccttattcaacgcactcaaagactgcatcaacatcgagagtgccgtagtcgaaaagaatgtgaatggtatcggaggtacaggaaaatccacctggatcaggcagcaaactatttctaagtgtgcagttttgtgcaagctcaggggcaacattaatagaatgaagttgttgaactttgattatgtcaacacaattgagcagtatcttattgatagaccagacattaacaacattattttggatgaaagtacacttgtggactctgcagaatatattagtttgttcacaaaaccgaacatgcacgtttggttgttcggtgataacgatcagatcggagtcgtggaattttcagaaactccaggttggaccaaactacaaaatgcccaagaatactgtgggaaaatcgtagagaattggtcaaaatgttacagaataggtcaaccgctgtttgacgatgtaattaagaaaatctacccacacgctgaaagtgtcgcagaccatcaaacggtctatgagttacaccattaccataatgacaccgagttgttagatattatcaaagacacgagaccacaaactatctacactttctacagtaacatgaaagcaatgctagtttccaatttacaaggggaaggttgtgaaatcaaaaaagtgcatgcagatcaaggctctgaagatgaagtttgcatggtcgtttactcatctaattcagaccaaccggaaggaatattaacagataggaaatacatcaccacggcgttcacgagaagcgtacgcaaactaattgttgttacaaaacatgattacattgaatcgttgagtcaaattgtcgacgcaagtattacaggccgtggcggaaatgttggaaagttgttagatgactttggaagactatctaggaacattactgatctggagattccatttatcaaatctcaaatattcgagaagatgccaactgctgaaaaagtggaagttagcacagattccatttcagtagtgactgtgcataatggagttagagtcagcattattgtggattctaatggtgtttacggcggtgactgggtttccaagggcatcgtgagtttaaatagacagtcaatcgtcaaatctatgaaacaactagaagaagaaaaactccatgacgatgcgtttgaattcgagggtgacatctttttagattcaacaccattttcaccaaatagcattgtaccgatgtcgaagcctagtgtaagcaaagtgtatagattttcagcgtcattttggagcttttacatccgcatcatggatgctacgattctcctgcaatcttgcaacaagtctgcagaactgtcgcttggcaatgaaacatggcatgtcaaattgtttaatggttgttcacttttcgctgggtccatttggaaaaacaaaaaatttggcaaatgcacaatttcatcgggtcacgttcaaaatggagactccctgttgtccaacttaaatagtcatgtgcggactctatccggagattttgaagcagtggagcaaatagtgcgcttaatgaaagataatgaattgcacaaaaaattcaattcaagttccaaacacttattcaaacaaatatcaaacagaactgcaactatgctcaaacacaacacttgtaactttgggtgcatagagactcatgctgaaagttcaaaacaccataacgcagaactctatgataagtttgagtcggaaaatttaggttatgccaaacgcattaattatcaacctatttcaaaactagtgtatatggaagaaaatggtaatacgttaatgtacccaggtcttgtaccagtaaaaacgattaacgatgttcactctcagttaatgggaattcaaggtttagatgagagttacgatgcaaatgtgagtaatagattgataatggataaaatattgcaaaggaaaatccatgccgagcgtgctagagatttgcagtgcatagtaccggaaaacgtattcaataattacagtggcttgatcgctgatgtgatcaatgtcaaacaattaattaaggtcccaactgcctcatttaatgactctactggtagcattttcgaagcggtcagtattacatacatgatgaaagtattacgttgtaagagtctggtagtgcatggtttcgatgctgttgtggtaactttgcaaaactatgaaagcgtacgcattcctagggatgagcttcaagtcaatgaattagcatatttagaaagtgtgaactattcgaaaattcaacaccttaagaaaatgctttcagatggcattgctggcaaccaaaaactagatacggaacggaaattggctgagatggaaaatgtagcaccattcatcattgaaaacgacgttaacaccaatgtacacgtttactctttttcgaatgctgtagaacaaactgcagagcatgtgtatttcttgaaaactgaagacgacgattcagttaccgtgaaacaaggtggtcagttatacatgcgtggcgaaacctcgttaccgataatggaatcaaatcgattcttaccacatgttgaaatagtcagatttggaccagtttcactatgtaaacttgtcaaaaaacggcaaacaaaactcgtatgggactataaagacacaatgaaattgaaaagattctcaattggcaaaaaccgagaaaaaattgtggacattccagcaaatttatacaccaaattacaagcacgcgcaatgtatgataatgacattactatcgatgacatgctagcgtacgcaagaaatttactgagcacaatggtgtacacaagtggtggtacatcgttagttcatgcaagtcgtttggaacacatagtagaatatgtcgcagttgctatgaatgtagtgaaaagaaataaagcctatttctctgcacttcaacattacacaggtaagtctcaaggtgggaatctgaaacaagaaatttgggatgtcatattatctagggttaaaacttggttgatggaaaaattagatgagtttgacataccagacatgtggcaagcgttttccgagtattaccttgatggcgaaaacgagtctgttgtaatcaaacttatcaaaacgctgactgacacggatattgtgcaaatttttccacaaaacaagctgataatttacgatcagcaagtatcagacgccgaattgattactaggtggaaaatcaattgccctagtgggaaaaaattagtggaaaaacgattcagcaatcaatcaccatcaaaaccgacattcaaagaagaaacgtcacaccatacagagtcaagtacaaccaaggcagacgaaagttcatcattgcgccaagagatgctcaacttgatgagcagtgttgagtcgaacataccagagtacgttgaagaagctgacacttacacaagtgatgcgaagcagaccggaacaagcggtggttcagtgcaatcatcagagagtgacgatgatctttgcgaagtggaaagtgttgaaagtgacagtatcatcacaaaaagcattgtttatgtagaagaagagcgatttgaaaatttacaaactacagttctttttaacaaattgtcagaatggctgctgccagatctaccgaaaccggttccgtacatacatgattgcggacagaaattaccaaactttgacacggtcgagcgtctgaacgatcaaaacaggttgttgtggcataaagcacacacatggttaaccaataaaggttataaattcacaattgtgaaaggtacaatgctatcagcgatgaggtatgggttgttgttaccttcgaaatgttatgtagaatacatcacagaaagcacgaaaacgcaaggtatctacaacaattgggtagatagtgattatgatatcatcatcttcattagaggtgcaaacaactcgcaacagaatttggagatacttaatgacatggcaagggatatcggtgcaaaagctatgttccgtggtgaaaattactcaactgctgcactcaacaactaccttgatattgaactcaattacaacacacatgatggaatgtgggatgtgttacgagaacattgcaacggaaaattgaattttgcgagtgttgatgtgggtattgtgcattatgatgataactacgcatattttacggacgattgtttgtggcaacatgctggtttattaggcccgtgtaaaattatcacggcatacgtaatacctgctgatgatttcatgatttcaatcgattataggacagtcactctttcaccaaagtggttactgcatttaagtggcattttgcaaaccacagatccaagtagtacccaacttagaagtctaatgtaccctcacgcagctagttttgatagtgcagctatgttgagttgcacgaacattaaatacgacgatttgagttgtttacttgtaatgtgcgcatgcttgtcacataccatgaatccattcactacacttattgaaacagacaacagcgatatcactgacttgcttaattacactacagatgacgtggaatatatcaattcgatcagcagtactagtgtacactcaaaaacaaagcggaagaaattgtgtgcattctttagtggtagcaacggtgattttgtaccattactcaatgttgtttacacgctagtgaacagttttgacatcacatgtatggtacctggtgatttccatctgccactacctttaggagtcgcaagatttgaatattgtgattcaaacaaacatttagtacacggtggtgataattctgaatcactaaaaaagacaatatcatacatagctgacactatgcgtgccggaaagttcgaattcgatatttcagttggcatgttttttagtaatgaaatagagtttgttctagtgaaagaaaaatgtgtaaaattgtggccagtgatatgtgacccatggaaaggtgggaggccaccaatgtctaagtttttgcggggattaactacattcaaacaaaacaaaaacgtgcaggaggtgggttgtgttcctactgggctgagtgtcaaagaagtgaatcttggttggccaatgtcagaagccactttcaaaccagatgaaatcactttaaaattcattcacttttcacacaaattacgagcaaagttccatgtgataacattcggttctatgcagttcacagagtatcaaaaaacagtacaagcagacatcaatcaacacgaggaatgtaggattctaatttgcaccaattattattccaaagatgaagtggtgcatcacgcgaatataacagcaaatctttctgaaacattattcactgatcggttggtgattgtgaatcgcttaaatttcatgtgcattaaagaatacgtagtttccatcacgcatcatggtgggtgtggaacaatgttaacaggttatttttgggacgtaccacaaaaaattgtaccgattgcatatgagcaatttgataatgcaaaattatacattaacaccccaaaattatctattgatttagcgaaagagtgtgaaacctatagactcggtatcaagcaggtgtttgatgtggacattagtatgtctgtggttatggaaacgtttaacaatttgaaaatgtctgaagataaagtggaattgatgaaatttgaattcaattctagcgctatgacagcagaattgtcacagatgtctaataaccaaatcatgccgatagaaaccacgattgattgtgttaaattatcattacttaaggtttgtcatgacaaagagagggtagaaaaagtgtataaccagtggtcaaatgtgatgtcattcagttctatcactgatgtgatttgcttagcatcagtgatcaaagaacctatatttgtttcgcagaacaacatctgtgttaaatttggtggttttcctgtcagtttgttcggtggagatgaagaatcctatggtgttatgattactaatgatggtagacattgtaacgccgcatcatcaaatttaggaccagtgcaaatattcccaatagaagcaaactggagtgagatcccacttgtgaccaatgacgtagttggcagcattagtgaattgatgtactgcatgatcaatgaaactgatcacccattgaatgtagtgtacaaaaaactgcaattagctaagcaatttgatatatcgagggtagtattcacagctattcgtaaatcgcaatcatgcgtgctcattaatacaatggcaaactttgctggtggttttatcacagattcattacaaccttattacatttggactgtactcagtaattacggtagttttgcgtgtctaactctaccgtcacaacaaggaaacatttgttacgctctacatggatatgatgtctgcatttcaccaggttttgctattcggcatagttcagtcaaacaattttttgtcagacagatgcaaagtacgaagtatagtagcgaggttagtgctatcaatcaatctacacttaaattttgtagggctaacggttatctagttaacaccgtgactgagggaccagcaaatacattgtacgtgtacaacacctggaacagataccatcatctggagaaggaaagagaaaaaattatgtattctaaaacgttagtgatcattccaaataacattggtgaagctaaaatagaagaattacgaaaattcgattgtcacagaagagtgattatgaagggtgactttaaaactattgtagaaacgtcagaaatgcacatgcaggtcatgatgcgagtgtataaatcactcaacatatttttgtccactatcggtaataatataatcatcattaaaaacgttaagaaatctatgttgattgaattagacgacgctataaatattcaagtttcagatagtggtgctagaattgctctatatccaaatttcaatgaacaattggaatggccacaatcttcaactttaaatgaacttttcttgatgagtggagagataccaactgattggttagtagattcaattagatcagcatggcatttgatcggtgatgaagatgtcctttccattgtcatggaacaatcatcggtcacgaacatggagttgtcaacagtagttaaagttattaaaggcaacgttttaatttcggacaatttgattatttttcccaacaagtttggtatttttaggcgtgttataacaggtgcgggcgtagtagcttcaaactggatgtcaacagaaagagacatgagatcaataaataaatttgaaactgtaactgaaaagacaacaactccagccgtagatacatcagtcttgcatcaattcctaggtgttttcaaaactgatagtaatgaggaagtttcaatggatatcattagtcaagttattaacaataaggtcgtgttggatgcgtatgaaaacaataacggagaagtgagtattgaattacaaaaattggatgatattcctgatatgaaatcaatggattattgggaaaacactacacaattacaagatgatgttcacatcctacccaccaacagaaaattgatcatgaggaattcgttgcaattcaatcatgttaccagttgccttaaattggcgatggagcgttacccgactattgcgagaccgtctataactaaggactatatttctgagttcaactcaatgtcaaatagacaaggtgcggtgaaagaatatcaaaagaaaaacttggtagtagacgctgaactcaatatgtttgtgcaaaactactttttgaagaatttcacagctctaagcggcagatataaaggtaatgccattgagtttgatatatcggcatcaattgaatggtcattgaaacacaattttccagctgaggttatacgagacttaaaaaatttgcttgaccaaggttttgagaaaaacccattaaacagtgttgagttacatgccaaaacagaacaaactaccaaagtcaacaaaatagcaagatggtttagtgaagtgattagtagatctattacagctagttcttattgtattgcagcattattttcacctgttttcaccgaagctaaaaaacgattcaaagatagcctgcgacatccgttctattatgttgacggaatgacgccaagtcaaatcaattacactataagttcgatagaaaacgttcgatacatcatcgaagatgacctcactcaacaagatggacaaacttcacacggaatcatcgcagtagaatttgaaatttataggttactaggtgttcatgatgacgtactgaatatatacaaccgatgtcatcacctatggaagtggaaaggtcatggttcaagtggtatgggtgatgccatgcgattgacaggtcaggtaacgacagcaattggtaatgctatcactaatttgattgtgcacaataggttcgtagcacgcaataaatcaaacatcaagtttttgggttttttgggagatgatattattttcttcagtaatcgcagtctgaatgttagcaaacatggtactgagaccaaagaaatttacaacatgataagtaaaattactcaccgagaacgggttggtggttttctatctatggtagttcatacacttggtgataaaccagcaatttgtccacattacaaaaggtgtagacatcgttattcagtttgtaactatacatttagtggtgatgaacgcatggaaaaaatcaataataggacactttcatattgttttatgctcgggaacatcaaacaatcaaaagaaattgcgatgcagatcaatcccacggttgatataccagattggtatgaagtaaatgatgcaataattgctaatgctttatatgatcaatctacggaattcatagtgagatcacacttatcatctatgctatcaatgatgaaaaacagatc

SEQ ID NO: 1164 - DNA, 1209 bp, Phytophthora cactorum alphaendornavirus 3; identical to SEQ ID NO: 826
  source 1..1209: mol_type = other DNA

SEQ ID NO: 1165 - DNA, 12599 bp, Phytophthora cactorum alphaendornavirus 3
  source 1..12599: mol_type = other DNA
ttgaaaaactcgaagctccccaagctaacgattaaacaatgcgagttcaaaaaatcaatgtacattgattctgccttcagcagtgcttatgctgaaggacatctgaatgatctagacatcactcagatgatcgatgtgtatcacaacttggactaccgagatgatgccattaatggtcggcaaacgtacattgcagacagaaatttcaacccaaagtatttcaatggtgacaaatggcgctggagaaacaactactacggcccaccgaaagccgaaccagaaccgaaacaaagtattgtacctttccataagtacagaagacagttaatgcgatacgtcaaaactggttcaaggaggtttacgggctacagacaagatctgttgggttggctgtcatctaggtccgattggatttactctggaatggctgtcgagcgcagcagagtgtaccaaggtaaatgtgaattctacaagggtttctatgctaaatgtaaccactgtggagcactcagttatatcccattgtttgcaacactatcgtttggactaggtggggatgaagctaaggttgcaagtttgacgaaagatcaaatttgcaacctattggaggtgttctataacaagaaaacaaccgaagatggtgcattggatctcgatcctgagatttatggcagtgcaatgggtttactcacaacattcttcggtgcagctaaacttgaatgctttaactgcgataaaactattttcgaaacaagtcatgaatcaccagatggttatgtggcaatgactcatatcaatgactatggaatcaatggtactaatattgatcaattcaaaaagatgttgtatttggataacccaccgcctgaagaattgcaagccgctacaaaagcctatgatgtcaataaaaatagggatatttctgcttacttacaacgggcagatagaaaatacttaaacacagcattcgcgacacatgcgggcaaactagcagcgcttgcgcaaagattcactactgcgcaattcgctaaaacacaatatttgtgtgagcaagaactttctacgtatgagatgcaagagattatgttattagcagaagctagcagtttgtatgctgctgattgctacttgcagccaagtgcactcaacacgtatcatgctttaagtgatggtttcgcctgtgtagtgaattctccttggttcaccaccacaaacattgtggtgccaaacgccacagacaactgttctcacactgtgtttagttgctttgataatgttaatgtagaccatgtgtttgacgatggtaatgtgttactgttcccgagtttccatgcactgaattatgaccaggttaacggtaatactatatacttacctgttgcgggtagtgatttaccatcaacgtgggattacaacgtttccaagacactctcagacgcgtccgcaattagacacaacggcaagaccctgaaaattaccacaattaggtcgactgaacacttccagttagtacgtttcacattggtgagtgataatagcacaccagcaaaaatgcacacccgcctactagctggacaaactacactgcgcgtcaaattaccaactattgactcgaactctgtgctgaatactttgggtctgtatggtagtaagtgggaaatgcaaactgtaaacacgaacttggtgtaccgcattttagtgaacgctatcaccgggaagaagtcaatggaatccatgctcacttacatagcagccaccgctaccaccaagtacagtgtaggtggtaaggtggtagacattagtggagtacaacttgttgagggtatacctgaattaacatacgtgctgattctcttacaagatcatgatcgtctaatcaaatggtgccagtggaactttattggtaatgtgaacttctctgatttgcaatccaacatacaccgagtagttttcagtaaattactcgcgtgggtcaaggacatgaaaccaaaactttatgagaaaattgaagccatgacgacaactaaacaccaaacgatgttcagcagggattctatcatcttgcgcacacacgcagttcctagtttggaaaccatccaaccattcaaattgctagatgccactaaaacatatagagtaactcctcatcaaagttcgacaatttgtgcgcaccacccgatcggttgtgagcatggatacacttccgaaccttgtatctgttgtggtctacaacgtaaaccaaacagtaaattttgcgactgttgtgagaacaaagaacaacttgatcacaagtgttatcacacttgtgatcacgttcacgtttgtgaagagaaacgtaatactggcaattgttcacaccgctcggtatgttattgttgtagactgcctttctgtggtgatcgatgtttgtgttgctttgatgaagagagagacagtaaggaaattaccaaacctgtaactgtcacaccagagcgcgctaagacaacgacaacaaaaccaaggagagtggaattcaaagcacaagaaccaaaaccacacacaaaccaaactcacaaggcgaagtttgcacaaacaatcaaaaaggtgcaaatagatgacgagactattaagttgagaaatgtcttggatctaaaggacccaaatgaaatccagattgttagctcaaacggaagtgtgttgttaccatacattagtatttgtgggatttataactctactagaaagcaaattgagccatggcaaatcatagacccgattttaacagataaatactgtggattattatgcattgaggcacaaacagatctcacgctaggagaaatgcaaacattcactggattacaaaaagaaatagatatcgctggtctgtatgatgtgtgtgaatatttccatctcaacgcaatcatcagttacggcacagatcaagtatccattgtgaggtttggaggattactacaagcatacattagtttggtgcacagtggagctgtgggtgaaggtagacaaatcggtcattggagtgttggttctcccgttgaatttaccagtttccctaaagggtttttcacgaatgtcgatttcgacacaaccatcacaaggaaaatgtcattgccaaatactttcgaagtgaatatgtcagaacaaatggacgctacccaaaaacttaaagcagcactacgtacatcacttggcatggaagtgagtgaacgcttgcaaatcccagtggtcaaagttatagatggagtgtgtactctcactaacggtgctaaaaccaatttgcgcatgggtatagttaatgagactgtccctgatcgatacaaagcattagcagaaatggcatttaactatgaaagaacaccagttgagatgcaagccacaactgcattccacaacacagaatctgaacctgcagacatcttgcataacagaatagtggacactcttagagaaattagtatgcacaaaacgaacttagctactggtgagatgtcaacggaggctacttgtgaagtgcagtcattgagttcaacagtggaaattccagcggagatgagtgtgtacaaggcactggatttagtaaaggtaacttacaacgatggatccgacagttttgaggctgtgaaaaaacgtagcggtacgtcttacatagcgggcttgacgaaacaggtacacagcatcacttcttatagagcgtcttttgcatcactaatacgtaaattagtatctttattaaatggtctccactttatcaaaaactaccacacccacgttatcaagaaaaacgttaacggaattggtggtactggtaagtccacttggatcaagtcggaaatgaataagaattgtgccgtcttgtgtaaattgcgatcaaatttgaactcattcaagaatttgggtttcaggtacgtggggtcattagaacaatatctgattgaccttcctcctatcaaacaaattgtgctcgatgaatctacattggttgatgcagcagaatttatctgtatgcaccatttggaaggcatggaattctacttgtttggtgacaaagaacaaatcggtgtcgttgatttctcgcagacacctggttggaagaagctccctagtgctcaagactattgcgggaaagagattgaaaactggactgtgtgttatcgtattggagagccattagtaactagcgtgttgtcccgaatttacccaaacatatcaacaaaagctgatcacccaacgttgtgttctctgacacactttcagaacttagaagagattgtttccatggtggagctgtacaaaccggaagcaatttacgtattttacaccttgcacaaaaggttgttgacaggattgcttaagaaaactggtgttgtggttcgtaaaattcatgccgaccagggttctgaagtttcaactggtatagtcatttacgctggtctcgcaggttatccagagggtatcatgttgaaccgaaagtatattaccacagcattaactaggtgtagagatcatttaatcgttgccacttcacactacgacataactgagattgaacaaattgtcgacgcatcgttgattggacgtggtgaaacaacatataatctagttaataatgcgggtgaattaattaggcctattgaaatgcttgaaattcctttcatagaatcaaaaatcaaggaacaaagtgaaatgattgaatcggtaaaagtctatagggatcaaataaaaatatgtgcacaagtaaagggcttgaaagtcaatgtaatcgtggatgctaatggtatccgaggggatggttttatgtcatcaaaacttgtctcccttaacaaatcgatgatcctgaaagcaatgcacgatcttcaaacggaagaagtacgcatgggcgctgaaatagtagatgatgaaattttttacgatgttgaagagcacatggtagaagatgacaagaatgttccaacaagcggtgtgcttcaagccaacgctcacgcaatggtgtctaagtcatacagattcagctggtcattctggagtatgtatgtgaaagtgttagacgcagcgattttaatgcagaaagcgggcatgattccatgttttaaaattgccaaccgatcctgggtggtgaaagtatacgatggttgttccctattcgcaggttcaaagtggacgtgtgaagcaatcggatattgtactatttcatctgcccacgttcaaaatggtgattccttgttgtcaaacttaaacagtcatgtccgcacaatagttggtactgatatgtgcgtgtctgccatcgtttcactgatgaaagataacgaattacatggtcaatttggagctgatacaacacacctagtgaaaacaatcatgaatcgtactaaaactatgttaaagcacaacacattgaattatggttgttttgaaccacactcggaaagctcacaatctgaaaacgaaccattgtacaccagatttaaaaaagagaacagaggatttgtggaagaaatccactatcaacccgttagcaaactcgtgtatgttaatgaaaacggggttggttgcatgttccctgggcataatgtggtcaaaacagtgaacgatgttatgcagcacttacaagtcataagtggtattgatgaatcttatgaagctaatatgtccaaccgtcaaaccatggacaaaattcttgcccgtaaatacatggcagaacaatctaaaaccattcaagtattgttgcctgaagctgtgtttaacggatatgcacactgtgtaagtgattggattaactacaaacagttagtcaaaattcctgtggcgagtagtgatgactctattggagctttgtttgatgcagttaccgttgcgtacatggcgaaggttttgcgaccgggcaaagtaatcattaaaggaatggatattgtcagtgtaactttacaaaattttgaaaattttgtataccttgtggaagatttggatgaaatgtctaaatcgaaaataattgacttgacaattgcaaagaaaaacaatctcaagtctttgttgtcaaccactctcgacgctgaaaagaaaagacaatacactcaaaaacttgacgatctggaaaataatgaagcgttctgtgtgcgtgacacaattggcgtgcaatgtcaattatggtcaccgtatatgcgagtggtcgacaacgcagaacacacttatttcgttaaagtagacgaaaatagtacagttgttaataaaataggaggaaggtacttcttcaagggtgaaacttccaaagagatagtaatgtcaaacaacctgttaaagcacgttgaaatttgcagatttggtggagtgtcattatgtaaattggtcaaaactaaacctgttaaatacgtgtgggacatcacagaaacgcttaaaacacgctctttcaggattggcaacaccggtggcgaaatcatcaaaattccaaacagtatttacacaaaattgtacgcacgtgttctgtatgaagatgacgtgagcatggatgacatgctagcgtatagtcgaagcttgttgagtacaatgatttacacacatgctggtcccactgcagcccacaccgaaagtatggacaatttggtgaagtatattgctgtggtcatgaatgtatcacgcagaaacaagaaatatttcaaggcggtacacaaatttacacaatctgccactagtgacgatttgtttagtgaaatttggaacgtggtattgtcaagagctaagacgtggttgacagaaaaggtggaagaatacaacattccggaaatgtggcaagcattcactgaatactatactaatgataataaaaacagtgtaatgaatcaaatgttaaatttgctcaaagatgtggatattgtggaaatccctagcaaagaccacctcattatttatggaaaacgtattttctcacaagaaatcaccaagcgcggttttcctgagtgcagtagtggcaaaaagttgttgcaggctcgcttacaacaaccacccggtaatgaatcacagacatcgggaaccgctacgtctcttgcagagcagcacaccgaaaatgtccatgaaagtagtagtccaccagaattaaccaccgacactagtgaagaaatcgaaggagtagcacaagagatcagatctctcgggtcagatgggccaccatctttgctggacgatgagttgtttgacgaaagtgaagaggaagatctgagtgaagaaactcacctgtatgattttgaaggaggaatgctgatcgaaaatgctgttttatccaccgctcacggtgtgattggtaacattgaaaacaatgaactcttcagaaaactagtaacttcattaaaaccaactgtaaattgtgttattccatatatccacgattgtggtcaacaagtgcctgaacttagtgaggttgacgaattcctaacactatcgattgaatactggaaaaaagcgcatgaattcttgatggcacaagattataaattcacaatcgtgaagggcacgcttatagcggccatgcgatatggtacactctcccctatttcttgcaatgtgcaatatgacacaccacacgataactcacaagtcactggtgcttacaacaattgggttgatagtgattatgacatagtcatttacttaaatgagaaatcatggaaaagggaagatagaagtaaagttatcgtggattttgcaaaagcaatgggagccaagccaatgttcaggggaaataatgattgcgttgctgcagtgaatattaccaacgtaccaacactggacttcaacatgcatgataatttgtgggacatcatcaaggatcattgcaatggtaaactgaacttcactagtgtagacattgcagtcgtgatgtactccgatgaaaagtgtgattttactgaagattgtgtttggcaacactgtggtctactaggaccttgcgtgatttcatctgacgcagcattacccaatagtgagttgaacatcaccattgaaggtacaactgtgtgtctgccgaaagcatgggccatgcatctgactggtataatgggaactgacactccaacagttgcccattggagacaactggctatgccgtaccaacaaactttcgactcagcatcaatgtattcttgtaatcgaataatctatgatgagatgagtgcagtgattgccatggtaggtaatagcattattgaaaaaagcgcactactgtggtgtttaaccgacttgcgagaattggtatcacactttcgttacatgcatgaagaaatcaactatgtttctcaagtgtcaaacaaaccaactggaataaattcacatgacaatgtttgtgcaatgtttagcggtagcaatggtgattttgtaccgttgatgaatttagtggatttgattaaagaccattgtcaaatgaccgtgttattacctgaagattttcacttaactattcctaaaaattgcactgtgaagtactactgcgaaagcaacgcacaccttgtgcacggaggtaatagttcagatgcactcaagaccactataaagtacgctactgcagcattgaacctatgccagatcaaatttgatgtagttatagggatgtttttcagcaacgaaatagaattcattccagcaacaaagttccaattgagaatatggcctgtagtgtgtaacccttggaagaatggtgttccaccaattagtagattcatcagagcggcggctacaatgacaaagaaacccaacgaagtggagatgggcgttgtgcctcgaggtttgtcaacgcaagaaaagaacattggttggcccatatccttttggcaattcaactcagactctaccacagatagagtgattgacttaatgaataaagcaaagtgcaagtaccacgtcatctcatttggttcaatgcaatttgacagttacgtgaaactagtacagtcagatcttgacaaacatgctgatgactctatactgttatgtacgaattacacaaatatggatgctaaaatcacaacacacggacaagaatacccattaaatctcgaattgctatcagacaaattgataattgtgaaaagggtcaatttttatctactaaaaagattcgtcaaaagttttacgcatcatggtggttgtggttcattgttgacgggatactactggggcgtgcctcaaacaattcatcccattgcatatgaacagtttgacaatgcagctttttatttggaaaacccacacatcacgttaaatctcgaaagtgaaactcaaaacacgtatgaacagatagaaaagtattttgacatcaaattagattgcgctgaagtaatagacaagattagaactattgaatacagtggtatagagcaaatgtgtttacttgagtgcatgatgaacggcatcactgcagtgcactgtgagttaactgaatttaatgtactaccaattatggtctcacgtgactgcgtattgaaagcactactgactttttgcgacgatgaagattgggtcaaatccatcttctctcattggagcagaacgatggaattgtccacctttgaagatttgtgcgctttagcatgtgtgctcgggaaacccatgtttgtcaagacaagtagtgactgtatacttttcggaactcaggagcaaattagaatgaatggtcttgtgttaacagaagacttgcgtcactgcaatgctggtgaagctatagtgacaccaacaatcacccagccagagatgttcgactaccaagacgtggtgttgtatgacaagctaggtgacatgacggttaaccaactaatgcagttagtgagtggacaattatcgggtgtagacgctaggttggaaaaagcattgagttccattaggaattttgattgttcaagaatctctctaactgccatgcgtaaatccaagttatgtaacttagtggtggtgaaacaagtattcgctgggggtgcgttagttgagaatgctgcaccattctacacatggaatgtagttacaaacaaaggagagtgtgtgtgtttgactctgcccagcaggttgcctcacaccactctgatgatccatgggctctctcaaagtattgaacctgtagtgtgtttccggaaaaattttgtgggtgatgtgttcatacccaaatcacagcagaacatagaattaacaaaagttgctgcaattaatcagtcaactttaacaaaatgtaaacaactcaaaattcctgtgcgactaatttcaaacgaaccaagtgacaccctatacatttacaatacatggaataggaaacatcatcttgaaaaagaacgagagaaaattgtcaatgcagtgaacattaaagtcataccaaaagacatcacacaaaagcagaaattgtacctcaaggattttgagactcataaattgatcattttaaaaggtaaaccaaattatgtttgtgaattggatgaagaaaccaaatcagtgtgtgagagattctacaaaacgttggatgtgtacaaagcctctcatgatcaaaacatgattgaatttaagccactttcaagagcgctgactaataggttggatgacatcattgatatcaaagtctcagatagtggggctaatctagtcaagtacccgctcattaaacgtgatattgagtacaaatcagaggcgactctgggtgaagtgtactcagctattgagtacgagagggacgattggaaagaggatattatacgcaggaattggcatttgcagcctgaagaggatgtgtggagtgtgcaggtgacgcgagggcaagtaaataatctttcattagatattgttgagggtataatgcgctccgcggattacattggtaacgactttgtgatctttccgcaaaattggatgatttacgtgaaacgcatagttggggcaggcacagaacccaacgcatctgcatggatgcacaacgtgcgcgacatgcggtcagaaaacaagttttcattagagaaagaggttggccaatcaaatgtgcaaggtgaaagggtgttatatgactttttgcacgtatttaagggaagtgatgctagtactcaagaattagatgttgtatcgacattgcaaaaagacacaaagtcggttgatatgtatgaaacagaagacggtacatttgaaattgaagttatggaaatagatgaaataccagatatgaaatctatagattattgggaaaccacaaatcaagttcaagatcaaatagtaattttgcccacaaatccgaaattcaaaatgagatcgagattgcaaccaaacagtttgtcaaagtgcatcaaaatcgcaatggaaaagtaccctactgtggccagaccttccatcaccaaagaatatctagctgaattcaactcactgtctaacagacaaggtaaagttgttaactattccagcaaaccattcaaccttgacttggaatttaaactattcacgcagaactacttcccaaataatttcaatgcgataagtagtaagtataaatctgaaacagtaagtttagatgtagatgcatcaattaagtgggtgcgggcacataatttcccaaaaagagtgataaacgacctaaaactgctgagtgaacagggctttgagcgtttaccattatcaagtgtcgcagtccattcaaaaatcgaacaaaccactaaactcaacaaattgagtaggtggttcaatgacgtggtgagtagatctattattgccagcacgtatgcgatcgctgcattgtttgcgccaccctttctagaactaaaaaagagattcaaagacacactagtgacaccattttattatgttgatggaatgacaccattgcaaattagcacccttttgtcaactatagaaaatgttaaatatgtgattgaagatgatttgacgcaacaagatggtcagacgagttcagatattattgaattggaattcaaaatttatgaggcattgggattggatttagatattctagaaatttacaagaggtgccatcagatgtggcgctggaaaggtcatggtattcatggtctgggtgacgcaatgcgtctgactggtcaagtgacaacagcacttggtaatgcaattaccaatttaatcgtgcacaacagatttgtcgcacgcaacaaacaccacatcaagtttctcggttttttgggtgacgatgtgatatttctgagtaacagcatgcttaatgtgtcccaacatggcacagagacaaaagagatatataacatgattagtaaaataactcacagagaaagagtgggtggtttcctatcaatgattgttcacactttagatgatgtaccaaccatctgtccgcatttcaaaaggacacggcaccgattttccgtgtgtaattacacctttactgctgaaactagagaggaaaaaattagcaacagaacactttcctactgtttcatgctaggaaatattaaagaaagtgttgccatagctaagaagctaagagaaaatgtgcaaatcccaaattggtacaaagtgtctagtgcgatagttgcgaacgccgcatatgatgaaagcggtgaatttcaagtgagatcccacttatccgcgcttatccacatgttggaacaacg

SEQ ID NO: 1166 - DNA, 12753 bp, Phytophthora heveae alphaendornavirus 1
  source 1..12753: mol_type = other DNA
atgagcgaaatgggtcagttgagcgttgctcaactactacgccgtccccctcagggggacggcaacaaaaaattaaaaatcaatcggaacaatgttcaattgttccgattgggagtggaaggacctggaattccagtactttcactcaaacactgtctttacaagcgcgatatgtatatcgattgtgcttttggagacatgtatagtgatggccatacaaatagtatgggcatcactgaattaatgaatatttatcacaacaaccagacatatgacgtagacaaacctttcaacaagcaaatgttcaacgcggatcaattttcatggagaccggaggacccaatcaacgcaccgatggggaagatggaatacaaaccgccattccaagctccaccagttagctctagttacaattttgtcaagttccgaaggcaactaatcaagtatgtgaggaataaatcacgccggttcactggcaaccgagccgatctactaggtttcttgtcttcacgatctaacttcatttactctggaacaatggttgaaagatcaagaatctctcacggacaaatgcaattgtatgatggttactatattaaatgcaattgttgtggtgcgctgtcgtatatacccattatcaacatggttagagagttgccagtaccactcaataaggatcaaatttgtacactgctagaaaaattgcaaaacaaagagtttaatgaagaaggaatgttagacctggacatggaagtttatggttttgaattgggcatgctgtgcatgatgtttgaaaatgctaaaatcgattgcttcaattgcgataaatcgattttcgaatccagtcataaaacagtatatgaggtgttcagtcaagttaacccatatgattatggaattaacggagtcacaattgaacttttcaagaaaatgctctacttagataaccccccgccagaagatatgccagagtccagaaaggtttacgacaaaattaaaaatcaggacatgcaagcatttttacaacgggtggatagatcttatgcgcatgtgaacttcaaggtcgatgtgcaaagtaacgctggtttgttccagcggttagataacatcagattcgcagctaatcaaaacttatctgaacagagcttgggagtgatcgagatagaagaagtgttgctcctgtctgagatttccgcaatgttcaacaacaccattaacatatctccaagcagtttgaacattgctcacgcgctcaattcgggtttccactgtttgtacgattctccattcttcgaatgtacagaattgcccttcactaacactaaagaccctcaaccctacagtctaatatcagcattccctggaattgacatggaggcagctgttcaagaaaacaatttcatattagtttacaactttaatgctgtggattacaatcttgtacatgggcatgctatttgttcacccgtcaccgggtgcaactttcctgctctatggtccatccaaatgtccaagttagtgagcttatacgcaggttgtgaaatcagaggtgacaggtttgatttccaaactattcgaagtaccgaacactttcaagtagtgcgggttgtcaaaccatcagcaaagcccacgagattgttaattggcacatcgcacttacgtgtaaagttgcccgtcattgatactaattcagttgtgaaaacggtaggattgtttggaactaggtgggattggatggaagtcaacgttgatttagcaaggagaatcatcattaatgccatttcaggcaagaaaagtatagatgctttgctctcttacattgcaggcactacatcaactaagtattccgtgggtggaaaattagtagacctgacgagtgttgcattgacggatggtctgccagaactgacctacgcattggtggtgctacatgatcaggaacgcttagtaaattgggtgaaactgaatgttatcgggggtatcaatgtgcgcgacgtgcagactcacgtctacgaagtgttatcatctaagattttgcagttaatcagagtaacattaccctcagcttatgaaaacatcgaaaagctatttgttgagaaacacaaattatctttcaagcgtgacagccttattttgagacaacatcagactcctgacctgaattctattttgccatataaagtgttgactaggatttctactatcaattctaactacatgtttaacgttacatcatgcgtccaccatgaagctagttgcgtgcatgaatactccagcaaaccttgtatgtgttgtggtctagcagctaaagaaaactcaccttattgtgaatgttgtttgccagcggacactgaagagcactcttgtatgcatgtttgtaagggtacacatttttgcgctcttaaaaacgccacgggaaattgtaatcatgcaggattttgtgactgttgtaaattgccgcactgcttcgagttctgcatgtgttgttcagttgatgttgaagtggttgaagtggaaagaccggttacgagtctgaagaaaaccgctagcaagtcatcaaaacctgactctcacgatcgtgcacgccctaacatccaagtaccgaacttgggacaagtaccaagtacgcacacaaagaaaggtaaagttttggctaaacttacctttgaaggtgaaacgtacaatgttcgaaaaatacaaaatattaaagacccggaagaattgttcgtcactacggctgaaggttctatttattgccctttcagaccactcagaaatgaggtagcgatgtctcacgccggtgtggatgaacacgatattatcgatgctgtggccgtgtcagaatcatgcgcgattgaatgtattgtgcgacagtcagattacactttcaatgaggtgtgcagtctaactggctataaaacagaacattctctcacagatattttgagtatctgccaacaattgaaacttaacgtgattgtcatctactccaacaatgctatggtagttgcacgaaacgcatccatcacagacaaatatatggttataacacacactgaagcagtgttgggttcgcgtgtcagagggcattggtgtatatctaccttgccaaagctcaccactttaccaaacggtttttggtgtaacattgatttttccaccaccatgactgatgctctcaatgggcctaacaccttccatacaactgaaaatgatcaaaaaacctttattaacacgttgaaagaattaatgcgcactgagctccagttcgatggtgaagtagcactcaagttgcccaccgttaagcaaattggagatgagtactttttctccaattctgcaacgcaccaaattcaaagaggtgatgtgaacattaagataccgaatgaatacgccaaattacttgagtcagcatcgaacttcgacactgtgcagattgatgtgttagctactactgccacacacaaagtttccaccagtaataaagaattgatacatgaaagattagttgatacaattagagagtatggtactattcggggtgagattcttagtggcaggggtaatgtagacattaactttgacgcgatatgtgatgcgtcttctttcgtgttaccgcaatccgctcatgtttacaaagcactagaacttgtccgagtgaggtatgaggatggcagtagtgttgtggcggttactagaaaacatcgatcagattgtgttattacaggtttgaaacaaaaaatatctgggttcactactttcaaaacttctatcgcatcgttaatacggaaaatgtgcatccttattgacggtttaagaactgtttctaattatgattctctacaaattatcaaaaatgttaatggcattggtggcacgggtaaaaccacttggatcatgaatcatgtgagtcgtgatgcagcaatagtgtgtaaactaagggctactttgccagcattcaaatctaaaggatttaaatttgttggcacgcttgaacaattcttgctggagagaccaaatgtagcggagattgctttagatgaatcgacgctcactgatgccgttgaattcatttgtctagctatacacccacacatgaaaatttctttatttggtgaccaagatcaagtgggggttgttgagttctccaaaacacctgggtggactgcgttagacaacgctcaagacttttgtggtgtggaagtcgagaattggacggaaacttaccgatttggtgaaccattagtcactgaagtgttgaaaaacatctacccaacgatcacatcgaaatctgatcattccaccacctacgagtttaacaaatttacaaaattgaaagatttagtggaactaataacatctgctaatgttgacactgtatatgtgttttactctcacgtggaagcggccttgcgacatgaattggaaaacgaacatggtattgttataaggaaagttcacgcaaaccaaggaacagaagggaacagggtgttagtggtgtattctaatttccaaccatcgccatcgggtattcttctagatcgcaaatatgtaaccactgcacttacgagggctaagtcacatttgatagtagcaacagatttcacgtctataactgatatcaatatgatgattgacgtctgcttcacgggggcaggtggcagtgtgtctagaattttttctgatgatggtagtatgatcagagaattgtcattgcttgaaataccactaatcaacaatttcattagagaaaacgtctccaacatcgacaactactctgtttcgccagattcaattaaattggatgtgaattactcaggagtaataatcaaggtgctagtggacacacacggcattcatggtcgagatttgaaatcaaaaatgattttgtcgggtcgaaaacacttagtgacgagggagttattgaaaattcaggacgaacaactagatatgaacccagaatttattgacgaggaagtgttttttgacaccgtggaaagtgaccaacagccagacgacatcttagaagttaaacactcaaagatgatccaagtcaagaattacagattgtcattattagcttggaattggttaactaagattgctgatgctaccttgctgattcaacatgcaagtggagcagcgtatctcaaattaagaggagagactattcaggtgaaatgcttcaacggatgttctttatttactggtttcaaattaaacagtgataagattggtgagtgtactattagtagtgcccacgtgcaaaacggtgacagtctcctgtccaaccttaatagtcatgtcagaacattttcagggaatacagaaatgattcaatttttgttaactactattaaagaccaggcattccttagatcgcaaggtgctaccacgggtaattgtgttaaaagaatcattgagaggaccaaaactatgctcaagcacaacacctgcaacatgggttgttgtgctgaacacggtatgtcagcgaaacatatcaatcaagcactgtatgattcgtttgaatccgccaatctcggcattattcggaagatcaatttccaaccaattcctttcgtggtatatgttgatcgtgaaagtagactggcagtttttccgaaccatgtctacatcaatacgatcaacgatttgatgaggttgtctgatggcatacaaggtatggatgagggctatgaagttaacattgccaatcgtcaaatgatggataaaattttagtgcgtaaattgcaggtggagagagccggaattaaacagtgtataatgcctgagcgactgtttaacgagtacatgcacactatggactcagttatcaaccaacgccaaattattaaagttcccgcagtaactgcgagcgattcgttcgcagatttcattgattgtttagctcttaattacatttataaaattttaaatgtgaggcactttgaagtgcgaggagtggactcaaaaatacacacccttcagaatttggaaggtgttgtttgtaatgtcaactcattggatgtgcaatcgaagaccatctttgatgtcgtgcatacatcgaaaattgagcatttgaaaaaactcatcgatcaaacaacggtgaaagaaataaaagacaagctgacacatgatttgcagcaggaagagtgtcacccatctttcttgtgtgatgacaacacattgccaacatcagtctactacaatgctaatcaggaggtgtaccaatcccatgagcatgtgtatttcatcaaagtagacgctgatagtccgcacataattcaacaacacggtcacagctttttattaggtgaaaccagtaacccattagcaaagaggaatgccatttgtaagcatgttgaattatggcgtttcggccattacgctttgtgtaaaatggtgtcaactaaaaccattcgtctgcagtggagccctctcactactagaaagattcggaggttcacgtcaccaatgcctagcatggaaattatcgacatcccgtctgatatctaccgcaagttactctcacgtgcgttgtatgacacaaatgtgtctgtcgatgatatgctagcttacagtaggagtatgctgagcaccatggtatattccagtaccggagttactagttcgatagcaactgatatgtctcaaatgatgcaatacattgcggtggtaatgaatgtagtcagccgcaatagagcacatgctgaagcagttaagtcatatttgtctactggtgatgatgggggcataatgtccatgctaatccagacggtttcatccaggattaagacttggttagcggaacaacttgacgagataggtttaccagaaatgctaagtgcttacaccgagtattacgacactcatgcagctagtaattccattctgcacaaaattattgcagcatttaaggacgtagacattgtggaagtgcatcccacttgcaaattgatcgcataccagggtaaagccaaggatcactctatcattagacaaactaaacggaattgtcctagcaactcaaaattagttcgagaagagcagagggagactaaacacgtcccgatggggatttccagtatgggggcgacagagtatcaggagagtggtgcgccatcacaacaacagcgacaacaaggaaaatcaaccaaacaattagatggaaagaatattgaggcatcacataaagacagcgttggaaaaatgttgaagggaagtcaattgatgggcgactcaaatattccattagatgttcctgatattccagaacttgaaaaatcggacgcaagttctggttctgagcaaaatgactcaaatagcgaagacgacgagtctgatgacacgtcttcaggtctggaaacaccattagaacaagatgaattcaattcgagtgtgttgattaacggcaagattatcagggatagctataacaatgaattttcgagatacatgggtttgtattatgcagacttatcaccgattcaagtttgtaattgtaatgagtatcatcccgaccaaactttaatcaatgaatatttaacagcttctaaaaaattgtggacagaagctcgaaagtggttggaagcatcagactacatatataccataactaaaggtaccctcattgcagctctgcgaactggaaagctgtcacaacccacttgtaatgtgcgcctttctggtggagggacaaaaatcgtagggaatatgttgaactgggtagacagtgattatgatatactggtatttgtgaggaaaaattctcgtgtttctgctaaagctgtaatcaaatccctggcggactatataaaactgaaacctttgtatagaggcgccacacaagctacggctatattgcacaaaaaattgcgcaaaccgatgccaatggctaagcactccaatgtgtggtcagtgatcactgaacattgcggaggcatacacgatgtggtttccattgatgttggtgttgtgatgtatgatgatgattacgcatacgtccaagatgaagtattagcatcacactttggactatcagatccagctatcattcctactgaggtcattttgccgagtccagacaatcagatcttattagaaggtaatcctgtcagtttacccgggcgatgggatattttgttgagtttctacaatgacaagaatgcatctgcagttgataatgtgcgcaatttgatgatggcccccgtggagcattttgacaacgctgccatgtttagctgcaacaagatgtcttacaacaaaacagcttttctgatgattctagatgcatgcgaaagaatcggtcaaagcagcggttttagtaaatggttggaattggaaatgttggttcccaccacttttgatttcattatatttgaaacccaggcgaaggaagctaaggtccacacaatgtgcgctatgtttgctggtagtcgaggggatcacattcctatgttaaatttcgtttattggttgaaaaattggattgacataacttgcttggtccctagtgatttcagcatcaccctgccacatgaagtcacagaagttaggtttgaagtggattcatcacattttgtgcatgggggtggtaaagacaatagtgtgatcaagcaaaacatcaaatacgtatctgaagtattgagcagaacgaattctgtgtatgatgtggtagtcggacccttcttttgcaacgaagttgatttcataccggcgagtcaattcaaaatcaaattatggcccgtaattatcaacccttataagaacattcctttgatcaaacagcctctacgtagtttgatactcaaaacttttagtgtgaccaataatgttgagacgttggattttgcatgtgttcctaaggcttttaatccagtcgacaaaagtttgggttgggcattgtcaccgttgaactttgaatcggacgatgtgactgtaaaagtgattcaagccatgagtaggactagtgatttatttacggtagtatcatttggttcaatgcagtttgccaattataaagagactattgagaacatcttgacaagtgagacggggccttttctattgtgctgcaattactcacatcaggacggttccattcatttcaataatactacatacaatttggatgagttaacatttactagggacctaattgtagtgaaaacttgtaatttctacctacttaaaccgtatgtcaagaaattgatccatcatggtggatgtggtactttgctaactggatatttttgggctgtggaacaaaaaattcacccaatcgcctatgaacaattcgacaatgccaaatattatttagaaaacaaagcgccaatcttgaacatagaggaatgtctaaattcattccagcatgaagtattaaatctctttggtttgaaatccaagtacactgaatataagataccaaatgctgtattgaccaggttggcacttcccaccacagacactattcaagttcgtaaaagcatcaaagtaatgcatggttttgtcactgacatggagattcaaaaaatcagcgtgtccactgactgtgttcttttaagtttacaactgctcttccctgatctggcggatcatgttagtgaagtgtacagatcttggcaacaaattatggatttcactagtgtgtctgatatagtgtgtttggtgttgaccttgcaggtctcagtacatatagttcattcgggtgagtctattattgtcgaaattgacgattctagcaatgacgccgctttaataatttcagaagatttgcgtcattgtgatgctgggcacgtagtcacagccaatgtaccacacgtcagtgagatgattagtcctatggaagtgactgtaccaggcgtagataacctaacatttttgtccaaggtggttcaagttttctctaaatcagattttggagaaacggcattggaaaaagtgttgttggcagtattgagtaaaaatcccactaagttgagtttttcactaattagaaagtcaaaatcttgttatttgccaaaaatcattaaagtatcagcaggagctgttgtggtagacaatctaccgccgttttacacatggcagttgttgaccaacgttggtgtcatacccgcagtcagtctcaaatcgtcagacgggtcaacaactattctatacaccgggtttagctcagtggttgtgcccaccatagcttttcgatacaataattttgagtcccacttagtagttaagggtacccagaaagctaaatcttgggttaaagcatgtatcaaccagactactcttaattactgcaggtcaaaagacatccccgttttcggtgtggcatcagagccagtgtcagaattgtatgtttacaacacctggaatagaaagcaccacttggaaaaagaaagagaggtgattatgcatagtgagaatattagagtcgttccaagtcaattatccatgaaatggttaaggttgctgaaaacattaactaaacacaaggtcataatacttaaaggcaaaccacactttgctgtcgaattgagtaataagcagccatcccgtgaggtcactaaaaaattttatgcatctctagcagcatttgagacgatagcgttggaagatgtggtgctactgaagaatatcactagtgaggaaattgcactactagacgagcgtatgacctttgctgaagacgatgtcggtgcaccacaagtggcatatccgtgggtgttgaacacaacgccattagaaatgggcacgattgaagagatgttcgatcaagtgaatgtagatttggatgattggaaagcccaaattatagcagaagaattccatattccagtgaatgaagtgcatcaaacaatagtggtgcgatgtgaaagaacgggtttgcgggttagtacagcacttgagattcttgcaacaagtgaattttgcaacaatggcatcctcagctttagcaaacattggttacactacaaattgcagccagtgggagcaggccaagatcattttaacgaagctaatgcgtggcacacaactgaacgccaacatcgttcagaaaacaaatttgatgtggtcacagcgagttctggcactagtaggtctttaaacacgaaagtgttattgaacatgttgcacttaacaagtggtatcgcacgtgagagtgaagcagacatgttcgctgaggtgtgcagagatgcgaagctaattgaattttataaaatggaaaatggggagcacagcatcgaattgcaaaaggtagacaatataccagacctaagcagtcaggattattgggatacctccgcagaattgcaggatcacactattattcttccctcttcgaatcaaatcaagatgcgtggacggttggaacctggtgacttgacaaaatgcataaagttggcaatggagcaataccccatttacgctagaccctccataactaaagattacttggcagagtttaactcttttagtaatagacaaggccaagttaagcgttatgcattcaaaaattttgacattgagtcagaacacaagatgttcgttgcgaattattttatagaagatttttctaatctatcatctaggtttcaaactatgccggtcaattttgatttcgaagcatccgtcaattgggtaaaacagcataactacccagaggccgtaataagagatttagagagattgtttgatgaaggttttgaatcaaggccattagcatacgtagaagtgcaccccaaaacggagcagacaaccaagatgaacaaattttcgcgttggtataatgaagttgtgtccagatccatcgttgcgtcagtgtacagtgtagcagctttgttctcaccccctttccttgagctgaaaaaacgattcaaagatgcgttacgtgatggtgtgatttatgcagatggtatgactcctgagcaattaggagcgtatttaaggacgagaaaaccctgtcgcatgtttattgaagatgatttaacacaacaagacggccaaacgagtatggccatcatcgaacttgagttcatcatttatcatgatcttggtcttgatccacacttgtcagaaatgtacaaatcctgccacatgtcatggcgttggaaaggccatggtatatccggacttggtgatgctatgcgtttaactggacaagtgactactgcgcttggcaacgcgataaccaatctcattgtgcacaaccgctttatggttagaaacagaaatcatattgatatgatggcatttctgggtgatgatgtaatattcactagtgaccacgcattgaatgtttccaaccatggcactgaaactaaagacatttataatatggttagcaaagtaactcagagagagttagtaggtggtttcctttccatgatcgtgcacaacgtgggtgggatcatttcagtttgtcctcactttaagagaatgcgccacagatattcagtttgcaattattcattttcaggggcggaaagggaaacaaagatcaagtcacgagcattgtcatattgtttcatgttgggaaatctgaaggaatctaaggatattgcgagttcaattaccactggggtcaacataccagactggtttgattggccacaagctatagaagcgaatgcattgtatgatgactccaatgtatttgcagtgcaaagtcatgtagggagtttatgttccatgttaaagaacttccaacccattgaacatgaatttgctatagtgggaaaaccaaagttcaattga

SEQ ID NO: 1167 - DNA, 14421 bp, Plant associated alphaendornavirus 1
  source 1..14421: mol_type = other DNA
atggcatgcttgttagatataaaggtcctgtctagaatctcgggtggtctgcacccacactcatctgggcgcaggggtcgcaatttgacccctgtgtccaatcaaaaattacacaagaatgattccattcggaaaatgtttcgcggtagcaaacatgtgattaaaacgaattacaacacagaagcaataccggcagtgatgtcatgtcacaaacgagaacacgatcagttcatacaagccggcgctgatatgtgtgtaccagatttgagtcacttggacgagagggcgttcagaaatttctttatgttgtacatggaagatcattgccatatggacatgaccaaagaaaatgcctcagaactttttaagtcagctgacttacaaaacagtgagcccaatttgggcacaagggcgtactggacgaccatgagaccagaggtgatacctgcagtgaaagatgatggaactcgagatccagtggcactcaaattcatgatggacttgatcaaacaaaaatttgggggtagcctgcgatccatgtgcacgatgaacttcaaactaaatcccaatctaaccccgcacatataccgcagatgtggaaagtacgggtacaaggccggggaaatggctagtccacatggtatcaagcagtgtgctcaatgtggcacctgcaactttatttggttgcctcaccatgaagacaagctgagcaatcagcactgtggcatgtgcttcttttcactagatttaaaacacatgaataatgaatggttcatcccgaacattatggttgaggacataaaccaattgcacgtgggagcactgcagaaagacatgtcggaactgatgaaccaactggatggtgcagaggagttctccacacaaaccactaacaagttggttgaacaagatctcaaaaatgtgagagctataatgtccaggagaatgtttagaacaatcaaggtcaataatgggatgacaacccaacaactcaattacttgaaaaaccataacttgtcattccatctggtacagagtagatccaccccgaacccgcatgcaatgctctcagcagaaaggaaaataatttggtactcttttgcggaaaaattggggcatgacagaacattattagatgtcggaactagaaaattaagagacaacagcttagaacaacgatggcgcggaatgggaccaatagtcgactggagagatgccgagcgttactcagccattggcttaccaaataactgctgcactcacaccgtcaacacctgtgactgcctggtgcaaaagcgacctctaatcatagcagttgacagcatctacgacattgccccgggcgacataatacgcttgatgcgaaggtgtgagtctaacaacctgttatattccatgaccacagcagcagtggactttgaggccgtgaggggggacttgtattttgaccagggtcaatggtctcgtgatgctgataaattgcttacggtgttaaagcaagatgatagaccatatgagaataactggcacctaactaagttgtgggccacagctgatgtgatcacagatggtgagtggtctttgcagatcaacacctacaatgtggtgggaaatcatattatgaggagtgctacactaacaaaatctaagctggaaaaaatgaaatataaagaagcggaccaaatcaaagcacacatacgattgaatgttccgatagttcaatgtgatagttatttgaataatcagtttgtgcccgtaatagcatatgaaaatcgaaccattgatgtcaatctgtttaaggctctgtacagcaggaatttaacagccaatttgtcgtttgataaaatggtagagtttgggttggcttatgcccacaccaaatacacaacgccaactagaatggtgtcatatcaacatgtaacggcagacgatgtcaggttgcatgtgttgcttgccactgtgcacagcaggaggaagatgttttgggtgcaagaaaccgaattgatgaatgatcccaagtccgtacatggagtaagcatgacgggaagcagttggacagtagtggttgagtacttgttaaaactggtgcttgaatatggtacaaaacaattgagcagatttggtcagcttgagttagcaagcaaagttcactctaaattgcagccatggttagaggatccattctgggacctgttagatcaactttgggatgccaaccacaaaactggtctgatacagtttgacgtgtcagatattgaaagtttagagtcagtgcagggccaggccgtgtgcaaccaccacaacatgacttgtagccacgccgtaccaggtgagcaggtttgtgcttgctgcggaatagcaagtgtggagaagaatgatttgtgcttttgttgtaacactttcaaatgcgaacacagatgcaatcacaaatgtgtggatccatctgagcacatgagaggaaatgagaaaattaaaatttgttgctgctgcggtatagaatttaacactacacattgtgtgccgtgtgtaattaatccaggaaagcagcctaataggcaagaacccccaaacccaagagtgaaaagaacacaatttaaggtgttccccacagacattctacccacaaatcaaacactggactcaacagaacctccacagttgcatcctaccaaacgaatgagaacccagaggaagtggaaacctagaattgtagccacaccggatccagcggacccaaataacgtgagtgacactgaaatacctgaggattttgtgtttaatcaccaaactaaaagaatcaccctgtatgatggatggttaaaagacatgtatggggacgaacttgggagtgaagcgaaaacagtggcaaatctcaagggcgaaaatggttcaatcaaaacatcccaagcagaatctgttgagttgagtaatgcacccgcaaataacctatccgcagcggagcgaaatgcgccaggactcgaggacgaggagatgactgatgatgacatagctgcaatcaagttgatgtcaatcacttcacatgcatatgtgatggttgtgataaacggactccatgttgctgtgtcccaggggttagtggcacctatggacttcaatcctgagaacagggtgggaatcagtcagctaaggtatcacaaatttggtacatcttgggtagatacagacaattttgtcatagagcaaaccgccgaagtaccgggagacggattgtgtgggttccatgcaattaagtatgtgttaggtgatgaagcgaacttaccagagatgaggcacttaaccggagtaaaggactggtggtctgatgaggagttggcaaattatttaagacacttgggatacaatagtttgctgctgttaccagcccgttcactagtaacagtggtaaacggcatggatgaccggtttgtgtgcattgtccacggaaccatcaaaaagaccaactacatgcactgggagcctgctaatgtactgcaggtagataccaagggcatgatgccatgttggcagggcatgtggaccatcacacaagaaaacaaaatgatcagcagcgtgtcagaatatcaactaattgacgatttggatgagagggagcgcattgatttggccatattgcttatcgagaagcatcgcattaaacacacaaatcataaagggcaacagagcaatatagtggtcaaagttattgaaggtaaaaattatttgaataacaacggagcaaatgtgatgatgccaagagcaggcttgttccacttcgaaatcccggagacttggaagagcgctattgagttgacaaattctccactgcacgggaaaagtgctgatgatctgatgggtcgagtatttgatgtgccaccattgtacaatgccgatgtgccatcagcgttggcaagcttagtggccgaaaactgtgcttacctgaattccatatggttgcaagcaagtggacgattgaaagttgaaaacagtatgtggacaaaaagtgtgcagaggacaaaaatgatcaacacaggcaaacgcaggttcccattgggcagcactaaacttaagacaggtgatttgatcatgttggaactagatacaactaccattcccgtgtacgtgaccgtgcaaaaggacgaagtatgttttacaccaccaatggagatgagtcaatcactggtgacctgcagaatcaatgtgcctaaatccagctacaaatccagattgttacaggtatggtttgcttcaaaagctcaaaccaaccaaacaaagctgctgaagttgttagagaattcacatgtgacatatgggccagccgggagtggcaaaacaacaacaatgatcaaaaatttgaaagcaggtgacgtggtggtggctaggaccaaggtggcggtggagaccattaaggccaaactgcataactctagtgtgagagtgttgacatacgagcaattctgcgtgcagagccccaaagccagtcgcgtatacattgacgaatgcaccatgttcacatggttggatgtagctctgatgtgcactgaggatttactggaattacacatgttcggggatccacaccaagtgggtacaatagacacaggaatattgtcgggcacacgtgacatcagcgccgctggagaatacagcaaaaacatcgaacatttaaacaaaacatacaggtatgggagaacactatgtgaatatttgaatcgagcaggaattgaagtggaaagcgcagccgatcatgacaccgaggtcaaatggtttgtggtcgacgaactaaatgacgaagtgtttcgacaagccgtaacaacgtccaaacctgatgtgattctcacattttataaccgagtgcgagaaaaactctccaagttgaccacaattccagtggtcacggtacactcgtaccagtcaaaagaagcagacagtgtactagtcattcattgcgcagagcaaagagtaacatcaaaaatctggttgaacagacagtattgtttgtctgcaatcacaaggtgcaaaaggcgcgtggtatggatatcagtgggtctaccacactcaacgcagttgcatgacatattaaggggtgacaggcttgagaccacggcaataggtagtcacacaccggacatgatcgtgtcagagatggtgtccaactggcaaaacgtttccaacgacattgacgatggggattgcatagtggtgagtggttcaccacaacccagcacagggggagcagatggccattatcggatgaatggcaaattgacaaacagtgtgatagccgaattggccaagccgtttaaacacaatgttctggccaactggacacacaacacggtcggcgacatggcagtgatggccagagcggaattgccaagcaatgttaaagtagaagtgcatggcagagtaataaccattgattgttttggtacgataaccctggaggtgtccagggacaatgcttactgttcagtgtcttacagcaattttgtattggcgcgaacagcgaaacctgtaatactgaaaggttatcaagacgaagtggttaacaagttgacggaagttatgagcagtggtggtgagaccgattggtttgctcaattgcccatttcattacaaacggaattgttcaccaattatggtaacgagttagctatccacaaagtcgaagaacagtcagaagacagattctatgactgtgccacggacttcccagaagaagccaatgtgttccgcagcccaaaagaaacatttgacgaattttgtgtgttgaaactggctcacatattaatggatgaccacgttaaggagatggtggaaactaccattggtagattgtcagtagggatgacaaaacatgtaaccgaccaaggtgaagtggtgacattgctaagcaaaaataaggtattgttgaaatactgggtggtaaacgcagggttggaactcaaattggtaatggcagagtgtcaacctcatttggttaaaaacctcaccaggttggttaacgcttggaatgatattgtgctcgaggcgttgggtcaatccaacttgtggtacaccctcaagagtgaacacaaacgccacattgccgaaaacttcagacaagttgtgagagtggaaagcatgcagttcatgtctcccacagtgttaaatgaaagattcaagcagttaattgcagaagaggggattgaagggatggaagcgatgaattccgaatcagtggaacagttattggttaacataagggctcatccagccagttaccctgaagcggtagagctgacaaacatgcacaattcacacaacagtttgtgtttgtgtggggaccaccaggcttggtggaacaatgctgaacgagagcctgaatttatgtatgatgtggtttggccaagtagcagatcaaccacgctaattaggctgttggcagagaatattcagttgtatgagacttgcggggcaccatgtttcataacaatctgccagaccatgataggactggaaacattcggtgggtgctcgctgtgttgcggtatagcgttcattgccgatggagttgtatttttaaaattgagcccacggaaaaccattgtcgacaagcgaatgttattgattagacaaaatcacttgcaaaatgaagcttgcttagttttgtctgccttggaaataacagactgccaaatatttaattatgttgatgcagtgatgcctgcaggtctagccgagcagtggttgcatgacatcatccgactgccaggttatgagctaggaatgttgctggaacgaattagcatagttccagctgcgatgattgcaaaattaaaacacccagtatctaagcgtctgtgcatgcaatctgacaatgacaataaggaatatttgagtgaaattaagcaccagttaagacctgaatggagcttgaccagtgtgaataaaatatcaggacacgtgagcgctaggtatgggttggtgtcaatagaaaaagaaaactttatggcatattgttggtggaacgattctaaattatatgttacctctccgcatgttggaatgcatccagaaaataccatagtgttgcaactgcacgagttggttgccaagctgctgagtcatcgaatcaataggtggcagtggagaattgcaatgcgctgtaagttatcaagaaacacacaaccgataggatttggatctgacgagggggctaaatcactaaatttaccgttgtcgtatcacagggccaacaaaaccgcagtgttcgagcactttaggcagcgagtggaaagcgaaaaattgtcctccatgatcaagtctcaccatattgtgtttgtgcattctaaacagttagaacgttatggacatctgctgcgccatgagtgcgccaacttaccagtggaagtgcaatcatatgatttaatggagcgtggattcgaccaattggtggaaacaattggggtcaaatatgtgtacaacggtttggactatcatggtcgaatgacagtggcaacagtgtatccttacttgagcatgtcaacttccagttggggtgcatattgccaccctttgatagaaagaaatgtaacgaggtacatgagaaatgtgttggattgtaatccaattttggcgaagatgaatatggttttctccaaagcagatttggggcctaaagataaagtgagcagtgagtactacgaagacatggcagcatccattacacaccagatgacaagtaaagtgggaccttggttcactgaggaagaatgtaaccctcccgcacgctcgacccacctgtatttaggtttgcatatgttggcttccagccccacagaattggtaacaataattgccaatcaaaaaactaatgtggccattgtgttatgtccactactattcaacagcaacaacatgttgttcaagatggtgtcggagacagaatatacgtatgaagtggcatacgatggatcacctgacacaattactgtcaacaaaaaatcgctggacatgatgttaaacggggcgatgcaaacagtgggaaacaaggttctgatgagtcatagcacgtctataatattaggacacgctgtgtgtagattgatattgtgtgactcaaacacacccgcgccaaactactgctgcccacaaatgcaatatgccgtgtctaggaaagtcgtgtttactatgccaagaatcaatgacattaggcgcgcgctgtccgaatgcaaactcgtggaaacgaagaaagtggagattgacagcaaattctaccgtgccttaagtttgcgaatgcttcgaccaaacaccagttttactgatttgctagcttacgcccgaacctatattcatgcagttacttacagcaacgctgcagaaatcagcattaactccagatatgataccgacatgatggaagcctgcctgtgtgtgttttacgagagcacaagggctaacgaaagtatggaaatgataacggagttgctcaccaacagttacagacctgccacaaattggaacaatgtgaagacatccgtggtcaatctgatgcgcacgcagttgggtagcttgcttagccccctgcgtcctgaaacaaaagtggacgaactgctagaattgattgcgttgttgctagacagatccgagattgccgccattaagcagttaaaggtattgaccattcacaaaatcaagcgtccgagtgaacaaaaaagaatcatcaaaagaaccgacaacaccctggtccaagctaatttgaccgagattctcaaaaatgccggtgacatgttcaccaattccatcaacttagtggccgcaggaacaaacaggtggtggagattaagtcgtgaagggtttcacgatagcacactcaaaacctctgtaaaaacagaaagtgacataagtacagcttgtaggtttctagaaacgtgcgaagggctgcctttgcgacaagcagttgcaagtttgttaaacgctaatgtgttgcgaggagatcttacgagcattgaaagggtagtaaagcaggtgttacaagatgtggccgaccctgtgtccttaaaccctgttagaaaagcccacactcagttggttgaagatctaggtatgcccgattctctaaagctcatgcaaccagatgtcagtcaggatgtggtggtatcgatggaggaaatgaaaagacgagtcgtcaaactcaagtggatgtacccaacacagtcaatgaagctggtaggcaaaaccattgtgtttagctccataggatctatgggtgacgtggaaccatttttgtccatagcagtgtggctgcgcgaaatgggcgcacactgcaaacttttggtgccggagaattttgtaaagcatgtaaccttggcaggatttgatgctttgggcttgccagtagactccgagaaaataatcaaaaactgtattgacttcgaaaaaactggaaacaatttattacagaaggtcaatgtgctcatggaattgttcaaaatgacaagtgctgtattcagtgtagacactgaaaggtatttgaatttcatcaagggagctgatttgttgcttgaaacaccgttcacgcacatcgggtcacagctggcgcaaaagatgaatgtaccctttatgttgtgtgcagcatacccctgggagtatagtaatggttacaacgtaaaaggtgaaaaacaaggactcctggactttatatctggggcactcacttatgccccttttattcaagagttaactgattggcgaaaattacacctgggattggaaaccacagcaggaacattggtgtccgcaggagggacaccaatgttgtaccttcacccaaaagaaacaacaaactggaaaattagtgttaaatcgaatgagataggatattgcgaaaaacctctgctggcactgtctcaacttgaattggagacactcagttgggttcagactaaacccacggcagcggtgtgctttggttcaatggtgatagaggattaccaatccctgttgaacttggtgatgcatagaatccctcctggcattaagcaagtgattgtggtgggttacaaaggccttccatttaaattggggcacaacaaagctgcagaaatcaagtttattgagttcattaactaccatgcattgttcagtgtgacttcaatggtagtaacgcacggaggtagtgggacagtgcacaacgcattgcgacatgcaaattgtgtgttggtcaacccattttttggtgatcagcatgcatggtctgagatgctgcggaagaacgacgccggttggggaattcatgactcgaatttaaatcttaaagatggacattggatatccaatgaacaatttctgaggaaaaagaaagctgcgaggaaaatagcagaagaaataaaccaatctagtccaatggccaacgtggtgtccaacatttgtaacatactggaaattgcggaaacgaacacagctaacatgattgaaaacagatactggcatggtgccatattgccaatatataatcatgaaaaaatcacaactttaaaactcgtgtctcggaattggcgggagttggcagaagccgattcgttagcagaagagttgatggcaaattgggcatcgcaggaacagtccaaatttttaattaaccagaatacaaatcttgatacctcaaatcacagtagtgggttcagcagcacggaaggcagcggcaaatcagatgacattgtggatggagaaaataaccatttaaacatcactactacaagctgggatgacgaagcacaccagagtggatcaaatgaaacaaaatcatcggcagtggcaattgaggtgaagacacgcgagaaagtgaccgatgatagtgtgaacccaatcaaaaagaggcgcggattcacgggaaaacttgtgcccaatcccgtgttgaaaccaccgcagccaagtaggaatgaaccaattacaacccatcccagcgtggatctgaaggcggattgtttgtgcgagcatgcagcagatgaaagtcacatcgaccacttgtggagcttttcagacgtgggatctaagctcaatatagcagtgccatctacacgaatgagcatacaccgattaatgtctgcaaaggaggtgagaacagtgttagacccacaaaacgacggagagtgcgtgttcgactgcttaaaagccttgttgcgggcacaccacgtgcctgatgttgtagcggaaccccagattgttgaaatccggcgaatgttttgtgctggaatcatgcccaattttaacgaggtaatcggaatgatgactttgttgggtctaagtgtggtgcttagcaatagcgtaacaaatgtggtcatatctcatgagtgtggtcagccatgccaattcaagttgtccattacatacaacgctggtataggacactgtaaattgatagaggtgcaagacgtggagttagggcccgtaatcacaactaagacaatgaggttcacatcacttaaaaaacaaatccaacaatctcttggaatcattgtgtccgattaccaagtgtataagacggatctagtgtgtaaacaaactcgaaaccaaacattgttatatgagtcgctccacgtagatatagacaacactagggccagaatgaagttggataagcttgtgtttacaatgaggaggcatgtacagagatgctaccatgtcagcttgtgtacagatggagaaatttattacacattatctaacatccaggtcaacactggccagatggtgttgattcagtgctcagatacttatgtggctagtttagccgttcaggttggtaatggtttagcattgataccactggcgcccccaaaaaacatgagggcaacaggaacggtcgtggtgaccgaaataaaattcggcgggcccatacaacctagatccgtgaccaccctaatcagattgaatgatgtagatgtccacacctacaccaatctcaacgtgataacaagggattttgtgatgaccagaaccaatttagtgggttgcaacactgttgcaaacgaatctgctacgaaattattaatctatgatcatgatggtagggcacatcacaattatgatgaaagaaatatattgatgagatttcaaccaaccaacattgtgggagttggtttcgattacacaggggacatgcatcatgctttgacttgtagagacaccaaatggagattgtctgtggtgaacggttgtccaacaatcacaatggagttttatgacacacataaaacattgggcacccaaacattgcttcatgcgattggattgtcacctgttaaggtgtctaatcagctcactgtgccatatagcagtgtcacaagagagagaatgtcgttgctaaaccacattgcagataacttaggattggcagagggattgtgcacagccagggtggatggtaaatacagtcagtgggtgcccataacccaagatgtgctgaaagagtttttggtggatggagacgccttatcacatttattgggcgaacgatatgacagatttgatattcgtctgcgaaccacgcagctaacgcacgtgggagaagaagtgaacccgacgtacgtaacctgtgtggtctggtcaaaaaacacactgggtttttcgaaggcctgcctaaactttgattaccgactcagggtggtcgtaggaggagacgacttggaagagagggtgttgtggaaactacctacccattttcaggccagcaaacattccaggtggtgggaccaaatcacagacatgcctgaaagcaactttaccagggaaaaatgggaaaatgccttgaccacagaagcattaagtgatgttttttccagccttcaaatgggagaggaaaggcaaccacaagtggacggcaatgagacgtttggagatagtttctttgtaccaagcacggagtggcatgtgaccccacaagaatggaaatatagtgttgagattcccacttgtgatgacatctgtttatgggaagacatagatttgtctgactggaacgaaaaatttgccccgatcaatgaggccacagtgaccagcagagtgccgcctactgcattaacaactagcaccaaatctactctagtggaatatcccaagtatgctagaccagtactaacaaagtgtgcaaatcaagaattcaacgccgctacagggaggttgtgtaaagtggtgaagtatcgaaaatataattaccaaatggactttgagtggaaccaatttgtggcaacatactttgacaaggccaaattgcatctgctcaacctttttcaagtggaccaattgacatttaatgataataaagtactggactggctgagtcaacgccctgacggcaacaagatagctgcagaattggaagggattctcagctccggcatggaagttaacccgatcaacaacatcaacgtgcacctcaagttggagtctttgctgaaagaagaacctgccaaatctatcaagcaggtcaaagcacggccattgatgtggcagtgtaaggggtactgtgcagtcttctctcactgcttcaaagaggttaaacaacgactcaaacaattacttaagcacaacatagtgtacactgacgggctgagggcggatgagctggcagcccgcgtcagggccgcaggtgatttcaaatatatatttgagaatgatttggcacagcaagacaagcaaaccgacatggaaataatagaatttgagatgtatttgtacaagaaacttggtatgaacccaggaatggtgaacttgtggaaaaattgccaccgacattggaagtacaaatcaaggacggtcatgggagtgagagatgctatgagactgactggtcaggctacaacagcattgggtaatgtaataacaaacatgcttgtgcacagacgaataacccagcagttgcaagattctcttcgattgtttttgttactaggtgacgacggactaatgttgcttgattcttggattaatgttgatcatctgaacacggaacttaaacatcatcacaacatgatgtgcaaaccttacattagcaccaaagtgggcactttttgttgcatgttactgacaaaaaatcatttggggattagtacactaggtccagattttattagaatgaaacgaaggttcgaagtgacaaatggagttagtgagccgaacgacgtcaacatgcaagctcgtgccatgagctatgctatgatgctaggtcgcacacccgaagtggcagcgttaataaagcgtaaagggtggaaaatagaaccaatgcgttggtatgatatggactctatagtgtccgcttgtgcttccaagtataacgtgtcagtggatagtgtttgggacaattatcatgaactgattgatcttatgggacaacaacatgtgtatcagcacaattttttgcattgggtagaaaaactataa

SEQ ID NO: 1168 - DNA, 14835 bp, Pterostylis alphaendornavirus
  source 1..14835: mol_type = other DNA
atggcatccacattgcacaccaccgcaatcgttccccatctcatgggcgcctcacggcgcccttcttactctcaccatgggacatcgcggtcagtccacatggtgagtagaaaagacgcagtcgctaaacaaggaataagtttaagaaaagcatttaggcaagctaagaacaagtttcaagtgacaaatcaaatgagcgtcgtggccgcaacaatagcttgccgaagtgatgagcacatggagatgattgcgtggggacctgaagatgcgtcccctgatttggcgcatatgacttatgacacgatgcgcaatttttatttgctttatagagacaaaaaatgttgctttgatgtcaaagaggatgagatcgacttgttgtgtcacaaaacaagattgcaggtggaggatagagcgtggaattatagcaccagacactattacaaacataagcacgcagacctcataccaccagatgttgttgagtatgggcaaccagttaatgcgttaaaattgatgacaaagatattggcaaagtacggcggatcaatacaatctatgttggagcgtagtttggctatatcacctaacagaaccccacacataagcaagtgtggtaacacttatgaagccagatgcatggaatacaccaaaccgaaaggaatatttcagtgtagccattgcaaattgttgaattatgtatggctggaagatatgcagtatggtatttatgggcagcattgtggttgctgcttttatgaattggatttgagggaagtcaacccacacggtgaacaaacgaccatgccaacgatcgttgacataactcaaatacaagtaggggctatggagttaagtatggctgaagcgtgcaaccaattagacaagcaagctgctatggcaccggaagtgcttaacatgctagctcaagaggattacaggaatcttcgaactgtagtttctcgttccaacagacaaactttgagagttccaaacggaatgtcacaaacccaattaaaccatttggtcaacaacgcatatggcttcgtgttagtggccggcattcagacgcctaacccgcatgcaatgttggcagcggaacgtttaatttgtgaaaacataatttatgaccaccgtggatccaatcaaacatgcacaatgttgggtcaaagaagaaccatagaagaaaatgtcattaaaaacaagaggtacctggcaccagtcaaaaactggagagattatgagagattttgcgacaaacatctcaacccaggtgactgttgccacgagttatcacaatgcgattgtgacaagaaagttgatacaatgctggtcgccatcgacaatatttgggaatgggaaccagaaggggttatgaaatacttggagcgaaacaatgtacaaactttgatgtttacaaccccttttaatcgcgtgagttttgacaaaacaaaaggcgaattggaatatgaccaagggcactggtgcaaagttggtgacaagttgatcgtggctatcgccggagacgataaaccttatgttaatgattggcacttgtgtgacatgtggcaaaacgaaaccatattatcaaatggtaaacatgatttggtgatattgacttacaaacggctaggtaaccacacaattcgtgtggccaaactaagtaattgcgggttaaaagaccttggatcccaatttttaatgcggactatgtcagagaatcttgaaattgagttgccgacatttagtcctgattcatggttaagattggcaaatgttccgccaatggtaaacacaacattcactttgaatgtagacatgttcagagctttgtatgcccggaatttgacagctaaaatcagtctggatacaatgatagagtatggactggcttatgcccatgttaaatattctttgcatgacagaacactcagtcactcgttcgttacagcagacgaagtacgcatacatgccatgcttgcaatagttgcatgcagacgaaaacattcatggatgacccaagcattgagtgtttcagatccgaactcgccatggggttttaacatgacaagcatgattatattaaccgctctgaatggtttgtgcaatttgttgttgggtacagggttgaccaaattgacagattgggtcaaaacgcacacaggaatgaatttattgcatcaaaaaatggtaccgttattaaacaaatggctgagccagccgatgtgggacattctggataatttgagttcaatgcccaatgcatcagaagtcaaagttaggcagttaaaacgcaccgtaacaccaatgatcatggtggaaggtgtggtttgcaaccaccaccatcaaatgtgcaaccatgaatacagtgactttgacgtgtgtgtgtgctgtatggttgtcaagaaaagcatcaataaagaaacatgtgagtgttgtgtatcacatagaacttgcgtgcacaaatgcaagcacaaatgtgcttcgccttatttgcatgttggggacaaaccaactcacaaatgccagtgttgtggtgttttcaccaccactgtagaatgtgaatgttgtgtgaccggtaacagaaaatatccagattatcaagggccaccacttaaccatgcagcctcaagtgggctgagtgaaccaaggcgagaagtgaaacctgtcagtcatcaaaaaccggaaggagtgccaagacaaccagtcgcaggaacaaaaacaccaattcacgttgaatcatcacaaaccaaaaagaaagttgaagtaaacatttttgataaacctgacgccgcccagagcaagccaactaccgtggaagaacctacaccagttgtggatgtgccagttgaacaagctagcaccaaagacacatccaacgcttacacaacaccacctgtggacacgactgcgcagttggtaaacgggttagccataagaactaatgttgaatatgcaaaaattgtagaattgggaccaataatggcatgggaaagcaatttaatatcaatgtgggatccatacccaactggagagttaggagtgagtgaacttaagtattatgtgtgtggagagtcatttataaatacagactatctaaaaattgtgaagaacattgatgttccaggggatggtctatgtgggttccattgtttgcaaaaatctttgggggacatggtaaacatagatgacctaagagtgctaacaaatagaaatgactggtggtcaaatgatgaattgtcaagctatttgacacatctaggaaaaaatcatgtgatagtgttgccgttcaaatctatggtggtcagaaatgatcccgacagcaacaattatttgtgtatcatgcacatgagtgtgttggaaaaagattataagcactggaatttgtgccatttggttcaaattggtccgcaggatagtgagccagttttcaatggttggtacaatgataaatatagaaggaaaatggccaaatcgattggaaaatcgtttgtgaaattgttggcaaacaccatgccagacgaaaaattggaactggaaattaacgtggtcgataaaatattaattagcaaaactcacgcaggaagaactgtgttcaacttcaaagttgttaaatctggaaacaattattatgtgacgaacaatgcagaatgcagcaccaactggaaagagttaaacatgagttttaaagttccaccacacttgacagatcaggtttcaaaactagctgaatgtcagttgagtgcactgaattgcgatgagttgaacatggtgtttgatttgcctgctttaatgccagaaaattgcactagtcaactcaaaggtctagcggcagatatagttaaaaaatttttaactatcaaatatcaggcaatgggtttaatgcaattggacgttcaatcgtggaatagagagttaacaacgatgagcaaatactctcaagacagtgttaaactaaataggtggaacagaaaactgaaaaccggtgacatggttctgattaaaacgcaaaatgcactgcacatgctgccagttattataactccagatgggtgctgcataatgccaatgtactttccaaatcttaaaaatgccatgcacattgaggtgtggacgccaaaaatgagcatcaacagtttgttaaaattgttaggtgcagttgtggcagcaaacgtggatgcaagccacaccattaaattgttgcagggggcaactggatattcagggccaggtggttgtgggaaaacccagcaattgttggcaaaatgtgagccaggagattgtttagttgcgcgcacaaggagtgcaatcgacaacattcgtgcgagattaaatcgtaatgacgtttattgcgccacgtatgaacatttgtgtgtgtttgacgtggatccaaagaggctattgattgatgaagcaaccatgttttcatggttggatttacatttgattattggtaaaaacacgcaaaaattgttaatggcaggagacacttttcaaattggggttgttgacatgttttgggccggtggcactaggcacacgcagagcgtgatggcacattgtaaaaacactgttgtgatgaacacaacgtaccggtatggtgcgacactgtgtagcttaatttcccccatggtgggcgaaattgcaagtaaaagttcagaagacacacatgttgttctgttggactgggaagtgtacgacgcagagaggttaaatcgaacatacaaagagcatggtccaggaacaattataacgttttacaattcagcgctagaaaaattaaaaagggacatgccgtcagccgaatcaagtacagtacacacattccaatctcaagaacgagatgtcatctatgtgctgcagtggaacccaacaacgtcaattggaaacatttggttggacagaaattactgcatatcagcagcaaccagagccaggaaaaagttaatatggataagtgtatcattgggcacggggaagactcttgcacaacggatgacaggtgtggcagagactatgcaaggaggaggacaacctgcagatagagaaggaatgacctggaaattttgccgctggttaacaaatcagaagaaatttgaagaggacattcttgcagaagaacttgaagagttttttgattgtgatagtgaagagcatgagcatactgacgatgagagtgttaatgttgcgcatgttcagatagaaccaaaactgacagtggaagatgtggatttgttaactcacattggaactaagaaaataacattaaatgatgaaattatgatattgcagcctagaacaaggcaggaaagaatagataaatttaaaaccacaattgcaaaaaattttggattgcgtggggaaattttgaatgaggaagccacaaagtacaaaattagtgacatgacaggatgggtgtttagtgccacagtggagctacacaaaggtggccacatgggaagcatgaaattgataaggggtgctgctaaatacaacgacatgtacgttaattcaattttgcaagacaaccgtgattatttggtggcttgcaagcatgagcctgttggcgagtggatttccaagtacagtgcagtgttgcaacagctgctaattgcacaactaccagcacacattggcacgttggtgattagagaattggaaaaaagaaaagagttgcagtcagacagtgaatcaatagcacaaacaagtgaacatgatgttgacattaccactaacactgaacaaacttcagtggcgcccaaagataaatggctgcgaaaaccaaccaaagactcgagtgggccaatgacaggtgatgaaaatttgagcgggaaagttgaaaataaattgtctgatttgttaacaaccacaaattcacaaatgaaaattgtcagttttgccggaatcacacaggagtacgtaattagtgtggcaatgcaaagtggcatagatatcaacacatcttgcagtaaacaaactaacgggtgcattataagcataaactcaggtggagtgttaatgtggcgtgttagtctaactgacaatgggcacacagtggagtcacaagtcgtgtcttgtatacccgaatggtgggaaaccgtgcaaactgaagttatggcaattaattgtgaagcagttaaagtatatcaagtgtcaccaaacctgttgtggaaagcttgtgacccaatcacagcaaaatattggtcaaatgtgttgaaagaaaattatcaagatgatgagttggatgaaccgaaaagcttcacacctttgattggaacatcaaaaattaaaaaatcgaagcaaaaaccacaatgggaaattaaaaagaatctaaaaaaatttttgagacctgatgtgatagctggtgtgaacgctatgaccagttcacgagagcatttttgttgtgggacggctggtctcgctgacgctgaagagttacatgacaacgcagttgtgcgggcggcattaataaggccgacagtggactcagagcaatgcgtgagagccattgcagagtggtgctttttcacgcaagctggaggcacaacggtaaacttcaaagcccacaacaaagtggtgactgtagtttggaagattcagtgcacattgtgcgggcaattggagttttacatagggaaaactaaattgctggtaatttcaggaagaccagaaatgcgcaggctaagaactgtggaactgttttcgaagagaaatgatgccatagtgtctgaaatattgagcactgtgagaatggaggaaatcatagaattgtggaatttacccaaaccttcagggttttgttcaacagttttgataatccccaatgtgttactgcaagattggtatcaaatgggcatgatagtggaacgatgcgtgtttgccgcactcaggaggttgaagggaagagtaaaacaaattggtgtaatatatcaagaaaaatattacataaagcaaaatgaacagcatatcgaaaagattgtaaaaagactggagatttacgggaaatgtaaatatgagggcaagttaaaaggtgccagaccgatggaaaactgtatgtttactttttctgtaaacggtgtcaccgttcaagcagcgttgctaaatgacaaactatggataagtgggtcaaatttgacaagatttccatcatcaaccttggtgactgcaaaagatcttctattgaagtgtgtagcagccgaaggggaaaggtggcaatggtggttagggtattgcattaacaaactaatacccgaaacaaaatacattggagcaagaacggggttcaatttgccatttgaataccacatgaccaacaaaacagagatgttcaaattactgcaagaaaagaatgatgaggtgatcaaaagaagtgccatcaaataccatcacattgtgtttgttagtggtgaacagtaccaacatttcagacctgaaatagaagaagattgttacaatatgcccgtagaaaaacatggtatagatatgtatgaaaaagggtttgacagcttggctgagcaaattatggcacgatttgtgtacaatggactgcccgtggggtccaaaataacactaataaccgaattcccaggagtttcattaatcaactcgtcatggggaatgtggtgcaaaccgcacagctctcacacaagcacgagatacaccgtaaatttaatggactgtgagcatttactgcgcaaaatgcaacaagtttatagtagcaaacccgacgttgtgcaatccatgactgaagaaacaagaaagtactacaatgacatgttaggttgtgtcaaccaacagattgaacccaagagcaatgaaccatggtttcatagatcaggtgagattgtcaattcaaccaattctgagtatttaatgttagggctagcaacttgcaggtacaacccggaagagatagcagattgtctgaaaacgcacaacatgaatagagcctggcaaatatttcctataccagacagcagcaaccatataaacagacatgtgaaagatggaaaaatttttattacttactcaaattgtgaccatccacttgaaataaacaatgagacagaaacgctgatcaatttgggaaaaccctacaaaatgaaaacagaaacattggtatggcacagaactgcagtagttttgggacacgcactgttgatagtgacacggttgccgagtgagtgtcagccaccactttgtgcgagacctatggtgtatgattacagagataatagtgtagaatttgttgtgccagtagttaacagtcctatagtaaccactgcaacatccaacctggtggacacaaaaaatattaaaattccatttagattgtacaaagcactaagtttgagaatgctgagaccaggtacaagcttggctgatttaacgtcatacgctagaacatacatgcatggcgcatcatttacaatgagtgggaccacatcaaaattgcccaaaactgttgacacagttatgcaggcatgtgcttgtgtatattatgagagcacacggcttaatgagagcttacaatttatgtccacagaatggggttcggggcaaaccgcaggttgggataagaaaggcatttatgactcacttaaaacagttggactaaacattcttgcagatgtactaacattgttgggcaacaatgtgagcacaaatgatttgttgagtttaatcaacaagttgttgacagttcaagctgacagatttaagatacaaacactggaaattcataaactacacaaggttgtcaaggttaacgagattatattgtacagtgacgggtttgacaatcaacccaaagagtatgaccttggtgaagggttttctatgagagaattaaaggccaatttgaacaaactaacacgagggtatcaaatggtcaacgagaatgcaaaccaattaatgagcacaggagtgggctgggcctgtgccccaaaaacagttgaaacaattgtttcaaaaatcaacacaacaaaatatgattgggaaggcttaaattgtgatgatttcataacagccttagacgaacaagtggacagagttgtcggaaaccatccaaaatacgatttggttaaacgcaaattgcaagagcaactaaagtttcctctacatagatgggatgcaaacttgtggcccaagtcaagatttgatggaaacgccatcaaattggccatagaacacaaaaaatcttggatgaaagccagcgacaactctatgtggaggttgaatggtctgctgaaagagatgaaacacgattatgcagcggttagagattggtgtggagtgagggttgtgctgagtacgattggtaccagaggagatgtggcacctatggtcggtgttggtcaaataatttcagcactaggaggacacatctcaatcgtgtgccctgccgaccaggtaaatcttgttggaaatagttgggacgtgataccgctgaatatagacacgacaaaaatggtagagttattaaacgatctattgaattcgaccaccactctaatgtccaaactgtctttggccacggagctgcaaacaatgttgtcaacaatgttgtccacatgtgacgaaaaattgtcttccgcaataagagatagtgatttagtacttgaaagtccattcagcatgatttgtgcaaacttggcaaacaaaatgaacagaccatttctgtactgctcatcatttccgtggcaaaccatgcgggttaacaagaaaaattttgtgacaacttggatatcgaacataaccaactacattgtagatagcgggtacaaaaaattgttaaacagttggttgagcagcttctgcgattgccccactgaaggtgtgattgcaggaggccaactattgaatttagaactaaatttggtgtcaaatgatatcaatcggccctcaaacgtcattagtgcaatgtacacaccgatgtggaacgcagagttaacagatgatgattatgcgtgcatgtcgtttttgctttgtgagctgtcaattgtggtaacatatggttcaatgccagagtcaagagtcacagagaggttggagcaactgacaaatcagattggggatgccactgtgcacatacttgtcttaagcagggagagatgtatgattccgcggcacactaagaatgtgaaatttaagcaatgccaaaaacaagtgaacctattaatggtatgtcaatgcaccgatttgttaatttgccatgggggtattggtactttaatgtctggtatatatgggggttgcaagttagtgattgacccaattatgctggaccaattgttttgggcagactggtttgcaaacatggggctggctaagttgtggaaagaaggagagacgcttgacataggaagttttataaacacaacacacaccagcaattatacaaatctccatcatcgcatgagaatgcaacatggagtttcgtttgtagcaactggctttaaactgtttttggcatcagggaaggtgaattgcaaagccagtgactgtgtcagtttggaaatgtacgcgttaaaccaggagaccatcgggaaccacagcagaaaaacaaattgggcggaaatagcagaaatgtccgtgcaatttgaaaatgacgaaactaccaattttgagacaagatttaaaacttcaatatcgagagacttcacgatagaggaaaaacgaaccttcatggaccaggtgcgcatgtacagggctcaaggtgatagcattggaaagccattttgtaaacaaaccattggtgacaatgagcaacccaaaaatgtttcccacagaatttcaagtcaacatgggctgcatttaccaacagtggggagacaagagaatgaatcagttgcaggcaacgaatcaccagaagtaatccaaaaagaaaccagtgacaacattgacgagactaaccagcaaactgacgatgtgcatgaagcgacaacgcaaagcacaacaaaaacagcagaaaccaataatgcatctgatgcaaatcaaccagagccggaatttagtgataaagttgaaccaaacaaccttgaaaaggagtttccaacggctgagaagcctgctgctgaaccaaccgctgacaaatctgagcaaagcgaacaaacaactagagcaagtttgggacttttggagggagctgccagtgaagatgaattgttaaatttgatggaggcaatgatgtatgaagacgtgttgaacgcagacagcaacaattgtgcactgcttgatctaatattagaaggagtcctgtcaggaggtgtatgggcctcagaaaaacaaataatcaacgacatgattagctacgtggacaacaaattgcaatccgaggccgtgttgagaagattgaacaattcagcaaagttggtcaatgcaccattgtctcttgggtttggtaaagtaacggaactgggattgccatggtatgtatgcctcacagcgaatgttgaagttggagacttggtgttcagttcaaaaaacacaggagattgtgtgttcgaatgcatggaaaagtttgcccagaaaaacaacctggtttggcaatcaaacgttgtgagccacatgttgggtttgaacagctggccaacggttcaaacagtcatttgcatagttgcaattttgggttgggatatagcgattaaaatggacgatctgcaaatggtggtgtcaaaattggatgatgatttaatttggggaacgccagaattagcgctgaacataactttcaacaacaacattgggcattgtgaactgagaaaatgtgtttcgtgcaaacatcaaagactctttgtgggcagcagaatgccattggacgagacaacaatgacaaacgttagaagcaacttgtggaccattatagagtctcaatttggcaaatcagaagatgagtccatcacgttaaagccagactattttaatgaattgaacggggacaagttgattcaccattttcaaattttcatgcaaggcagagatcttgaagactggttggcacaattggagttcaaacaactaagagtgcagtcattgaaaaatttgggaacattggtttacgaacggttgcatgaacatggaggtttcttgtgggccatggacgtgcgaaatgcgagggacaacggaacagtatgtttggtgtggaccaggggtggatggagacctttttgtgtgttacaatataacttcaaaacgatcttgtttccaatgggccacaattctgtggatctgaatgaaaatgtggttctgcatacctcagttagatggattgaatttgctagtgttaaaagggaaagaaaaatagtgatcaaacctccaacaggtaaaactatcacagcactaaacgtcgcaactaaatatggtatgcttaaaaaatcaaccattggattatgtgactcagtcgcggacacaaccaaagacatgttggcaatataccaatatgacaaccgagcacaccacaagtatgatgaactaaacattattaaagctttcaaaattgaaaatctgttgccaataggttggactatgacctctgaattgtaccaagaattgacggttagggacaaaagttaccgtgtggtgatagacaatggtagcgttaaaatattgttggagtatcaatcggtccagtgcatgtcatgtatggagttgtggtggcacaagaaaaatgttccaaccataaaaacgagcaatagcatatcagccagcaagcaacaattgttgcgcgcatttcctgatttaaattcgatgcttaaaaatttttatggttcagaacacgggtacattaaatgtgcacccgaagcaatggacgaccagtggcatgaagtaacaaagcaaaaactgcaggagtggtttgacgacgattacgacaaagtcatggccaacctggggatcactgacaattgcacaattaggattagagcaataaaatgtgatacagggacggtactcacatgggacacagctatgagttacacgtgggtccccttgggcaataggaaaggcatggtgagagccattcaatgtgtgttagagtttagagtacaacaagtggcaggtgagcttcaatctgaaaacgttaactggtaccacaatgagttgtccgatgaatccgttattagccaatggtgggagcaaaagaagaagcaaacaaatgaatttgacatggagaaatttaaacacacaattaatacccaagccatgggacaaggttacaatgattacaacgaaacgttgacggcgtcaaccatgcctggcagtattgtgcatgacgttgcaacgcaagaattgcaattaatgcattatgttccggccgttggcgggccaattacctgggactttaatgacatacatgaagataatatcaccagtgacatcgtggacatgtgggaagatttggacttttcagattggaatgaaaaatatgctcctgcgaacaatgtcataattaagagcaagctaccagctactcgactcatgctatctcagaaaactagtttgacagaatatccaatgtattcaagaccagttatgacaaaagcggcaaaccaagagtttaatgctgtcacaggcagattgtgcagagtgcaggaatataggacaaaaaactatgacatgcagctggaaatggactgctttctatcaacttacggaaacaaagacgcagtctctcaaatacaagattttcaaaacaatttaatagggtttgacgaacaggcagtgttagactggattaaatcaaggcctgataataatgcgatagcagaagaaactgagcgcatcttgatggaaggaatgcacgttaatccaattaacatggtgaatgtacacttaaaattggaatccctgcttaaagaagagccagccacaaacttgaaacaggtgaaacctagagcactagtttggcaatgcaaagggtactgtgcaatgttttctcacgcgtttaaacaaatcaaaaacagattgaagatggtattaaacgaaaaagtggtctacgctgatggactgcaggcagatgaggtgtcaaacagactgagactagtggtaggtgatttgtgggtgttagaaaatgatctggcacaacaagatagacagacagatcacgaaatactgaattttgagatggagttgtacttgaaattgggcatgctgcctctgatggttagaatatggagaaatgtgcacaacaactggagatacaaaagcaaaacagtgagtggcatgcgcgacggaatgagattaactggccaggcaacgactgcgttgggaaatgtcatcaccaacttgttagtgcaccgacagttagtacaaaaattaggaaatgcagtcaaattgtttcttgtgttgggtgacgacggaattatgttaacgtcagttaagccagatactgacagactacgtcaatattgtaaacattatcacaacatgttgtgtaaaccaaacgtaacgaaaaatcttggaactttttgttgcatgatggtgtacaaactgcacactggaaattgggaagcaggaccaaacgtggtgcggttaaaaagaaggttcgaggtgactaacggctgtagcgaggcaacattggctaaccatcaagccagatgcatgtcatattgcatgatgcttggcaacattccgccagtagcacaaataattaacagcaatggctggcctattgaaccacatgagtggtattcaacggctgagtgttgggctgctgcggaaagattgaacgggttggaatggggtgatgcggaagcacacataaacaaattaatagatatgatggccaattttaatccatttgacagaaaaattctacattggactgaacgctgggagtaa

SEQ ID NO: 1169 - DNA, 15036 bp, Pumpkin alphaendornavirus
  source 1..15036: mol_type = other DNA
atggcttcatcccccattacgtgtagtaatcctagtactctgtataccgtttcgagggagagacctcctttttggaggtctctccttaagaaactaaaactaaagatgaaatataaagattataaacccattaaaaaggtagtaaaaccttctgtagtaaagagagaattttctaacaaactacagggatggattaaattacctagaaattgtagaatgagtttaaacaagaatccgtttcaaaccagttttagaaaagtgtttaaagagaataagtcattaatatttgataaaaataaaattaaattagtaccagcaatccgtggagtcaaaaaatttagagatacttgtggatcagtggcagccaacatacgctttgaagaccctcttgctggtgtggttaacttcgaagctatgcacccattagatatagctagaatctattacaacgtgataagtggaggatgtgaaatatggaagccaccacataaaccaatttccgactatttaaaccataccaaacatgaaggaatagatgacgaagaagatgaagaagaaatgttcttagacagcaataacctagataataatctaatagtgcgaatcgtgggtcctggacgcggaaattgcacttccgagatgttagaagttttaaacaaacttgtggctaaatttggaggttatgaggcttattacaacgtttatttagaaactcaacatagacatttcggatacctacagaaagaagacaacgggaagtactccttcatcaatgcaaaattcaatccactcaagaagtgctcagtgtgtaagtacatgaaccattatgaggagatgataaggggtctcaggatggtccattacagtttaaaacattacagaccgaaatcgaaggtagtaactgatgagttcttaaccacgtataatgtaggagatgtaatcgaagatgtcccttggcgttgtggatactgtttttcagatttaaatttgcaagtgttcgtgcgagaggataagttacaacaattaattcagattgtcactcagcatttgtttgtgctcatgggagatatcgagcaacttctaaagatgggttatggagacctatatgatgatatggatgtggctagcaaagaaaaattaaaatcagctgatcaagtgatcgttaacgagtatttctaccatttgcaacgcaaaataataccagtggggcacgattttgatgctgcacagagtaagactattacagaagtattgggcggttgtttctttaagccacaaagcaaattaaatagtgtgaaacccgaatttatagccgaactatcaactttaactgaactaattgaaaaatcgtgcgctagcaaacaagttgctagtgtagggcaaatattaccaggcagttcgaaggagaatgtgcaccattggatgcatgattctacttggtacagtccagatccggcagtgttctgttgcagtgaaaaagtgtgcggacacaaacacaattacattgtatacgccggtccaggaatttacaatcgaagtttgtcaaacattttagcattggtggatgaacaacgaactttgcaaatcattacacccattaaaactaatcagaacactttagcggatggaacaggagcatatcagcgtaccaatgagcacttaaatttgtatttagatggaaatcccacgcctttaaaacttaaattagacacatacacaattataaacaactatcaaattattaaattagatgacaaattatattatataatggaaactcagaaattgaaattaacaaagatcatgactgtagtcggacctttctctgacaaagttacttacccacaaaaattaattaaagatgataagggtgttaaattacgcatgtacctaccgaacattgatagttttatgggagatttccgaggcctgaattatgaagagcaggagtttgaattgaacgtgtcattgttcagatatttatgtttgcgtaacacatcaggaaaggtaagtcatgacacactacgctcttacgctgtaggctattcactacgacgatttgtagtacacagcaaagtagtatcaaatcccactattgtgtatcaagacatcgacatacatgtaattctcagcagggtctgtatgatgaagttgaggaattgttatgacataagttatggctactcccaatttgcaaagaagctaggtccattcaggagttggctaggtgatgtggagagtgccatgacctcttcgtttttaggcttaataaacaaattggtaacagatgctttgggattagattggaacgtggttcttaacttcattgatgacatcaggttacaaaccttaattgatggtatttcgtcaaccaacttctgggaaaaattattagctatggcagagaatattaacacagaagatgttaaagtagtggatcttgaccaaggggttgatgtgttccttggaccaaatataggttcttgtgaccatcacaaagaaacctgtgaacatgtaggacacactggaaataatcgctgtctgtgttgtaacatgcctataactgaatttgaattttgtgattgttgtacccctaataagaaagaagcaggtaatttctttgacgtggaagaagccatcaagaatgagtctaaggcagaaactgagttaaagaagacaaatcctgcacgtaaagatgtgttaagtcagttggtcaacgaaatagaaaaattggtgtccacaaaagaagcagctaagaacggtgttgagaaatcaagtcattggaagcagacgtttaaaaatgtggcagaaggaatcaagcagggcgtaagcaatcaaattaacagagtaattgagtcgagtgtcccaccagttgaagataccaagcaaactcaaacggcaaatgctgacgaagttaagcctactaaaactgatgaacctccaaaaaccgaagaaattccaacatcatctgaggggtggaaacgtgtcacaagacgaaaatataatgacccccaagatatgtcagatcggatggtggttgagactctagataagttgcaacctttgactgtcagttcagacagcgctgaggcaatacagattttaggctatgattttgtcagacattgtctaaatccactggagtacgagaatatactgaatgatggcacgaaaactatgtacacaatgcctcatttgcccatgggagaaaccgtatcacagaatagggtatttgaggtaactacaaagatagtgatccccaactctgattccatgacgtgtgcttatgatgcgtataaatacggttacgccacagcaagtttagaagaaatgattgcaataaatgaaggcccaccacctctatccacgacagttcttactgtttatgccaaagccaggagagaaaatttaatcattataggaagtacaggtactttacaaatttcaaggaatagcttgacgtcaaataattaccattgtatttggtttgacgagccagaattaggtggtgtagggcacttcatgcctgcaattatacggcgatcatctggtgatccattttattttgcacacacattacctggtagtctagatgaaagaaatcagctcatgaaattgcattacggaccagggacttcaatgcttacattaccggagtcctttaacggaaaagaaaatctattaatggaactgactttttacaacttacacacttacatgtcaaacaacacctctaccagtttgttaacgatcgagaaaaaagacggtagagtatttttgactaataacaaggattcaaaagtacacgctacaaatagagaaaaaattcatatagagataccatcacacttatgcaagtttgcagacaaattgcaactagcattacaattcaagttaacagccgaggatgtaccggaaatgagacatataagtgatgaactccctaacaattatgaatacgaaattgaagaagaagttaatgagatattgcgcagttttattagagtgtcaaatgttcaatccggtttagatgctaaagacattaaatttccttataaaggaaaattgaccagttggtatggtaggagtaaattcttattgctaggcggagaaacacacaaaatgaagagatatgatgtccttgctttgaagttagatcggaaaatagaactagtgtacgttctgggaactgaagggaatagtgtcattttagacaaaccagtgataactagccaagaagtcacagtatatgagttgaaagaatccattggtagcaagatcaggttgttggtcggcttatgtcaaccccacatatcaattcaaagtctaaagaacaaactaagtgttgcaaagtacataactgggccagcaggctacggtaagtcaaccatgatagcacaacaagcaaaagctggagacttgtgtgtggcaatgacctcaacgtccgtacaagcactaagacaaaaatgcaagaaggatgtgagtgttctaagtatggaaagggccatttacgatcactgtaaaactaatggcaccttgttcatagatgaagcaacaatggccaattggttacacctaggttatttgtgtggcgaggatgcacaaataatgttatacggtgcggacaatcaaataggaaagaaagatatgagtgccactcctggagtaagatataatgtaaccgtaaaggatttcttgaagaaggagaacattatcaaagaatatcattcttataggatcggtgagccaatggttaatttgctacaacctatagaaccaggaatgactagcaaggccgaccacaagaccacctacaacataacaaccttagatgacactgagttcgaaaatattaaaacgatagtaacaagggctaatccagatgtaattataactccttattcacataacagaaataagattaaagcactactggggtcgctagacgtaaaagttgtgacaacgcactcattccaaggtatggaggtgaacacagcacttgttgtattgagggaggacatcaataggtcaagggaattgaacggtaatccggagtatctaaactcagctttgactagagcaaaattccacactgacatagtagtttatggacagtacggcacaataaccgacttgcaccctctgttaaggagagtaggtggcatgccaaatctaaagaaattgatagccccatcaagtagtaaaataccaattaaagataaaggaattataatagatcctgacactggacttccattggaaatcaatataagaaatatgcacaatctaactcaaaatatggttgacaaattaaatgaccttagcatatctaatagtggggtgacattaaattacgagaaattggctgacggaactagagttgtggctaaactcggaaacagcacagttagtactgtaactaacaaaaatggagtgatagatgtacaggcaaacagttttattaaaaataagataatgaataatctggacacgaacataaccattccggttcaaaaagagaaaattgatccgaattacaatgtgatagaattgataaacgtgagttttagacaaactaacaaactaagagaattagcttggatggtagataaaggtgtcggaaaaaccatggagatcactttgggaggagaacggataaaagtcactaaagatagtggttgtccgttattctctggtgcaacatttgagtgtaaagatgaaaaattaaaaatatccaatggatggcagagttggacaaagaggaaattatattttaacaagaacatagaatatgttaggttaagtcctatcataaattggttagaactaagtcatagtgaattgagacaccataagttaaaatcgattggttggttggatgtgatgaagggcgacactgtacatactttatggcaattccaggaaaggttgacacaagtacacttatggttattaaatttcctaacagccaatgcaaaccctaaatgttactttaacaacgtcaagaacgtctccaggtacaataagttggctcggtcactaggattaccccctgtctctcaccatcaatcagtggtatatcatgaaaacttcatagttaatacaaaattcggttggtggcgacaaaataagtacaccttaggtaacggcgatgaaatagtagcagaagttagtagccgtgataatgaagtggtgtggagagtatttgcaatggaatgtttagcagatatgagacacacttaccctaaatgtcagggaatatcagggactgattttgatatacctggattacatgttccactacataagcatatggccaaaaacacagctatccatcaattggtctgtaccaacttagcaaagatcaaagagcaaattcaaccacacactcatgacattgtcagaatggataagagaggaatggctctagttaaaaattacctaaatcagaaatacccaaagatgacactcacaactggaagttatgaattaccaaactccccaatcgaaatcgctttagaacaattaatgatcaacatggtaggtagtcttgttaagaacagtacgaatttagtagcttatgccggttatgtcccattagctgtagctatactagggaagtactacattaagatggccatacctcccttggatgagtatggcaggttttattacgatatgagcaagccacagcttgattctatgttggatcattttaactccaccagaaccaagaaagtcgagtggtacatcggaacggaaactcgattggaaagattattgttaggtactagactttcttgtatgacccctcgaaaaattgatgaagcattaaaccagaccaaaaatgtctatggttggttacccatgttccggaaaagtacagataactataactatgaccacaaaaacagcctgctaagcttcaaacatggtaaattgtctaatcctttgaatcctgaattattcaattgtggattaaatggcaaacctatttttgtcaattccaaagaaaattattatctcgaaatgtcaacactcaccgaaacgttcgatcatagactagtgcaaatcaccaaaagacaaataccaatagagaggtacattgataggaggataggtagttattccgaaatgaataacataataaaaatcaaagtaccatggatagatctagatttgcttagagttatgtctgataggcagatcttaacaatcaaggaattggtgataaacaagaaattattaaggaatattctcttacggttaatgactggcgaggatagtcatgacgatgcattaaactacgctagaactttagaatcaacacaagtgatcaccgacaaagggatagacgatttgagcacgacaaacctggttgtgacattaaatactacgtggtatgccatatacattcacaatgattacttacgcaaattccaaagtttaatatatgcagtcaatagcacgcaaggtcgcccattagctgtaggattactagagcaattaatttctggatttagtaagttgttaggcaaggtgagtatggtggctcaagacatatgcgagaaatacttaacgaaattgaattccgcaattaatctcaccaataagatggcagattgtatcgaggaagcaaagaaaactaactgggcccctgagatgagaaatgtgtacttcaatagattttacttccatgacgatgatttaggtgacataaacgcatggtttaagccaggagatgacgatgatgataactttgatgatgataaaaatttaaagagacaaatgatggaagatgaaaatgactatttcgattcacaagtgggaagtaatattgggcgataccgcagtattttagataagggcaaatccccacccacttccaattatgaagaaccaatgaatgcatctacatctaaaaatcaacaatgttccaaaccgtcaagtgaccagcaagcagatgacgatgaaacagattttgaagatgctttgagttctcatgaagattttaatgaattaatagaaggtacaccaactagcgaacggatcacaaatgaggacgtgacttttgtaatttctagcgataataccctttatctagaacagaaattcgaggatctgatgtgtagaaaaagaattttgcgctacttagaacaattgtgtcaatacaaacaaatgacacaagaagaagtaaagagatcattagacgtactacatgcagaactaaataaaaacaaagaatttaattttgatgattatacagtcttagtaagtgccggactctgtcaacaagatgactttgcatctccaaaatacaatgttacaccattgaataaaattgaaattccaaccatatcaaagtgggaggtcaaacccattaaatatgtgcgaaacaattatcatatgatacccaaagttatatggacttactggcattcaaatgtaaccagtcgtgtaattaagaaatgtatggattcaatacaacatcataatcctgattatgaagtcatagtaattacggataagaatattcaagtttacctaactattgacaacctccctgcatctacatctagaaacctagaagcgaagtccgattggattaggttaaacttattgctgaaatacggtggaatatgggttgatgctagtagtatcggaatatcaagttttgatgattatttgcaagaggcaattgattcgccaacaggagttttacaagtgagtctcaactctagggaagagcctgtgaaagtgtacgagaactggttcgtagtagcaccacctcataatccattgattaaggaatggttacgattgttcgaagaggtactagctagaaatattgtcgatttatcagcattggatgcttatttagaggataagttcattgaatacagtgcagtcaaagtcaagttaggggacagtaagaggttttacctgaaatgttatttgactgaaacgttagtgagcagggaaacaggtttgaaaccagtcgctgtgatagaggatgatcgtagagttgatgtccatcacgacgttaaatgggaagattggaataaaattgctctgatgtactgtctcaagcatgatggaaaaatgaaagttcccatggtgaaaatcatcgatatacatagaagaaacttagaatattacctaaagatgggtggagttgtggagcctgaatcttggctaggacaagccaataataccgcaaatttagttggagtaatcacggatcctgaactaccctccaaaataattgaattgataaactcacattatgtaaagatgtgtgtagataacaaaattctagctcacaaaaagagtagtgtaaacaaaatacacaaacaagtcataaaaattttgggagataaagttgatgtcaagattactgatagtttaagtaagataggcaatgttttatttgagctgggtttactacttatactcaacaaatatgaattgcaagatctattaagtaaaataggggaattagaagatgtcaatcaaatgaacgaaatcagaattgtggatttcgtagaacaaacactcaatatcaaatcaagacacaggtacaagttagtaactagcaatttagttcagataaatcgatccaataagtacccctcaagaccaaaatacgctgaaagaaatggaatcaaaataccattaatcatatggtcctattgggatgacacaacagtcaatcaattccaagttgatatgatagacaattggcattaccacaatcaagagtacagaatcgtgattattaacaagaattctttgtcaagaatgttgagtaaatccacttatgaactaataatgagtcaaactcctcagtacagatctgattgggtacggttatttgtactacaacaaataggaggagtctgggtggatagtactgggatcttccaagattctgttcatccgttagtcttggaaaccttgacacatgaatctggaatgtatcaggtcagcatacaacctagaacaacttcaccacgttattatgaaagttggtttatcatagccaccgaaaataacaaattaatgaaacaatggtttgataatttacatgaaatgaccaaacacgttcatccaagtggaagtaatgcactcagttggttagaacaaaattttggtgagtattacaatgctagtaagcatttgatagttccaaatctcagggtgtatttgagggtgtgcttgatcggggtaataacttgtatgcaattaggaattgagcctttaagcatttgtgaagacgagggtgaagtgagtatgttccacaaattaccaagaaacaagtggctaaacttctggaaacttttgacggaagaaccagctgaacaatgtaaagtgacattcccttttattaaatggataggaatgcaacgtagtattatatttaggaacttcaacccgatgataaagcccaggccaggcagtttactcgatcaacaaatgtacaaaatcgaaatcgattacgatataactaaagcaggtgagatggtcattcctaataaacatagtgaagcattagtggcaaaacccataacaatcagtcaatatagacaggcaagtacgttgataatgtgtataggtagtgggggagacatattgcaattcataactctctatgacatattggaatcgatcggaatgccaccagtcatcattacccatgccgatcatgagaggagtttgggtaataggcgaaaacatttgttaagcgtcaccgctgaatcaataatggagaccgtagatacaaagttgacaaaaatagatttgagttccgatcttaggagtatgcgacaaatgaaaatgatggtcaaagaactagaagaaattacatttaattatgcgcatttttctaagttcataatcattaacagtgccgttccaaatctaaaatgtttttctgaaatagccgagtttaaaatcatagaaatatcaaccttcccagtggattgggtgttcggagacaatactagtgataaaggatacagtgcagggattaggcttaaaagatggatcttcaatatgatgagtgacagaaagaagatacacaattttgagagtcggtactcttattacaactcttgtagtaaattgttgtatccagagggtgataaattcattggacctttgaccctgtggggttataaaagtactgcagattacataacattttcggatagagacatattggtaacgtttggtagttgtgataagacaatctcagtagatcacaaattgagtttgatggacaatttgattgcaatgggacatagtataatttatcatgacccctaccgtttatgctcaattggtactagaatgtgtgatgaagtacacaaaagacaaggtaaaattattgtaattgagtcttttgatttacggaaggtaatcggatcagaattgatcatgcttactcacggtggccacgggaccgtcatggaaggtttaatggctggattcaaattggtgatacatccgataatcgctgatcaatttcaatgggcgaaaaggttaagagatttaaaattggcgtcaatcatatatgatattagtgacagagaacaatgtgaggtagcattgattgaagtgaatagacatatcaagtacagcgaggtattagggtctgtccaaagtattgacacgttgagattcctaaggacaatcaatccaaaggcattgttttatgacccgtcagtaagtctacgagcattgcgaggtgaaggtatactagatcaacaagtaacgtataagaaaggtatttacagaattcgaaacgttgctttctctattaaatacaaccctgtagttgtggataaatgtgtgtatgaaagcaccaaacaccagttgacacccgaaggagaacttgaatttagtatgctcagggtattaagtagcaacaaattaaaagaatctgcagtcaccgagcgggatttgattgatggggtgctcagcatgggattgaatattgtcattatttacaataatggaagtggagttgtacacaacgtatttaattctaagtgtttaacctatcatatagatagaagttgtctaccatggcatgttagtgttccagaggtgatgagctatcaagagggagaagtgatgaacatgttagcaacaccagtacgggagttgccagatgacattataaccgagagagataactggagaagtgatttctctgtgatagaattaactaacccgagggtgttatgtttgaaccaagggaaaaagaaaatagaaaatttgactgcccggttacgcggatttatgttgaacgaactagggtccagggcagaaatacattgttgtagattagaactacgtagacacggatatgttcatgtgggagattatgcagccccagatcagccgttatccgtcggttgtataacgtccgatcaaggttggatgttagttacgtggcaagttaagaataaccaaatgattatatatggagaacaagggatatatacgtactccgtattagtaaatctgcacatacaagtagggatcccgaaggccccaaaagcaatcttgagcaagacaatagagttaatgagcttaaacaagactacaaagcaacacaccattatcaataatttaaatccaaggagcagtcaaatagtaagtagttacatgcaaaaatatcgtttgattgtgagtgattatgacaatagggatcatcacatgtacgatgaaatgactcttttaaagagagcatccgagataatattccacagtaataggaaagttacgttggatgatttcatagaaagtcacggagctgcttacaacagattaactttgaagcaaggaatggcaatctttgagcattactttgaagataaagatataggtgccctggttgtaggtgctcacaaccgatatgacagagataaaggtggatttgaaactgctaataggttagatgacgacacgattgcatttatccaacattatttttacaatctaaacggcagattaatagctagagacacttgggaaattaatggagttgaaatactgagttacgatgagattttaccgcacaccaacagtgctatcatgttcacattatcagaaaaagaaaacttacgcacagttattaagagacatcctcattgggaagtagcacgtttaactctagctgagtttaagaaaaacccaattatccacgtgcaaaccaccgacaatggatgtataattctgcagaactacttaatcatactccgaccaccgaagttgggaggagatagcgagctcgaacgacagtggtggagaataacacacagaaagactgagtcacttccaacacctggtaattggtgggggatgaaagtcaaagaatccaataaaacaaaaagcaacttcaatgatgtaatggcaattaatgaattacactatcatgagccaacaacactaagtatagctttatctgacgacgttgagtatcaaccaccaatggacatatacattgctccgtacgaatcagtgtaccctgggagtatattagaaccactaacagatttgcctgacaccattgccatgcaattgtgggaagataatgatttaactaactggttgaatttatacgccccacttaataattgtatcatcaaatctagagagctaccaggaaagataataaaatcggaaaaattaacaatggtaaagtacccgatccgatctagagccgtattgacgaaagtgtgtttcgaagaagggagaagtatcattggaagaatgaaatcggtggccatgatacgtacaaaaacacccaacccttatagattaacactagacattgcagatacatactttcgaccagactggcaacagatgatcaacaactataggcaagaattattaatcatcagacccaaagatgtgaagaaatggattgaagagaataaagattgtgagaaaattgaacgagagttaattgacctattgtgtggagaattgatatcgaaaccaatcaatgatgttaatgtacatcttaaattagagagtttgttaaaagaaaattttacgattatgaccatgcaacaacaagcaagaatcatcgtttggcagagaaaagcagtttgtgctatctactcaaacctctttgtagaagttaaacgtagactgaaagaagtgttgcacagaaaaattgtatatgcagatggactacgaccagatgaaatatcagccagggtaaggttagtcaagaatgtagctggtttttttgaaaatgatttaactaaacaagatagacaaactgataaacctatcattgaagtagaattgatgatatatgatttattaggagttcatccaaatgtaatagcatcttggaaagaaatgcatgaggtgtggagatttaagtcaaatttgtactggggtcaaggagaaggtatgcggttgactggacaggcaacgactgcacttggcaattgtttgaccaatctgcaagtacaccaaaactttacaaagacaaatttccgtatattgcaactagggttatttttaggtgatgatatgtgcatggtgttcagtgagaagccagacacgtcaaatctcaggaaagatattgcaaccaacttcaatatgcaaagtaaagattcttgggtgataaatggagctactttttgcagtatggtgatgactagaactaactttggagccgaattagcaccagatgttgtgagacttaaattcagatatgaggtaccaaatggagtgcatgaggctacaccaaccaatgtactaatgagaaaagcttcgtacctaatgatgttgggtaaaggtcctaatgttgacgatacggttaagatgttaaacttacctatcaaaccaatagcatggtacaactttgatcacatggtgaccgctgtggctcataagtataatatgaacgaggagcaggttagaggttattatgatcaattgttagccacaattagaagtgataacatttattcacatgtatttagacatttctctaataaatag

SEQ ID NO: 1170 - DNA, 17244 bp, Rhizoctonia cerealis alphaendornavirus 1
  source 1..17244: mol_type = other DNA
atgcaaaccaaccaaaacactacacaaaatacaatatcatttaatgaacaaatgcgggccatacaggcccgctacaatcagattggaataacccccgcgtcctcgtctgataacactctaagcgggggaaaacatgacaaactaagtcatgaatctgaggaacctatcggctatctgccgacgggagtcccgtactttaaaagacacgttggtttcggagaacacgatgaaagcattgcctggatcggcgattgcgaattgcttctaaatgctaggacatacattttaaactcagagcataaaaggaatgatcctttatgtaaaaaaatagtatcaaacaaaacgatggaagaatttttaaaatcttcctaccctgacttaatcactaaaatgaaactatttgatgagtcagaacacacatttggaacatgttttgaaatcttatgggtcatttgcccttggatacaattaccatacttcaagtactgcgttagcaaggacgttactctctccgaaattaaaacttgcaattggctcactacagccacttatgtgaccgacaagtgttggcataaattattcactcaaccaccacaggatgataggtacccttggaccaaagaagactggataaccaagcaacaagccaggaccctctcaaaagattggcccacacaggaccaaccattgatccaagcgcagcaaatcacgccagggatgtggctgatcaccgagggtgaattaacatttgaacaagtcatggacacattgccaacgaaggctcgaatcggcggaaaagactcacacatgattgatggcaataccgttaatacgtgttggaatagcagcactaaagaactctacgctgcaacacaggtaacaatcgatgtggcaaaaactgaaccaatcgagccaaaccacacaatgtcgttcgtgagagacaaagacatgaaccttaaacgacgatccaggcacttctctgatgccgacgctaatgcgcaagctaggttgttaaaatcatatcaatccattagaaggaataggaaactaaaattgcacgctagcgagggagatgaagatgatgacagatttactataaagacaagagaaatcaaagtgccagaattcacgatcaagtcaaagccgaaggcccctgtcgttcacgaagaaaactgtcggtgtgacccttgcttggtagctctagtgacccagcaccctgacagcagtaactggtctgccaaggagcttctagagaaacaaataactatgataaaggaaataagggaagcagagtcaaaagggacttttaacacttacattgaaccaaaaccagaagcgccaacagctgagtctaagccaaaggtgcaactaatgaaaccattgacggttggtgggaaaggcggttgctggaagtggttaccagttaagaaacctgctgtaaccagccttaatgaccctctggcagggcagatcgttcccgggtatgaaggattatattatgccagggaattagacggtgaagccatgccaatcaaggaaattatagcccaaatggaaaaaacgatagaccccaaattcatgatatacaagtctatacgcgaaatgtgggaacggaaagatatcaaactaagcaaaactgctgatggaaacctgcatgttgaaaaatgcaggatcttgtacgaaggggaaaagtatcaacctggtgaacctcaacccaactgcagcgttttgtccatcttgcctattctcaaaaagttagatgacgataatgacaagaaaatgatggccaaattgaaagatgaatcaaatacaacagtgacaacgccaaccagttcacaagcagctcctacaccagtagcggtggcgacaccggctcctgaaccagtaggcctgtttatgaggagcgaccaaaatatatcaaacttgttacctttaactgacaaaacgccaggacccaagttagtcaaaaatctgcttagccagatggcattaacaacccggcaagatctgttacccgacaacctaaaagcaagatactccattgtgaacttgcaaatcgccaagagtgcagacaaacacgtatatctaagacaatgcagaatcttgcaaccaggagaaacgtacgggccgggcgaagccaaacctaactgttcaattttatctctaataccattgcttaaatctctagacgaccaaagggacaaagagaacttggaagaacagatgaaacacgtcaagtcaacggccctactgggaacgaaggaactcgtcgaattcgttaagaaggaaacatccggagaaggtgcaatacaactcggaacaactgaatgggacatagcaattaaatctgacctcgctaaagtgcgcaacattttggctaggacagctgcagaagtcactaaagtgaacccaggcacagaacccaaggaccttaaccggattgaagaagcattaccacaattccatctggtagagaagaagggtttggcaaatccacacgctatgattgctgtgacaaggaaaatgatttacaagtcactgaagaacatatacaaaggtcgacctataattgacgttggtggagacccaacccaaggggctgataatgtgcacactatgcgtccaaacttggacgttcatgatggattaaggaaaatcacaaagaagaatgaactaggttgtgaccatttacttagtgaatgcaactgcaaattcaaacccaactcagggttgattttcgttgattctatttacgatatacaacctaaggacgttgtaaaattctgtagggagaacaaaatagagacattctactacgcaatttctacgcatggaattcaagtcgataaaaatttgaacgctttgcctttttctagtggtactgcgattagggaccaagagtcgatggtgactttcttgactggtgagagcaacccttacttgaactctgaaaatttaacgcaattttggcagaacgttgacttgattcatgatcaacacacaggcttcagagtgcacaccatttctaaagttggaatgcatgtggtaaggtcttgccatctcctaacgactgacgctgctgtttacaaagaattgaagatagtcagtacaaaagaacccacacttagagtgatggtcccaaccctaaagtacaacacaatcattggatggaagggagcgagctacacaattgtgaggcaaccattggaccttaatgttaatttcttcaatcaattgtgtgatcgaaacattaatggcagggtcggccttgacaccttgacagagtatggactagccatcgcacacagtaaatattccatgcatgacaaaactatcaccaactatgacatcacagctcgagatatcaggttgacatcatacttagccatgatgtacatgtctcgagtgaattacggccttacagaatacgctgacgcttcatacactttgggttcattccagcaaataagctggtcaacagtcatactgggggcgcagatgctcaacagctgggcaccccggatcttagagaagcttgggggtgaaacatttgctaaaatggccgacaaattgctctcaaacggatctattaagatggacgatgacgctttcaaagggatctgggatcaattggacaatgtcaaacacatcacaaaaactcaatccttgaagattatgccaaattatgaatccgtcaaatcaagctttatttgccaacatcattcaggactttgccaacacaccggagatgacaagtgtacgtgttgtggagctgacgcgaccggtgagttctgcacatgttgcaaatcagcaggccacgcacacgcctgtggtcacatatgtatgattgggcacggagatggatacattaagtgtctgtgttgcaaaaacctgggatcagccaacccttgtgctaattgcaaggaggtacgtgtagggttggtggatgacttagtccaaatcttaaccacgacaccatctcaccaagtgacgaaaacagcctatgcaaagccccacattgcctctgaaataatagattatttcggtaaccaggtatacagtaaaagaccggagggtacaatggacttgggacaaaattggcacaggcacagttgcgtcaagtgtgggggggtgtatgaacaccaacacaaatttaagaacattcaacattaccaacatgctaatgagtgccctcactgcaacgaaaactctaaggctgttaaaaagaattacgtcagtgtaaaatcagttgacgcgggtcatcttgacactggaaaaccaatacactaccaccagtgtctgtgtggcaagccaattgcatgcaattcctcaactgcagcccacacggaaaaatgctctgaatgtaaagctaaatcgttacaaaaagacaacaaaccttcacgatcctatgctcaagcattagatactaagcctgcccaaaccgagcaacaaccatctcaaagcatgattaaacctgcatcgatccatgaggatgaacatgtgcacagatgcccaaactgtggcaatgactatgcacactctcacccttatgagaacatagtgcacgagcatccaaattgccagatgtgcgctgttgatgctgaacaagttagtcctggagcttctttgagcttcaaacttttggaaatatttgattccgaattcgttaaaatcctttatgaaggttggagcacacactgggagtcaaagactactgtagatgcacctttcggaccaggaagaactaaagttcattatccatgccatggtctaaacacctacccagcagggtctttcctggtgaggagcagagtggaagtttctaatgatgacaagatgtgcggattatacgcgttatcaatagtgttcaatggtgtctcgcaccaggaattgaaggatgtgacaaaagtacatgatacctggagcatgattgaaatgttgcaattcgctgaacacacggggaagagcctgttagttataactgatgaaatatgcatggcctacgtcagtcctaatgatgaggatgttatcccgtccattttacatgtatttgatgatgaacacccaagtggacattgggaaccttgctcggctgtacaggtcggagcatcgtctgtttggccttgcccagacaaaatgtattctatgcacagcttggctctggacaacaacaccgacgtacagaatatgccgaactttgacactttaaccatggaagaaagggtggaatatttaaaacctttaatcacttcattggaacagatcaaagaattgggggcgaacaaaatggaagactggaaattgaccactaggaataaaatcacatatatgaccaacaatgctggcaaccaacatgaccctcaccttggcaaatttaattggctagtacccgatcaatacatcaggatgcatcaagatgcactatcaaggatgaagacgaaactgcctacaaacctgtcgatagtttctgtggatgctctcagtgtaaatgatttgccacaagccctagatgcagaactaagactatgcctagcggctttcaattctattgtggggccgagtgccacttctgcaaaaggcatctgggtgtcagcagagataaccgcaaggaactcgatctccttagtcggaatcacaggcaccaaattgatgcctggcgatgtaataatattgaaggacaatcaatacagttactcacgcaccatcttaaatattcaagccacccacatagtagtggcgaaaataccaactgtgaagcgaaacttgcaagttttgctacctaaagttagcatagctagtttagcaataagaattgtaggtattttgacgtgcacatggacatctgacaaactagctgaagttctacgcaacgccatcacttatgacggggtgccaggtgcagggaaatcaactttcattaaatcaaagtttaaatcaggggacattgcttgtgcgaccactggaggagccatacaatcaattagagataaaggcattaagtcagctatgagcatagagaggcttacatacacaagaccgcagtgcaaaactttattcattgatgaagcatccagtttgagtttagccagctttgccatatgcttacccgaatcagttgaatcagtacacttattgggagacttggatcaagtagtatatgttgacatgtacgaaacatttggcactagaaaacaggctctagttatgcaactcgccggaaccactgttccaatgtacaagtcttatcgaatcgggaatcccttggcagcagagctcaaatacatcaagccggcatttgaaccagctgctcacgaaactaaggtgacactgctgaacgtggcatcctttgattcactagatatccaaaaattagtgactgattatgaagtggacatgatctgggtattctacgatgctatgcagaaagcccttaaaaaggtggtcacaatacccataaataaagtgcatgctgatcaaggcaaagaagcaagctgtgttctggtcattcagggcactaacaggagtgacggcactggttctattcacctagacagaaactattgttattcagcggctagccgcgcaaaggaccatctggtctgggtaagtttgaactgctacgaacaaacgcacacgttgcacgacaggataatgggcagacacagcctgacacgtggaaaagggaaatatctagaccaaactaagaaaatagacggcaaactagccattgatgaattgagaatacatgcttcatctgatgtaatccgtctgtacaatgacacactcaaaccttacatactaattagggccgaatcttttgttaatgcagggaaaattgtggcactggaatctgaggatctaaatgacacgatcggatacgctacatgcaatgggtaccaaatagctatttattacccactcaagaatttcggaattgagcatatcatcggaacaaaaagggttgtgtctgtcgggccgaactcggaggaatacctatggttcagtgcaaaggtggagcagcgtgtctccgacaacatagacaatctaattgcattgattttagaatggaatttagacgaggacaagccggtacgagcgatgcaacaattaataagaggtaacattgatgagatgatacaagaaactgggctaacgggctggatggtgactaccccagacaatactgtcaaagtgagggatgccaatatggaagtgatttacacagtaatcttaagtgaggatgggattgacttcctctcaaatgacacaaatgaaccaccgcaactcgacatgtcattcttagcaaattacatgatcacaccaaatcattttgtcgtggaatccgaaacaataagcaccaaatcaatactgccacctgatggcggagtagagataatccagaaaatcaaaaaaatttacaccgtggatttaaccattgaagaagacgtaggttatcgcacaactctctaccgcctacatgcaacaaagaaagtgctgttcaagcgtctcgaagtagcaacggcgttagtagaattgaaccatgaaaaaggaaccctgagaatcgtaagtctggatttatcaaagttggccaaggcaattttaccaatgaaggtcgatatggctcaaattaactcggacatagcaaatcgtagagtgagcgttttgaccaaggaagtggtagacaaacttctgaaattggatgagtcgcccactgttacagccccaccctccccattattaaccttaaacccttggacggtggaagactcggcaccaatccaaccagataaaggcaaacagaagatggaagatatcaccccaagtgaagaatcgacaacggaagaaaagcaagaaggggattcagctgaaaacaccaaacagtccttggagtcaatcgctttccacataaacaaacaaagtaatattagatttgcggatgaatggtctgacaatataaggatgtggataagtgaacaaagcttaacaggagtgggggcattcacatccgtgtgtaatagcctgctagacgccaacaccttcagtccatcaaatgtagatacatgggccagtctaagcaagacgtgggaccatttggagcgcaggtattcagctactgacatacaatatattatcgaactgatagatggggagaacttatgcacaatactaattgaccggaatcacgtgaccgattccatcatcgtgtacactgacgaatggaagcaatcggtcatcgagatggttgctgaactttgccactgtgcaaacatgttatccgatgatgaagtactggccacttggcctgctcaagaacgtggacctgtcccacttgattccacgcccactgatacccctgaagcagacgtcaaaggcgaggaagttagtgatcaaggtgataatgcatggttacggatggccgaagcagaaccagagcgacacgcaaagtttgcagccatcggcttgtttgccaggtggtctatcacacaagctctatctacgatttcaattaacaatatgtatgagaatcacacaaaatacacatatacgcttgagggtgaattgaaagaaccagctgggatagtgtggactgattggccggaagcaaagagaaatttggaaatgataaggaaattacataattcaaagccagccactgttcaacgtgctatggtggacatccggcatggttgcaattgttgtgaacaaccagaaatggtagacattcatgcgcctacaaatgatgtcatctacttaactcagaggacggtgaacattgtgaggtcgatttcagcattgttctggcccttaagtaacacaactcaagaagtggaatttaatgtcaagggtacatcgtactcggtgtcagctaccagcgggtgctctgcttgtacaggattgacattcaagaaggatcaccaagttatagctgtgatcagctcgcaatataggaattggatgcatagaaaagtgtcctacttgggtaaagatggaatgttgatgttgacgatttgtggaataaacctttacccaagacacatcgattacaacaacccactcactaatgaatggcacacaatacaagaaactctaaaagaatatgaatcggatgagttggacccagagcaaataaccacaaccactgggttcaaattgtacaatttcaaaagagcctgttgcgtgttaagtgagcgtatgtcggtgtttattgcagccgtattgcttcaaccaacaggtctcaaagcgctatcagacgccacacaattcccgttggtcatgaaaatatatgaagaagtgggacgcctacgtgatcaagaattgcaacatgctttggcattctttaacttaacttcagataatgaaatgaaactgtatagggtaagggagtttgatgtcaggaacatgagcaatggaatcgaatcaggaattggatttgctatagataaaacggtcttgacagatcttaaagacatagacggtaaaccatataacaaatcactgaatggctggaaagtggaaactgtgtcatcattagcagtagttggggcagctacccaatcactgttagaatggttagaaggtgggccggtggggaagactttgagtctcgtggggcaaacagacatggccgaaccgtggacacaaaaatatgtaaagtttttgaatgacaattggcaaactgctgccattgaaaattctaaagatgtaatttttgatgctcaagatgaatttgatagcaaagaaaccctatctaaaaaacaagttgggcctacaataagtgagcggatggatgcacttttcggagaaagtgacagctttgaaagagctggagccatcggaccagtgacaggaagtttgacaataccatgggaattacaccgagaacacaaaactagcgtgtggaatcacttcatcaagaaagctgcaaaaatagaactagccagtcatgacttgagcagtttaccactttacctgccaattgggcacatcaaagtgttcaaaaatgtggatgcttaccaagcaaatctactcgaccttcaagagcaaaacactagcctattatccagatcaatggaagtgactataaacacaataggagccaaatgggtgagacaaacaattggcaacaacttggtttactctcatacaaatcagccgcaagcaacgatgttgaattcatacttcgaatggatccatgtgaaacctgctaatctgctggatggggacgaatgggaaaatgaaattcaacaaattcgaccagtgttgcgagacataggtgaaatgatggaaaagaccggaaacacaacagatcatgctaaatccagggctcaatggtttacggacaatgctcggggggttggcacctggtacacaaggagtccattaaaaggcaccattaattattacggcaccaccgggttagcaatgcccccgatcaaattcttggctcagcaagagacagaatctgtcgcttacatgctctgtccaggaaaatacattagtagagaactcgggtcttggttagacggagatgcaccacatttcggttacgcatttggtgaaagagccagaccaataaatcagacatggatcgattggatcaagcgtggtgatccaaaaacagatggctcgcgtgtacactatttgcgagtcaaaggtaacgtgctgggtcaccacattttggaaatattcactacttacaaaaaatattctggcccttattaccacatgaacttatgggaaggcaacacagaagagactgtcacgtacactatgccagtggtcaacctggctttgcatgatttatcgacaaagggattattcagcaatcctcaagtcacaatgcctgccaagattcacagactattagaactgcgaatgtgtagacctgcaacctccttcgacgatctccttcagtacctacgaacattgagatacaccacatacttcagttcaacctcaaaatttgcgaaagtagacggttggacacaaacttcattgagatgggcaatgtgtgtgtacttggatagcagtgtgttggcgcagcaagttaaaggtatggcacagttaaaacctgaaaccggattatctggaaatactatgataaacatggcagttgatcgagctagtgatttcatcaaaggaactgtggctgatttgaccaagcatctcaacttgaatttgagctttgaagagttcattgaccaaatagctgaagccaccaaaggtaccggcaaggttggggacgctttgggggcattttccaaaatggtacacgctacgtcagtgaggaaagatcagtacaaaccagaaatatacaaatacacgcatgcaaacgatgtgtctttaaagtatataaaagtcacaaaccccttggaaactgttaaaacgcaattagatgatctgaaaccgcaagctaaaccacggaccgtcgatgtgttaaccaaggtacacaaatcagcagacatcttgatgggaaagaaattggttaaggtagtctatattaatacaggcacggaaggggataaatcaataaatgcgtccgttatattgagtgaaacggatgaagagataatacttacagaggacatcgtgccggaattggcgatggactggggcaaacaagccgtcctggccaaaattccgaatgggaaagttacggcatttttgaatcaagtgcgtaggacgaatgaactcaagaacagcaaagtgctcatgaacgcgctttcagaggcatcttatgtcgtatgcaatgctatggacgggagcgttcgatacttggcaagtgcggcgggtgtcaaatgtgtgttagtaagtggaataccatgggacaacgaatccctcaaaaattatgatatagctggtgtgccgcaaggtgcgtacaactacatcccggtttccatggatgaagtggttgttagatcattcataccaatagatgaacaactatcatataaatatgaggctcaggaagtcaaccaaataatgcccaggttcaccaagacttgtttaaatgtaaaagcgatagaggctgcatgtcaccagcccgtgggaaaaccaattgaaaccgacatatgggtttacaccggaccggtggcagtgagtgatgagacgaaggagcgaataaacgcgctggccaggaaaaatcagatgacagtaatttatcaggaagcaggaaaagaaagaataaacgtacaacaatcaaaaataaaattggcaatagtgcatggaggtgcaaacacgttaaatgaccttttaataagccaaacaccatttgctttaatacaaatgataatggaccaattgttggtggctaaagccaatccgaaattgacttttgatcgattggaaacacttggactaactgaatacttggagcaattcgatcacgacttattccagctgacaacaccatggacaccaaatggagtagtgttgcaagccggaataaatgaagaccaatgggaaattaacgacctattaacgatggcaatgggtgaagactttgaaataaccggagggaaaaacaacaagaggagcgtgacggaaaacatggtaaaggaaccattcaagcttgctttaacacagcatgattcagtgagtctgttgcaatcaaccctgaagaatgttttaaaacatttaccaaccaccggaatcaggtactgcgtaatatatggtgacagcgaatatccagctaaccttaaagcagactacggcatagtagtccatttctatgatgaaaccaagccagaatctacggatactgtgactacgtacgttggacctttgcggggatatgccaagctggtggccacttggcacttcgttcgcctgcaagcacagttcaaacgactaggaccatcggaatgtcactttgaacacaggtggatgctgttaaattacacgaacttcgaccaaccttcggaatcagaaatagtaaatggcaacaaagcggtaggcaagctaacatcgctgacattgaccgatcctttcgatgaaaaaacctatctgttatatgccaggaagttcggcatagacaatgctgcacaactattgctgctcaccccaggcaactgtatgaaggccatgcatgcatgctctgaagaggcgttcaagcactggccgaatgtccaaaggttgacgacttctgacactcaaggcagcatcttgcagtggacgcataacattatgagggacagcaggttggaacaagacatcaatcgcggtgacgatgatgatgatgacgacacggaaggggatcaagacgatcaacctgatccaagggatgactctgactcggatggcaatgcagagcctgaagatgagcattatgacagtgatgaaggccgagattctttccacaccgcatccatccattcagattctggcatggaacgcaaagaagctcacgacatgtatgagagtgacgattctatcgtggagcatgcagacaatgaaccagacatttacgttggtgatgaagagggacagacgtcaagagtggactccacagcggaaagacaaagttcagaacttcccacgaacattgagcgacctaggacgggtgatgagcctcaaaccatgcaagtcatggatgacgacttgtccaaaacccaaagcagtggcttgccaccgcaagatcaacaacacaatgagaatgaggaaggcacagaactaagtcatcaacaaggatttgataaaccatatgaagaggagttggtcgaaataacatgcaggaaaataattgggaaattcacaatcgaagacagactactcaataccacggggacttgcttaatggacgctttgaaattacaaatatcatggcttaggtttgaccctcccatggagtatgcaaacacagcacaattggtggaattctgtgaagataacataattaattgcgcagtactaaacattgagacaaaggaaaaattttattccgatgaagaaattaatctggaagggtataaatatactattgaaccaacatcatccactgcatggctaggcatatacaagttggacggaaccacacacattgtcccgctgtactgcattgaatcaagagatcagcaagtggctgagactagactacaaactttccctgtgttcgacccaattgaatgcaagaattcggaggcaacgggatactggacaccaaacataaatgaccagctgtgtgaagggcacatacattaccaacctctacaagaattagacagtcatcttggaatcaggcccagtgatccgaacatgagaaaattgtttgacaggccaaatgagtacactgttgcatcaattacaaggaagaattggaaattaattaaaaagacaatgagagaaccttacacaatgcgtgtgatgcagagagtcaatttaggctgtttttcaccttcatacacacaagagatgacactcaaccgaattgcttcatggagattgtacttcgcaataacctccgagggactggttccgatgataagcataccgcagaaggttggggttttcttctacatggggcgagatcccccacccactgtcagttccgtcattgttgacgggcgtgcgaacctcatgatcagaccacagaagtcagttacggtaaggggtcaaatgccggatgtgaggtattgggacttcaaggcagcgaagttcgtaaaggcggaagggaaaattgtcacgggaccaggtgcatgcaaaacaatgattatacatgattatgacaatttagaccaccatggcagatcagaccgtgaatggttcaatctggcagaccctgcaatgctaaagtttacaaccaaatggatagataatgaaataatccaagcaatcaaagttaacaagttgacaccaaggattcacattaaagacaacaatgtatgcttcaacattttagttgccatgaacagagcggcaaacattgaacaattctttaaaatgttcaaaataacaacccgtgttagccgcaaggatcgccgaatcaaagaagtcaatatacacactgaaaacaagcaaagttacagcttcgttatgaggaacattagccatctagcatacgatgaacacggtgtggccgaactacacttggcactgggccaattgataactagtgagacagcatgggagcattgtgcaagcgagtatatggcgaccctagaacattccccaacttacattgtcatggctgtgaaacccaatcaaccacattgcaacaaaaatcttgtatctttaaggaaaccacataagggtgaaggtgtcattaaagaagaagctagggagcaaataaactggttcagggaaggtgataaaccgaagtatgatcggatgatgcctgtatacaccaaactgatcaaaacttatggaccagattacattttatacctgtgttctggtgggggcaaatcaaccatgagcagacttactgacaaagtttatgactgtgacagatcagtcaaagttcctgcaatacctgaccctgaagcagtcaatatgggattctgggctgacagaaatgccgttgtacggaaacagttactcgatgacgggttaaagatggtgggaaaagttctgctggtgtggcacccaaattgcgtaccacatgaatggcgaaacctaccccaattgttggtaatcattgacgacattgctggtgagaggctttttaaaatgggcaaccaatcccttaaagactatgcagctgaccatccctccatgccatcagttgtatgtaccaggaaccgtacatatgacataatggtaaaacattttaacatatattcaaaaaattctgccgctattgctatgtcaaatatgacaatggaagaaatcagtccaatcaacaagtatagtactgctgacaaagtttccacaaagtacttcattccgtacataccggctgaccgcatgcaaagtcgaacgacagaaggttatgcgagtatagaagatgaagccgacacagatgtgataaatatgttcactaacagggatttatccgattggttagtaagagtatcacccacatcaaatttagtaataaagtctcatgaacaaccaggtcagcttaaagagatgaacaagaccaccttagtcaggtacccagtcatgtctagacctgtattaacgaaagctgtgttccaaacttacaatgcggtttctaccagattgggcagtgtaactacataccgaaaggtcaaactgcaacctgccatggagatgaagaaaatagcccaagcatacttccatgacaactggcaacacactgtgaacaaattcaatgaaaacatgattacttacaacgctgaggcaataacgcagtggttgcgtgaacatccaggaacagacaaaattcaaaaagaggtcgacgaaattctggccgaaggtttcctcaccaaccctctaaacaaattgaacgtgcacaacaaacttgaatctcttttaaaggaggaaccaatcacaaaggtgcaagatcaaaaagttcgaattattgtatggcaaaggaaaggttatgcagccatctttagcccagtattcatagaagcaaagaaaaggctcaaaactctattgaggaaggatgttatttatgctgacggatacacaccacaagaactatcagccaggttacgcactgtaactgggtcaacgagattttttgaatctgatatggctaaacaggacagacaaacggaccaagaaacgttggacgtagaattcgaagtgtacaagaatcttggtgtacacccaaggttattgtcagtttggcgttcggttcatcgaaactggcgattcaaaaatgcccatatgtcaggtaatttggatggaatgcggatgactggccaagcgacaacggccataggcaacgtgatagtcaacatggctgtgcatgctgatttagtaataaacaacagagataagattcaactaattttattactgggggacgataatttgatgctatgcagcactttcttggatttacaaaaattcaggaaagacaccaaagaaagatacaacatggaagtcaaaccagactcaaacagcactcacgggacatttatccaactcattgcttatcataccccagaaggaacatgtgagttagcaccagattggatccgattgactagaagatttgaggtgacgaacggcgtatctgaagcaacagatgagaatttggaggccagatgcatgagttattgcatgatgttggggaatttaccagaagtacaaagtctggtgcaagcataa

SEQ ID NO: 1171 - DNA, 16623 bp, Rhizoctonia solani alphaendornavirus 1
  source 1..16623: mol_type = other DNA
atgtcgcataattcaaacatcaacgggcaaagcccgtacaacggcagagattttgaacctacccagaactctgaccgtgaactttacgaaggtaggaaaaaacaaagcatccgcaaggatgcaaaaatggatattgacaggagggcgttacaattgctttcctttaattccattaaacgaaaaactgtgacagccgttggcaacatattcccaatatcaggtcatcacaggcggggcagtgaaaacagtggagccataattgaggcatacaagaaaatagatactgcaagatccaaccgtggcaccctaatgcttaacagaaaaccaatagataaagacactgtcatcaaatctaaagtgggtggcgatggtgactgttggaagaagatatttggcggtgtgacagaagacatgttggaaaacaaaaagttaccattgaggacgatatgcgagaccatcagttatggtttggtaccatactctttgttcccttgtatcttagttggagacgaatgttggggtcgcatgcaacacactcactgggatgatgacagatcagattggttcaagcaattgccaaccgaagtgcagcaagataaaatgttggtcgcaaaaagatttggcagagaatatggtataaaattctcaatagttgggcaagatttgcatgtagaggaagtcggcgtgaatctgacaggctgcgtaatatccttctacgacatgtcagtgcttaaattgcagccactagtcgatctatgcaatgcatcgggcatcagcctagacaatgatgacgacccggccaaactagctaaagtagcaaaaactgaacaatgcgcagagcaagggtcaactgtaacccaaactacgctcggagacacggtgagtttaaatgaacttatgcttggcggacgaggcgattgttggctaaagttagcaaaatattcaatcgctttcacatttggcgaaaaatttgctgcaggtcaggatgtcgactctgacgattctgactctgacacagaagattcagaagatgatacggaaccgtttgaacaacaacccaagccagaagaagaaatcaaacctagaaatttttatgattgcatgagattactactgctatatggcgtagattatgatgaaacagaagagttagattggcgaggtaacaagaaaagaaaacaatttaatctaaaagagcgatctgagcaatacaaacttaaaatatacccaacaccaggcaagccaaatgaattacatctcgaagactttggcaccgacctaaccggtgatgacgtttacacattaaaagacatgtgggctttttgcaagttagatgaacaatccccaaaaatcctggcggcattacaagaatgcatcgataaaccatcagtgagcacatatgaggatagacagaaagcgttttcaggaacacaaaaaccgcctcaacaacgcatcagaatcgtagacagactgctagggggtgaaagcgattgttggtccgctctctatgaggcagctgggtatgacaccttcccagacgcagaatgggttgagaactttgatggatctatatgctactccaaaccgaaagaaatccccgacaaacctgtcaccttgttagaatttttaaacatgataagagcggttcaacaactgggagactatgagcacattgcttgtcacatattaaaaacaggggactcctatcacttagaaaatctgcacctactatcagaggaagatgagtgggatgacgaaacaatggatgtgccggaaggttggatatggacatgtgcctcttggtcaaattgcaaaatacaaagccacaaaatgttccgggacatcatagaaaacagatgtgacaaaaatattgactggttgatagaccccgagaactatccagaatacgaagaatttgaacgtccaacagttgctgacatgatgaacaaagtactcaagcccgaaaaagaacaaccagcagtgaaacttcaagacttgctgctgggcaccaaagccatagatgactttttaaagaataacggtctgagtggcagttcagcaataaatgttggcactgatgaatggaaagaagcgatggaacacgacatcgttaaggttaggagcatactatcaagaaccaggaacaatatatttagaggctcggcagggcttaacgatgaagacattaaaatattagaaaaagacatgcccagctccgtagtgttaacacacaaatctgtgccaaaccaacatgcactattcgctagcagccgcaaagcttgtagccaggttatggtggaactagctgctggaaacaaagtaattgacgtaggaggtgatcctacgcaacatagaagggcactaagcgacgttcatgtgttgagacccatgctcaattcacaagacttagtcagacatctgaataagccgctccctgataacccgaaagttagccagtgcagccacactttggcggcatgcagttgtgattggtcacaaagcatacccatatttgttgattctatttatgatatttcaccaatggaagtattgaacacaatgcattcaagatctatagacacgttctattactgtcattcatttaggaatacagatctaaacgctgggaagggaatgacatccatgggtttgggaatatacaaaacatttgaagatgacttggtgactgcactgcctggtgagtctgtgagttatgtcaacagtcagaagtatgcggaattatgggtcaacgctaatgtcatagtgcaccaacagatttggcgagtgtatgacatttgcaacattgggacgcacacagtgagagcagtcgttaaaacaaacgagacagcatccatttataaagacatgaaaaagacacaaatgagagatacaataactttgcgtgtgccgatccttgacgtgcatgcagtgtcacgacttaaatgggtggatgccaacctggactccaaactgctgggtagtctgctagacagaaatatgaacgcaaacctctcatttaacacgttattagagtttgctcatgctattgcgctaacgaaaatttccacacacgacaggacttttgatctaatgagagtagatgcagaaagttgcaggttgactgcatgggtcgcgtacctatatgctaagcgtcgcacaggttggttaaatgaaatcgtgctcaacacggagtttaagaacaaacccaaatacttcttccaagcgttgcttaaccttggggtgccaattttacaagagtgggtaaaagataacaaattatttgagaacacagaatttgttaacatagcacaaagtttaattaacaactcaattcttaaaacagacgacccaaatttgaacattttgttcgacaacatagatgatttagtgcacacggctgtgattaaaccattcgacataaggttcttggaccgactggccgattggaagtgtgcacatgatctaaagagtgatagcaatggaaccaacaattgccagtgttgtggtagggcgtgcaaccaatcatattgcatagattgtgatgagcattatgaaacaatcaggaagatggaggtgccagaattgagacaacagatagatcaggagataatggaaacaataatagctcaattatctgtgaccgattttgaaaaaccaacagaatcagtcacacatattagggaaaaacaaagggaaccaaaggataagaaagaacaacagtcagaacaggcgcaaatggacaaaactaaggctaattcggcagcagtggacaaagaactgtccgcatttgttgaagacaagaaaaaatattcagcagcagtcactgacacccaaaggaaaaaaccgaccaaccacaatgaactcaaggtcatggccaatggcagccacatccacaagtgcaacaactgtggcaattatttcttggaaaagaacttgacatgcaacgcaaataacatcccctcaagaaatgactgtccaagttgcaatgaactgtcacaacatattgtggtagatgaaaattatttcgagaacccacccacgtcgtttggaacagaacccaaacaggttcagcctaaaccagagtactcaaaagagatcctagaatacggcgagttgctcgggcatgattacacgcaatatttgctagaggaactggtcgagtaccagacaaccgtggtgccccatagagggggttataaaacagagttgccacacatgcctatgggcaggagcgtatatcctaacctatcccaaatcaggacacaggacgaaacaattttgtataataacgatgaaaattgtggtttttacgcaattaaaaagttaatgcctctagcatccttgcccagcatgagggcgatcacaggtcgagatggcaacttcacggccttggacttaataacaactgcagcaagtatgagcgaaaacctcctggtgatcacagaaaactacctgtatgtcaacaccgacaacacaggaccacaccacaccattttgcatgataagaatggtgaaggacattggaacgtttgctcaggaatattagttagcagggaagccatgattccagtacccaagttggcactaacgcaacaagaaatgacttcatacgatatagagttttcttgggaacttaatgctagagagcgatgggaagccctcaaaccaataatggccagcatagtggccgacgcactggtagctgtagatgttgaccccggtgtacagttgcgcacaatcaacgatgctcaaacactgagcaacaacaagaaacagagacatgaaaaacataaaggcatgttttctatcaaaataaacgataaagacttgatcgacacactgtccaagctcaatgagccgaccagagaaaccttatctagcgacctgctaacagtggtagacctgcccgaagcagaggcagagagtttgcgttatttgcgcgatacaaggatcaaactgctggttgggaattacatcaaagcaatgaacgacacaaacgttaagtggcaaaatgttaaagttgaaaagtcaattaatgtcagtcgagtcaaaattaattatcacaagatcaagccatgtgacaatgtgctgatacaattgccaacaggaacggtgcaacggacagtactcaggagtgcaaaacactacatcgtggtaaggactttgggttttgtgggctcatgcaaaatgtacatacctaaacagtcaatcgcatccatactattcgaaatcgaggcactcaacatgctggatgtcaatagaaacatcgtggaacaaatgaaaagaatctgccactctcacataggcacttttggatcagggaaatctactgagatggtagccagaagtaaggaaaaagacgtttccacttatgcttacactaccggagctctgaactcattaaatgaaaaaggcatcaagggcggagcgatgagtgttgaaaaagcaaagtttgattttaaaaggcaaaagatcgtacagatagatgaggccactggtatgacactactcgacgtagcaatggtcacagataacaggacagaagaattgcatttatacggcgatctcaagcaaattggcctgactgacatgaattatgctgttgggtacagacactacatacaggcaatggtgtatcataaagacaagacagaaaattacaaaacgttgcgcactggcgaacctttggcatcaataatcaagcagatagaacccaagctgataccagctgaccataagacggactacaagataataagtctcaacgagtttgatgtacaaaagcttgacgaaattatctcctcacataatatagacacgatattcttcttttatgatgcggatttaacgcaatttagaacacacaccaacctagacagcggttcactcaaactgtgtaaagtgcattcgaaccaaggagctgatggcaataatgttatggttgtgcagaacccaagagtgaaaactaaagacgcaatacacctcaaaccagaatacctatacacagctgtcactagatccaagaaaataaccgtttgggtcacaatcaacttatacactcaaaacattaaattggaacaaattttaagaaacgacgttgaaatattcccttccgctgggaagagatatgagcatgaagatgtgctcaccgaaatagacaagaaaataacagcaacaattcagcctcaatcaggaatgacggctgtggaaaaaatgctagcacacattggcatgatgagtgtcttggatttaatgaatcctgtggcagtgtacccaaaaattgattggccaaactgtgtgttgttggtaacaggcaaaactctagatgacgaggatgagatctgtgcagcattatcaataatgctattgtacgattacaccgattcatcgagcaactcaagagcgctcaataatattcttatcaaaccgggtggattgaactcacatgtggcagtagaaaaagttgatgggaggatgaagaaaaatgtgaacaacaacattaaaagattattgaaaggttacatgcccgcattggagagacttgataagctcatatcagcaatagcaatcgaagaggggttagctcaaaacagtctagaattacaattacatatgaacaaaatatatccgataactttagcaataccagccatgagtctcacgcataaattgtgtataattctggataaacaaaccagaggtatttattacactcgaagattagggctggacagcttggtggtggtggataacaaacaagacatatgtcaagtcaaggtgacgtcggtgacagtgaaacgtcaccaactaactaatattgatgctgttgaatttttgaacaaagctgctgatgaattttccggttatggcgtggtccacagcgacacaaccagcatctcgtacatcaaccaagaagagactctattctgtgataacactgctgatgtgctttcagtcagcacaaacttttatgttatccatgacaacaaggtgtggacagttacggaggaaaacatcgagtataaactcataaacataaacgcagcaatcaaaagacaagtgcatgaacatgtggacttgacgttggtggagtgcattacttcaatctcatccttcacagatgtcgtgtcaaacgatgagttacaactaactgggaaaatcaaaagtgttgcagacctagccgaccccatactgcaggctgaagttttagctaaaaaatacaaattgaactgcagagccgaaaccacagtagaaggccacaaaatcactatgtatgccggctacggaatattatccgtgacggttgcatgctgcgaattttccgcagattggcagctgaaagaaatcacactgggtaacggtttagcaatcataacaaagtcaataggttttgacttaacaaaagatgtggaacaattggcatccctgattaaaggcgatttgaagttgagcaaaattgaaaagaaagtcagaggtggcttggctaatacacttaacaacgaaggagatgaggattcggaatatgacaccgcttcagagggagacgatgacgaggatacaattgtgccaaacaacagaacaccaatagccactttctttgagttaccagacacactgatgaccacgaacgaaaaaactgaagaaaaagatgggaaaactgcagcaaatgtggacgacttaatagacgaactcctaccaagcagacagacttatagttgggcaagaactattgcaaggaaattaaacctagaacctacaggacagtcgagcgcaaacactcgtgagcacacatcggctccgttaagaagggcaaacttctacgctgtcgcagtcagtgaactcttgctagaaacgtttggccggcttaaaggacaggaagacgcaaaaataatggcgaaatacgtcgacacagaagagggcataaaggtgctttcgatggcaaaacagatgacatttgacagtcaaataccctacataaactcccaaacaacaccttttatgaatattgaatttctgacgagatctgcgatcttcggatcaaaaggtgaagcttctagacacagaccggtctctgaagttggcagtctagtgttgagagatattcaccaaaggtcgataaaactaaacaaactcgaagctatgacagactcgcttgtcacaagctgggttactggtatcaacttcaaagtgcttagcttacatggagggttgttaattggcctttacgctccggactggaaaacaaaaggactaatgaggaacgtggcatacagaacgcatcccataacacaagcttggagagttatgccattgtacgtggagacgcactatggtggacacactttcaaaatgacagttaagaaaggctgttccatgtgcacagattttgtcatttacgacgacaatcaagtaatgttagtcagcatcagcgccatgtataggaaaccgcatactaggaaagtcacaataaactgcaactcaccactagcaccattggcgtgtgagttattacacatccacgtaccattctcaaacattaaccatggcaacccattaacgggtgatttcaatgacgtcagacccgagaagttgttggatcagtacggtcaaaacttgttttctgagttagcgcattgggccgtgctatatgatagacttgcagcgatgacagcatcttggggtaaattgctactgctcgcccttactggaaaagaagtgtcaaacgccttgcaagatgaccatggcttcactactatgacttactacagagaacacaataagaagaagtatgatcaggtagcggctctgggttttgcatctggcttggcaatgacggacttgagaagagatgctgtaagttttgtcgacatcaactcgtgggtcgtgtcttacaacactgtgtcagatggcaacggcttcctacatgtggacgccgaaggcttggttactttggcagcaatgccaggatccaagaatgtcaagaataagatagagcaagtgggatacaaagtaaacatgatcaagcctcatgacatgatggggttcactagtgaactggaaagacaaaggttttacaacatgacaccagctctgttgaggaaagttttcctcaaaatatacaaagggtttggcgtcaccccgtttgatgatttgataataccatttgacacccacagatctttgcagacaacggtgtacaagcacgttgcaaaatacgccagcagactgaccattgcggaaatcaaaaacaagaagaaaataacttacataccggttgacacgctagacattgtacacaagagcgagccaactttggcctacaacatgaacctcgaagaacatggtgacacagttatgtcgaaggattgtttgaccttagtggatacaataggtttagaaatagtcggaaaaatgacacatgagaaattcaaagtgcatggcagcagtctaacagcgatggtgagtacatcacggctcaaacacagaatacaatcagactacggaccgtttaacagagatagggttagagaagaatcgattagagtgcgcccttacatcaaaaaactgtcagagttgttggccacaaacagtaagtccgaaacacaagaatttgcccaatggttaggcgaacaactgaaagacaatagaccatcatggttgaacaacgatcatggtatggctgcggttaactacgtatcaccgagtgtgttggaaaaagatttgtctacagtagactggcctatgaataccgttgcatacatgatggtgccgtttgttgggacgttcccaacacattgcctgatgcacgaaaacggtgaatggcgactatcatacacacaactgggcacttcaatatcggttgcccacaacaacgttaacataataaacagaatgaaggtgagcgaagacacatgcatgagaatagtgggggtccatctgaaccattatctattagaaattgtcacaacaaaattggagaaaaaattcctaaattacatttcagacccaaatcgacaacgagggaagtatattacgtacacgatgcctaaactggatctcagtatgacaaaatggctaaaagcggatgcaatggaactgattacacttaaagtgccagctaacgtggacagactgttaacaataagagcgcagagacctgactgcacctgggaagaccagaaacaatatgccagaacactgaaacagacaacggtttacaacaagagcagtacgaaggacctctataaatccacgagcgatgaaatgctgtattgggctgctgtgacattcatacacacgaaagtgcaactaaacaacatacatgaaatcagtgagagcaagttggcagacaagaacagggccatgggtttggcttcttccttatatcatagagttaaagatattctttcagctttgttcatggaggtgactagccgattacatgtggaccaatcttggctagacgtcatcaagaatattgttgaaacttatgaggaagttgaaggagacacaaaaataggtgacatgttgagaatagtcaaaaagttccaggttaagaaaactgagaaagtgtatgaaatctggaaattagatcaacaaagcacatggtacacagaaggattcaaagacaaacttgtccccgacaagcccgcgaggttacaggcatcaagagatgccagatcggtgatcaaggcatccagatatgtcaacttgtgtggcaagtccaaaattaatgtggtggcccatggggatgcactgcagtgtgtaatgctcaaggctctggcactagataaacaatatgagtacatagaaatccaacggaagacacatttggcacaacactccgaaacgatgtaccaagaccaaatgagtaggatcaagacggaagtgttgcaaaaagccataacatcatacacacagctggaaaacatagatgcagatcgagtgatctgtttgtcagatgacttaggcaccattttcagatgtctaacgaaaggtatagaggttaaactgattgacaacatgaaagacgacaagatacacaatactttggctgatctgttgtatatgacgcagcccattagcgatgaagtcatcaaacaaatcatgagcaatttgattggggtcggcaaagcggtgggagtttacgatgcatatgagaatctgaaacccggggagctaaaaatgtccactgaggccgatataggagagaatgatatcgtgttgcacagcaacgtgttaaccaagttggccactgaagcgtttgaacaagaaatgatctcgcctgaagtagctatggttggcataggcggggcacatgctaaccaacgacatgttcgaagactaatcgacatttacggttatgatgagtcattcaagtggctcaagtcacatgacaaactgcacattgaagtggcaggttacgtaatcaggaacaagagcgtggtactacatgacttttcttattggatgcacaagtacttattaggaataagagccacacagctttacatccatgtgggttcgcacaaagacgtagcggatttttacagtaccgctggcctgaatagcacaaccgacatcgagagagtgaaaaacgagcagctgcagagtatgttagacgcagagttatcattaggcccggagatcacagcagaagaggacgatatggttacagtcataaacaacagctggaatatggttaagaacaagcgctccgtcttgataacacaccacacaaccacgtatcctgcagaatgcataataacaccgttcgaactaagcaaagatgttggtgtggttgtaacaggtgaagagcgcatcatgcacataatggtgttagtgataattacgatatatcacagcagggcggagatgttttacaacaacacttttaacgaaaccgaacaatggatgaaattgatagaagctgatcaacgtaaaccatgggtcactgttatcttagattcacgtggttatctgttatttatacacaagagaccttttaaattgggtaataaggtggagccagcagagcacttgccaatggtcatggatatgtttgataatggtccagtagctatgttctccggaagcacaccaacaataaagtactcaagcgccgtgccagtcgacccaatagatttttccgggttgatagccaaacacagtccaagatcatcgagtggtgaaaaacagtcaagaacagacgaagaatctgacagtgaagatgactctgatggcgaagactttaagggatcaaagccgctaaagccaaaaccacaccaaacgaatgaagaaacgcagccagatgagacagatgacgcgaatgatgcagcttatgaaggtgctgacgagtcgcgtgacgcgttggaagaatcagagacccgagcggcaaggcaacaagcagtggcagaagacaatagcacagcacaacatttaaagttgaacaagaacacataccccactctattgaatagcaagctcagaacgtacatagttaagcaggaggacataacatatgatcctggggcaaccgagtgtggccctaaggtgttggaaaaactgggtgtcgtgttggagtcacaagaaacaggtctgagcccctctgactttgctgcaaacatgctctcatctcacaagaacgtgcattatgtcgagctggggaaattatacaccaccaatgtttatgacattggggacacagtgtcagcccctgggttgatagatgctttttcattgcattgggtcatagccaattggtcaataacagggatcgaggaaccaacacgaatggcaacatatgacacattagccaccggtcagtgtaccaacaacaaacagcaggtgtttattatcaaaaattactttgaaaatcaatgtgaaaatcacacacatagcaacttgttaaccgcatataaggcttacctgaccacaggaataccaatgtcgaaaatatttgcaagaaacaaagatgagttcacagccttgatgacaaaacacagtactttggaacataggttgagtggtcagtaccaacctgggaaagtggttgatttaacagcaacgcttgatgggttcataacacatgaaccagtaaccagcgtccatcgaggagttctgatagtaaccagagcagggttggtgagagcgatcactgctttaggagacaacaacactcagtcatatgtgatcaagccggacgacatgcacttagctcatagtggcatggcgatagtcatagacgccagagcagatttgaaactgagcggaaaagggaacaaaaagaagaagattacaagcgaagttatgcctgggtcattcttgagacgcggttatcttaatgtagaaaccatcaagcaattgagattaccaagaggcacagcactattcgaacaaggcgcgttcaacaacttgatgatagcccatttcgacaattactcacaccattcagtcggtgacagaaggatggaaaaacaaataatagtagacgctattgaatcaggcgtgtttgttgagtgcagcgaagaatggtttgaagttgaattgttcgtcatggaattttatttcatgaagtttgagatgatacatggcacaatatttgtcagtgtaatacctcatccgttcacctacaaagcagcagaagaaatgaatgcagaaattcatgacgatggcgagatgatcaagatagcgctgaattcaagaaaatacgacatcttcaaaaacgttttaaacgattgctttagcttaaacatcgagacttgtatagaagaatttagacaggggctggcctgggatgatttacatgtgtggatgaaagaactgctgccactaagacaaaaatatggtgtaacgacttacgacaaattcagtgggaaccccatggcttgcaaattcccaataatattggacacttatgcagctgcgggagagttcatgcccgagtacaggacaaccgtagtatcgacgttaagcttaagtgaaattgaggaattggactacaacgctgacgttactggtctgaactttgatgatgaacatgcagtagtggatagcagcagtgattttgaacctgggttcaaagttatcggtgggcgatatgaaaatgggaaaggccacattccgctgacaaatcaagtggcactccaaaacctctccaaggtaaatcgaaatcttcaaacactgatcactgaaattaagttgtacacaccaataaccatgaagcacattaatatgattctaactgaattggacgtaatgcccaaacacccaaacagtgaagatgcaaattatgctatgacgttcctagatcacgatgagaggtcatgttatctgcacataactagtttgggcacatgtgtcagagaactaaatccagcaggcaagcgcaaagaggacttcacagtcgaagtagagcacagtgagcactcacaattgcagaaactgttagaagatgataggataggatggtacatggatgaaggcaccagaaaccaggacatgctgatcagacaaacgaaagcgaaaccattatacatcgtgtgcttatgtagcggtggaggcaaatcgacaatatgcaacttggacgacagatttgcagaccctgacaagtacgttatactacaattgttaccatccgatttgcaaaacatgacagaacgtgattgggtagtaagaaatgacgcgggtaaaagacaattatactcagcaggcaatcagctagcaggcaaagttctgatggtctggcacccagacaacattccagaccaatggcgggatgttcccatgttagtagtaataatagatgatgtcagtgggaaaagaatgttcaacgtgaacaacgactcgctgaaggcttatgtggcaaaacacccgaagacaaagaacgtgacattaaccagacctgaagtgtaccagcaccttttaactacaatatttccaaccgtagaaaggaacaagcaagaattaataaacatcgacgtgtttaacgctctgcagcttgttgacgtggaaaacaataatttgagttacgatgaaagagcactcaccaaatggatggtgccttttgttaacgcaacaggcacgacagtggaacaaaccgaaggagtggtggccaagccagaagacacggacataatgagcatagactttttcaatacaccagaccacacagattggttcgacatcaagttaccaaagaccggcatgaaaatcaaaagcaaagaagtgttcggagaattcgtgatagaacgaaaaagtaccttaacaaaatggccaaaattttcgcgcccggtgatgacaaaacctatattctcaacactcaaytctgtaacaagtaggtatggtgaactgacagtttacagaaagaaagagttaaacgccaaagaacacttaagaaagatggtacaagtgtatttccacgggctagcaaactctatgatagagaaattcaaagcaaagcctataaaaatagatggtaaaaagaccatggattggctaaacgccaggaaagatcgggaaaaagttgcaacagacttgttggaaatcctttccgagggagtaggcatacataaagttaacgctataaatattcatgccaaactcgaatcactgttgaagcaagacccaatacaaaaaccggaagaacaaaaagtcagattgatagcatggcaaaggtatggattagctgccatctattcgcccgttttcctagaggcgaagaaaagactaaaaatgctgttaagagaggaaataatttacgccgatgggtacacagcgaacgaattaagtgcaaggttgagaagtgtcagaaatgtggagcggttcttcgaatcagacatggctaaacaggaccgtcaaacagatcatgagacgttgcggttagaatttgagatgtacaaaatattaggtgtgcatacagacgtgctatcatcatggcaagctgttcacaaaaattggagatggaaaagtaagttgcactcaggttattccgatgcaatgagactaactggacaagcaactaccgcactcggaaatgttatagtgaacatggcagtacacactgatttgatatggaccaattactccaaagtgttcttagtcttaatgttaggtgatgacaacatgtttttaactaatgcatggctggatttacaaaaattcaagcgtgacactcaggaactgtttaacatggaagtggtgccagactcacacccagactacggcactttcatacaactaatagcatacaaaacgccggaagggggctgtgagttggcaccagattggattaggctgtcaagacgatttgaggtaactaatggcgtcagcgaatcaaacgatgaaaacttaaaagcaagggccatgtcatatgctatgatgctgggggccctaccagaggtcatgacgttagttgcagagcagaactggccaatacaaccgttccaatggtatgaacccgctcaagccaaacttgccatagctgagaagcacagtgtcagcatagccacagttgagcagtttttagcacatttaattaacatgatgagatatagggaagttacagagtataattggaaagtgcctgccgccctatcaggaaacaagaaaaagtttaataagtaa

SEQ ID NO: 1172 - DNA, 15789 bp, Rhizoctonia solani alphaendornavirus 2
  source 1..15789: mol_type = other DNA
atgaaaagagtaaatttcatttgcacacacacacaaacaccagagcctgcgtcgagctctggtgttttaataaacaacgctaatcagcgttgttcggcgcaaaatccctctgtggttaaagtatcaacaaaattttcaaaaataagaaataatagcaagcaacaagccttgtaccaatcttatttatcgattgatcaaaaccgcaaagacagagggaaaatgagattacattgctctaaagtttttgaaacccaagagcaagtgcccgaaacaactgaatcacctgacctcactttcctagatagaaaaattggtggtgattcaacttgctggcacaagatattaactaactacaatccaactgatgaacaagctgaagacttcttcttacatataataaacgattctagcttcggtacgaacgagccattaagtttgagacaaatttacgagcaatacaccgctcaaactggcccaatcagtaagcaaaaagattgggacgcggagtattgtaacatatggatgcacatcacagagatggataaagaggttatgcacttacatgaggtttacaaaacacctttggtcccgactgctccagtcaacaaaaatgaagttataatgaacatggcacaattagttttgtacttcaacccgaacaataggttcaaaaacacaatgcaagccaagccgttagaaatggaaaagaaagagaaagccgttcgcaaaggaattgacacacgccatggacgagaaggctctagagatagcgtgaacaaggttctatgcaatgtaggcgagaagaaagtaggtgttttatccggcaccaagtcttatctgctaaagaacaacttcttttcaaatatggaatacgccttagacaacgagggtggatccagatacagagatatggttgataatcacgataccagaatagttaacaatcactacgctaaatctaattatgagttagttaaaactactatgcctagtaagagattaattggaggaaattacgaggatatggatcacacacaatttgtagcagtggacacgtcagtacagtcggaagataaacaatttttaactgacgtttcgactgtttacgcgtacaacaactgtgctgccgacaaaactactgtttacggtgaatgtgcgttaacgttaggaaagcagccctggtacagtttgaacactaacttaaacaataagaatttgataacaacggaattcgatattgggacattttttgattacgaattgatttatttcatatgtccagtggttggagtagacacagatggtaaacttgcaaaggaaggcggctcttatgcttactacaacaacatgttgttggtaacgtacggatcaagtagcgtcgttcattcatattctaagaatgttgctaacataatgagcggaagcaaccatttaaatgaaggagagcactcattaaccgtgttagcgcgtaagagatttgatttcatgcaagtgatcgttcttacaccagctaaactggaaattatgcaattaaccgaaaatgatgaagcgtggttcgaagttccggttatagcacccactttgtttggtgccattggcgtgcctgacataacgatgaagagatacaagttgaacaaacctgcattgaacagactcataaacaaaaatttaacagggaaagtcagttatgaactgatgatggagtacgccatggcgatgtcgtggtacagttacaacaaaagaggagtggaactagcgtcagagaaattttcagcggaagaacttaaagtacatgtttacgtttctagggtgttggtaactctgcaaaaattgaatgaccaaattgaaaacttaatatacaacgatggtccaaacaagttgttgatagctgcatttgatgcaatgacgtccgtagccatggagttaacagatgctgactcgccaagatcaaccgtagttaggaagttcatcaacgcaatagaaaaccctatagttagggctggggttggcgcaaaaatgaaagtttggatgtcactggatgcatggacaatgtccagacatatagaagtttcaacttacgaccagccatctgcttgcaaccatcatcaagaatgtcttgagccatacactggaataacttgtttacattgtggttataacactgctttgaacgactcaatatggtgcaggtgttgctcagtaactctgaacgaatgctatcatgtctgcgagtttgagcattcgggtgacaatgtctgtacatgttgtcacaagaaccactccaacgaaggagaatggtgcgattgttgtctacggaaatacccaattcaagaagaagtggaagctgtagacccagtcaaaaccataaaatctgtggtcagagaaaggaagaaagctagcaagccggtgaatgagatagaagctccgaaagagaacaatgcaaaacctgaaccacacaaacaaaaagaagctgagaagttgcccttcacactcgacctaagttatgctcaattgagacaatcattaccggaacattcgctgaatctgttcatgggaaggtcagaaattggtaagagatacactaatgatgaaaaattgagtttgatacctttcgtgaccaacaggcaccctttggcgctattggagaagtacgaattgtatgacgttaatgatgtgactgtcgttgactgtggcgttgactgctgtaaattctacttaggtttagaattttcagagtatagattgaaggctgtgacaggcgggaaaaccagaggactttcagctgaccagatcggaaaaatgttaaacgacgctgcgctcaatgcttgtgtgatagatgcgtcaggtctgaagtttttcagatgcaatgacggtgaacagttcgcttgtgtggtacacacaagtgctctcaaggacgctgaatacaaaaaccattggttggtgtgtaaagtaaatttgatcagtgcagacaaaaatgaaatgtttttatcaaacatgaacactgtggtggatcataacaatgccgctgttcaattgttcagaaagtattacaattcgctaaatgatgacgaaaaactgttctgctgttacaccctggcatcaaaatcgcaagcatctattgtttcaggcttcaacaaattcgagtttaccaaagaaaggttaatgaacagtgatgaacatgatccttctaaaggtttgtacaattacacggttcaaagtagactcgcgaagtacgcaacgatgttggttgattctatgtcgggatctattaacgacgagctcaaccaaatttgggatataaacgacgacaattgcctggatgtgttatataatacagaatgcggattcagggactgttgttacaagattgctctgattttatctaatccagttggccattgtagaacggtcaaaaaattggtgaaacgttcaggaatgagagtgtacattgaggtggatgacgtgaggttgaaaaacggggatcttgtgttctttaaacaaggcgtacagtataaaccaacgttcgttaaagttgttgcgggaaaaatagatgtagttttgactgataagcagtcttactcatacattgatttgttaattcctaaagcttcagtgtcatcactgttgatgagaatgtattcgtacaacgaagtcaaagttgacaaagataaattgattcaattgtacaagaccggtaaattcgttatcgggccaggaggttctggcaagtcaaccagcatagccacttggagaaaagaagagccaacggtgtctgcgactttcgtggcgatgacaactggcggtaaaacttcactacaattaaaattgccaatagacgacaatcctcaatcttttgaaaaagcgtcaattagtcacataaatactcaattggttgtagttgatgaagcgacattgattaggccttgggaactagctctagtagttggaccaatgacccagaagatcatgttagctggggatccgacgcaaatatctgttatagatttgtatgcttcaggaggcacaaggatctctttcaacgcagtcaattacgcaaagaagtattctgatgtgctaacattgacatctacttaccgtatagggtccactctagttaatgaattgaagttacacaaagctatgtcagacttgaactccttggctagccatgatacgacctttgactgcttatggatggaaaaattcacaccaaacgagattaacaaattggcagtgggttgtaacgtgatattggtgttttatggcgaccaaatagctctagtaaacaatgctttggactttaggtcggtcaaaaccgtaactacagtgcataggtaccaagggttagaatctgacgtagtaatggtgctgcagatgccgctttcccgacaagcggacactcacaggcaatttgggcattgcattagtgctgccacgagacctgttaagcatttgaaatgggtgactattgcagacttttcatctgaaactcccttacatgatagattgggtggagatattggatctcttgaatatcaagtgatagagggaatcgagttacatgatgaagtacactccgctttaaatagtggagtggcgaaggttgatatcaagaaatttaatcctgaattttttacagccacggtgactgaacacacgaagttggtaaacgtttcttatgacatagatgatgacaaggttcaaattaatcttaaagctttgttccatactgctacttatgtggttgattcaggaggacgtgtgtcaaccaatgtgcctgatgaatacgttaaggtagttgaggatttgtttatcaagtcgtgtaacgtcgaatgtgattatgtggttaaaaagaaagaaaaatacatttccatagccggatctgacgcttggatattgagaatagtagcgtttgtaatcaaggtatacacggcaaacaatttaacgtactcagtcgaacacaatggcgaaaaattcaatttacaggtcaaaccatcagaatgtgccgcttgtggagaaattaaagtgtacaagggcgatgagctgattggtggagtgactagagactacgtttctttgagtggcagattagcctggggcgaaagtgctgaaatggttaaagacatgttgatcttgaataagggtggattacctgattatataatcgacccgcaattgagtcacgctattttaacggaacgagtgagcactgctctgaaagactttaacaccgccgtttcaagttcgtttactcggtttttgtggtacaataaatatgagaattctttattgtttgaggaaatcaagaacaccataggagcgaaaataacagtaaccaattgcgacaacatgagtttgtatccttatttcaggaaaactttaaccggttggaagattagtaaaattggaaataacaattctagaatagttgttactagaagcaaagcaaagaaattggaagcaatttatgaatgtttgcttatactgcatgagagatacaaagacgacaaaacagcgagatacgtgtcgaggttttacatgtcggctattggagctagaaacgatgaagacagaataccgggaatgatggaatcgtttgattggcacaagtccaacaaaacagcgacttatagggatttggttaacaggcaagacatggtaaagatgaagtccgtgaagtacatgcctcaaatgacgtatgttccaaagaacgttttcacattttgctctaaattcacaaacctggacatgtttgccagcaacaagaggatgaccacctctgaccctttagtctctgcggctgacatgacgttggctagattgattagagacacttacccaagttgtaccgtaaactttataaatcacacgatatacacgagttatgtactagactttggactcacttcaccgtcaaaggctacaggtgaggtggcgcacactttaaatcaggacctgtatcacaacatgttaactaatcatgctggtcacgttaaagttgacgatccaatgtattcgaccttgttaaatgaagtcgaaaaaggtggtaaatacacgggattacacacgaaacctgatgtgatagtaactgaccccactatattgaacattgacaaccagattttgttagattgggtgtataatgctagtgttgtgtacttctgggttcctctagaatgtcacaacatcaacaacactttaatttatgcccacaaggattccaatacaccctttgagtgcaagaaagagtggcacgatgctatagaaaaagggtttagtttgaactttgacgatgtgaaactgggagtcaaagtgcatacgttgaagactttcgacgcaataagagtgtgcatgattcagagagaagaggttggattgtgggctgaaccttggctcactaatgcccgatatgtgaacataatggtacccagcttcatatttgacctcgaatcagtagtttcgagaggcgctttgctggaaatgcaattggctacaatcaacatagacacattggaaaatttgaggcgtagactgttgaagcctgacactacatttgatgacttgttggtgcaagctagaaccttattgaacaccacacagtacactacaagcatggtgaggggtaaatatgaagaaaaagtgcatgagatgtatcgtacagctaagatcgcttgggcaattcacaacactgaaaacaaaatgttcagtttgctggttgatcccagctcgatttttgacttgctgtgcatgctaccagcggtggctgctgcaaaattcatagataaattcaagagcgtggtttcaccatacgtttcctcggtgaaagctatgattgatacttacgaaaagaaatctgacattttaaaggtgttaagcaagttcgtgaatagtctagaaaaattgaagccgttgcagttggccccgaccaagacgatagtgaattcagcaaatcaaatgttaacacgcgaatctagatgggtgccgaaaatcaagttatacattactaagaggatagggttgactgaaatcagttgggatgacaattgcccaacgtgcgacgccactatgatcggcgttttaaataaccactttataaaatcactgtcaaagtaccacaccatggtgcactcaagtgattgtgaacgagctgctggtaagacgatcggttttgaagatacgtgtgacataaaagtagtcaccccattgttaggtaggcacggtttgctaattagaccttcggatctagatcttgtaaaagggaaaaacattggcattgacacggtcaagcccaagctatatgtcaattgcaagttgattttaactgaagttaacatcgttacaaagatctcagtagcgtacagcaagaattgcatgattaagatagtaaatgacgtcgacactagtgaactattcacttctacagggggaggatccgttttaataactgaggataaccaaagattaagtgcatccacagtgtttgatgttagctcgcaagacgcttggatcaattcttgcggtttatcttataacactagaggatggaacgttacgatgggagaaattctgagttacaacaggttcaaattgggacggcaactggagccgatggaattgattaacactatcgacgcaattgattcaggatatctgacaagtttaggatttgtaagcaatggcaagttgttacagaaattaagcaattgtgacgcaagcgtggtacttggtgaagcgtatgttgacgtcgacacaggttacttgatttccgacattgcagcttattcaggtgtcagaatcgatttgtcttccaattatgctaaaagcgcacgtgaatcgatctatggtagacaattcgcaaagctggattgtttggagtttgactttgttgaggacatgcaagttgagacgaagttcaagtttaaaaacggatatgattacgaatgtttaaacgagccacaacacgttgtgtccagcacttcggtcctgttgatgaatagaacttgtgaatgcggatccaacgtcattgtgactggaggaccaatacatcctagagacgtaaagttggcaatattatcccacactaccagttatgacaaaggagtgtatcacctcaatttagatactctgataacggacaaatacttaagcgtcaaaattgacaggccaattgatacagtgtccgtcacttccagtttagatacgaatttggaggacgtttcggctcaaaatgaggatcactcgaaagatgaagttctaaatagtgaagaagttaccaaatggtttgacacttgcgatgagaatggcataaaaccgttagcaaagatgtcagatttaagaactgaatacgtaatatacacaagcgatggaacgttccctataaacgatgaagacatgttggcttcaatgtcagctacggtaacaaaaacccgagtgtcagcataccatgactcgaccaaagacgagtgggtgtatagaaatgttaacgtttatgaagttgacaactcaataaaacatccatttgaagatttacccaaagttgactatgtcgcaaaagatctagaacttgcagaatgtctaggaggggagatgaacgatgtggtcggaaggtataagaaagaagctgaggaaatgaaggttcacgcgtccagttgcgatgacgacaattgcaagtacaaaaattccaaaggaaaacatttattctctagttgtgacgaaaactgtttgactcaccactcaatagaatgtgagatgaagagagaggttagggcatcgtcaaaactgttggatgataacggtggggcaggaacgaaaatcatcgctgatttggcacacaaagaaggagttttattagggaggcacatggttaatacaccttgtgtcagagacgtgaacacgttcacaactgacgacgataaatcgatgattgaaacgatgttaacgagtgtaagaatgaaattaattgatgtggcaaacactcaagctcttgaaattgaaggcacaatagcaggcgaccctcaatattctctacgcaacatggatgattcaaaagtgtacgattacaaattccgatttgtacacttgtatagtgcagaagctgatgctactgcagaatcacatgaagccggtaagcgcttaattgaattcaatattaacttgccagagcataagagaaagagagacgaatcttacaagtataacttaatggcttatcgaaagaataacgtgtttgaagaaatcaacgttcctgaacacgcgcaacgagtttgggtttccgaaccagcagttggtgacttcagtgacgttgaaatgaataaatcaagaattttgagtaaaccctcgtactacaaaagattgaacctggacggaaaaatcatggatagaaagtattattatgaaagtacaaactttaagaaagtattgtttaaggtgctcgacgtcgtggatcgaacaaacaatctttgtgtaaatattctcaaagctagacaaatgagagaaagtcccaaggatagattgtccaacagattgattcaagctgaaacagctagaccccaactagaagtaggtttagtttacaatagcgcagtagaagttaaatcaacgtctggaacgaccattccatctaaagatcagtgggtattgcacttgaaagattggcattggttgagaaatagcagtctgaactgggatgaacggtactccatcgaaatcaattgtagacattggactctaggtgagatgttagattacctttactacgacgaaaaaggaccagtaattaacaaaatgaaaggtacttcataccaatggctcaatcacattaatgcattatattgcaagccgtggacgagtgtggaagtgccggaaacgacgaataagtggacgaagaaatcaaatggcaaattctatgatcagactggaccgttacacgcggagttgttcaccattcctttaagcgctttgtggccgaaaggtacatttttgagagttgaaggtatgaaattttcgagagacacgttaaaactcgtggattatggagcgagatacaacgcttggtgtttgttgcacatgatagcgacaatgaccaaaaacatttggatacctataagtgctccatcagatttcgtgactgcaatgccagtgataagaggaatgaactgttgcagtgacacacaaccgtatgattactcaaaacaagaaccaaacagaccaatgaacccagagcatgtgctcaagaatctaccaaaaaagcaaaggaccagctggagtccagaaatgtgcactttgagaagcgtgtacattcaaatagcagtatcacgggatggcgattggagttatggactgtgccaaaacgcatacaacaactttagaccatatatagctgcagcgaaacatggtttggagcaaaaattaatcaccccttctttaccgttagtgagggctattccacacttgccaaattggtcaggacacactttaacttggccaggcacctatgacaagtcttggcaattaggaggtgcacctttcagtcccaataccggtgcagttgttttgccaccaaacacgaaaatcaattacccaataactcaggaaatggcgaaacgtgccggatacttgcacgtgagtgatgctgaatcttcgttgaatgagtactaccaggttgttaaagaaaaatctaagggacattttgacactaggcgagctcatagacacacaccatggtcagagagattcccttgcggacacactaaatccaacatgttcaacaagtgcaggcatgatgtgctacctttaatgtttagtgactatcaagatcaaaaaggtttggatatagaaccaatggtcaatgactctacggaattaatagttgctttaaattacaatggcagaaagtttgacggaacagaagtgtcatggtttgaaacttatatgggtttcaatttaaacaaagcaaacggcttaaacacattattgattatggaaaggcaagattccgaaagtagaagtcggaatgtgaaagggaaaaatgacagcacagatgacaacgatgaggaaagtgaagacaatggggaagagttcggagaaaaaggtcaggaagacgatgcttacgacacagcaaatgaagacaatgacagtctcgatggtgagtcagacaaaaccgaacaaccaagaaaaacaagtgaggagcaggagagcgttttatccccgagtgcccaaacatacgttgaagcaatgcgacaaagattgaatgacttgtttccaaataaacgagccatggggagtcttggggaatggctgcctatcaatgaatttgaacagagaatagaacacaacgcacaaactaccggacttaagttaactggcagagatgagatagactttttcataaaattaatcggaaatgatacaaaaaagagtgatctagatgtaatgttagacattgaattgaggaaatttgtagacaagcctgaaaagtacacgtacaatcctttgttaggtggaagaaataacaaaagattagctctgggaagagatttactggaaatggagaattgtcatagtgttagcaaaatttataacaattgccctaagctagctgaagcgcattacgattttctcaagaatttacaaagtaaagttgacggattgaatattcaagagcatgaattagtgcattggtacagtttgtgcccaggaattgcaatgagaagcccagctaagttgccaggaagacatatccacataggaattagtgaccggaaaatcacagatttgggctttgaaactctggaactgggttccgatcctggacgttttggagcatgcttaagagtgatatgtgcactgttagcaaatgttcaatgtacgcactttttccattcaggaagacccaatttacatgttttgtttgcagagatggtgattggagaaatattagacgatataacggtgaacacggttgtggctcctttctcaacatgtggtccatttttagatggtatggtgttagttgacacttttaaggcgaaagacgcagcgagatacatatctcaaaacatttggtatcgtgaaatttacggcatagacgagaaagaattcaccatttttggaattaaagaatgttggtatttaggcgattcaggggcgtggtatagcaatatgaacgtgaacaagctgtacaagtcatgggctaaaggcataaacatgcacttgatatctggacaaataaggggtaagttcccgtacggaatggacaaggtaatacaggccagtagcggaaaaacagaccaaaaactagtaaacaagttggacccaaatacattgaaagaagaaaccagaggaaaagaacccttgattacaacaactaaaaccgattcgcacattgataaaacaatacagcaagtgcaggtggaggttgatgagagcatgagtgaaattgttcctgttataggaggtgttgacttccacaacatcttgttcggtgaacccaattccaacacgagtttagaagaatacaaattcactgataacaaagtgatggagactttacacaatccacaggttactagagattgtccatttaaggctatagaatgggcattgaaatatgttgtaaagcttaagtttacatccaccgttttgcgatcagtgttaaagttcaaagatttcatgaacgacgatgagataatatccagattaaagttgataggtcactcattcacgtattctgggtcaagcaaatcagtgatgtttagttgtaaaaataatttaggtgaagtggaaaaaccattcaatttgtatgtaacttctgatcaaattggaagaacgcacttgacagtagtaaaaatggcttaccgcgccttaccgctgaacaaagaatggtcaacgtttgaacctttagctgaaaagatgaatcctatagaaccaacagaatccactctcatggaaatggaggcaatgatgatgggagtgttaccagctactggtcctatgaaagaacaattacaaaacgtgaactttagaatgaacggaaatgtagcaagaattatggaaagatctgagtcagttattgaaactagagcgtcgagagcagaaggaaaatggttatgggtgtcgaatttaagccccgggaaagtgtatttattccaaaacaagttaaacagattcgagcccagaatagtgatgaattctcagacaggaacattcattagaggtggcgttgatcaaagagtagcaattgacatgggaacgcgactatggtcaacaggcaatgaaatgtcgcgaactattaggagtgaagctagtattgggtttttgaatgcggcgtcaaaaatttttgccaatgatatagctcacgaattggcggcttggccgattgacagagaagccaacttaattttgttttcggactttgacaacaggaaccatcatcatgcggatgacgcagatttgttgaggagaactagagttggcaacattagaataatttgcagaaaagaagacaacatgacttggggagtgaaaatgctagaggcactgtacaagtcgggaccggtgagactagctgtcagacagggaattccgtatattacttgtcttgttaagactccttggatacaaaaattgtacgaaggtttggacgaacagtctattttgtatgaagacatggtggaaatggtcacgaagtttgacaaagttaatttggagaagagtggtaacgatttcatgccagtagtgcaaagattgttttcaaagttcaaaagaaaatacaactttggcggaccaggacaaccgatcacacataaattgacgggagcggaattaaccaaggatttaatgtccttcggtgctggcgatcacaaatttaaaatcgaagagttcactcactatgaattaagtgttgagaggaacacaactcccgtatacttgagtggttggattgacaatgaacattatgatccaaaaagttggagtcacatggtggtgtcggctgtgggctatggaaaggaattagatgagacgaacaccgtagacgaattgcaaggtgagtttaaggggttcactgccgtagcggctgaatacaacaaagtcgccaacagtagcacaaagttgcaagaaatcagcgatgaatcaatggcgaacatagtttcgctaaacacaatgaacacgatgaggttggaagacaatagtgattcttacaagttgtacacgagtacaagcaaagctcctgatgtcatattggttggtttttcagctgcaaatgacgccataaatggagatgttgtagaagagcaagtacacccaaacatgatggattattacgatgatgagactcacatgttagatagtggaatacctcttccgaacaaaaacattaggttggtgcacaacggtgaattttctggaattaagaatgtggcaaaggcatcaatggtgcaatacccgacgcactcacaaagtgcttacattggttcttacagaggaggactcaaggctgtaagtgaattgtacggtagtaaactagaattgaggcaagtcgagcacgatgccagacaagattgcagattgtttgaagaaacgtactttattaacggctcaacaaatgcattaccggaaataaacatagattacaacacagtgttggattggttaaaagaaaggcccgacagcgaaaagatcctcaaagactttgacgaggtgatatctgggggacttgacattgtgggaatggacaaggtaaacatacacgaaaaattggaaagtagaatgaaggatgtgcttatggaagatttcgaaaaaggaactaacatgcctgaaacgctagaagagcaaagaaacaggttaatagcgtggcaaagaaaagggattacaatgatatttgcaagtttcttcaagcaagtcaaagatcaccttaagagatgtctacgtaaagaaatagtgtatgtggacggaatgacacctccacaaatttgtgcgttattgaatcaaattgatggtacggacattacatttgcggaggatgacttaaagaaacaagacagacagactgaccacacattattggacactgaaatggaaatatacaaaagattgggagccaacccaagaatagtagacatgtggcgcaccgtgcacaacaaatggaggggtaaaggtataggtatcaaatttgtaagcgatgccagtagacacacaggtcaagcaacgacagcaattggcaacgcgattgtgaatttgattgtaaaacagaggttggtcaaacgattagggaaaaagctcaaactaatgttgatattgggtgatgacaatatcattttaacagaaggaaaaattacggagtctgaaatatcattaaatagtgcaagacattataatatgcaaagtgatccatcagtgaggaaagattatggaacgtttttgcgaatgatgatctacagaaggaaagacggaatgttagagtgcggaccagacgtagtaaggttgtgcagaagatttcaagtgttgaatggagtgagtgaacaaaccgatgaaaatgtaaaaatgcgaaccatttcgtattgttgtatgttaggagataaccaatacacgagaaagataattagtgatatagggaaggacgtaaaattgcaatcatggtttgacatgggctctctaatggaagtaacggcaggaaagtatcagacaacggtggaaaaaatagaaggagtgtacggatggttgttaaaaatgatgagggagcgagaagtcgtgattcgctataaattagtaccagtcgaaaagagacaataa

SEQ ID NO: 1173 - DNA, 6568 bp, Sichuan alphaendornavirus 22
  source 1..6568: mol_type = other DNA
gctagctattggtacaattgcagacatatcaataatggaaaatatagttaaagctataacaatagacaagccattattcattgtaccaaaaggatacaaaacagattatgatcatgtactacacattgacatagacaatgatacgttaaatgacatgttcaattatgaaaacaactttgaccctgacaagttcttgaatattgttaaaatgctcaagaatagtatgttgaatttaaattacaaagtgttaatcactatgtggcaaacgccaattaatactgataaagtattattcagggtacacacaagtccaaacacaatgaatattaaggtcaatcttcaaatattaacgacacgtttgaaatatctgaccaatgttaatttgaaaaagaatttgaaaagtataggtcaattttggaaactcacaaatggtatcaactggactttaacacccagtgttataccatctgagaatgacaagtatattgggagagccatgccagagatgagtactataacgaaaggtccattagtagctgtgtgttttggcagttccactactgaattgataatcaaagtgacaaaagaaatcgacaaaacaattaaatgtaaaataatatgtagaaacaaagtggaaggcatattgaattcaaatcaagattactcattgtctcttaatggttgctcaatgattatttgccatggtggttggcatatcattcaattcgcaatagaatttgaaataccaatgataattgtacctgtcatgggcgatcaaatgttaacagctgattggttgcaaagacttggttgtgcaacagtagtcaaccaatacaacgcaacagacataattaaagccatagaagatacagatgtgacaaaaatacaatccaatttgagaagtttaaaatcttcgatgaaaccattggatgcaattaagatcaataatgaaatcaatgtatatcttaaaataccgctacaagctccaaccaaatttgaatttggcaaatcattaattcaccgcaaacctatacacaatttaacgtatgttagcgggaaatataatgtcgagatattgtcatacatttatgatccaataactgacaaagagtgcgtttatttagtatttaacaaatggttcgaagcaaacaacatgcatcatgtgatcaacacaacactgttaaaaagttgcacaatatcgtcagttcaggaatggttatgtttgaaccaaatcaacagctgtatagtaataggtaagcaaggaattctaacaatatacgatgatactcaaagtgtcatttgtattgaaattattttgcaaaccacaagtatgcattgtagagaggtggaggtcaacataaaagacatgatattattggaaaagtatgatgtggaaattgatgtgctcaaaatgctacgaaatgaacccaggatgttaatagattacaatggtatgatgtcaattattgcaggaaacaccattggcaccattgatattaaaaccaataatattaatgtagacattgcaagtagacttaaaactggcaattgggtacacactagaaatagaggagcaaaattgttacttaacataataggagtggtgaacaatatggatgacgtatatataactgattctacaaataatgatatgggaatatatttgattaattcaacagaaaagggcttgggcattagcttcaaaataggagaaaaagattatttgataacaaaagtcccaatatctagccaatgttcagcaacatacttgggtattagatgtagaagtaccacgtacgcgagtatagttgccaagacaacttcaataccaaggtgtgcaaatgatatggttgcattacaagtttgcaagcaatcaaaaatagaatgcaatgtaatctgggcagacaatttgatcaactatgaattgctgatgtaccattatgacaacagaaaacatcacaagtctgattcttctatgatgatagagaatgccacaagtatcagatgtgtaccaaacatgattcaagtggacaaaaagaaaatattatccactcacaatagaaatatcaataggctcattgtttacaaaggccgaattaaatattgcattgaattgagtagtgactttttaagcactctattagctaagatgtacagatcgagaaaacacaaagtcaaatcaagagctaataatctgatcagcaaaattgaatttgacagcactattatcaatcattgtaatgaatggttgaaattgaatgacaataacttaagcgagttaatagtaatagacatgactaaaacacacactgtttcagatgttttgggcaaatcaattgaacgcataataggaggtggtgtaccaagtgaattcactaaacttttacaacaaactatggtatgtttcagtaaaacggaatttgaattagttgattgcgaaacactatttaaggttggtttaggaattgcactagttgacggagaaagagttgtggtaagtttgatgcatggctgtttgtttacttcagaaaagaaaggcaacggtatcaacatagttataagtattatatcaatgatacttgggtttgtagtaactggtatgataatatatgctatacaacatttagtatcatcagaatttttctccatagttgttaatgaaattaaaacaagtatgagtgagttagttaacaaagcagatgaattgataagtgaaattaaaaataaatatgttaactggtcaattgatgttattgataaacgagctgttagaattaacaaagctaaaaatctaaagaaaacattagtagcaagtgtaataccaaattacgaagaagatttaatacaattatctaacatgttattaacaaggccattaagacagtggttgttattgcaatggaattttagacaaccagacgtcaaaacgttaatgacagtcaagcgctttaaaggagatacaagatttgacgtgttacgaacaatgatacggagaaatgataacatgttgaactgtttacaaacagaaaatgagtacttgctaaataataacattcaaattaagttcaaaacacaaattatcatgccatatttagatatgatacaagttgatttccaaagcttaagtgatgagtgtccattcattgaatgtacattaaatgacaacaaagtattgtttagtccaaattcatgttggttttattacctaattaatattaacacgatcgtaaacgaaatgccagcaaacacggatgaagattattacacagaatggttaacaaccatagacggtgttacaacatacaattcagcagaaacaggtttgcaaatattaaaacagattgtggaactgaaaggcgaaacaatgaaagttagaaatgatgaggaatgggtgatgaaagcactaaatgattttcaagcgacgtatgtcacattgtacgaaatcggactgccaagaagaccaattgcaactgagtttcaattgattattaaaaatgaaaacatttatttaataacaaaacattctaaatattgttgtatacttaacacaaaaggaggatcattggagcaagcaataataggtgcagtggttttagcagcaattatggcttttggcatctggtatttcgaattgtatccagagaatattgaggcaacgattaattcagtgatagacaaaatatcagaagggacaatgacagcaattgatacaattcgactcaaatgctctaatatgttaaaaagcttaacttgcagtttcaacaaagtattaaggaaggttgatgtaaccaacttaggttacttgaatttagaggacgtgatactaaattgtgaaatgggtattgacattaatgaagaaaatgacaatatggaattgatatttaaatcaaaggcagggggaaacatggctgtaacaatgagtcaagacaaaatcatgttaattttaggaagaagatttaaagcaaaggattttgatatacacaaagaagaaggacacattttgaaaaacgatcaaatttacttgttaaccaaatacacaagaatggatgaggatgtgtcaactctagaagatgaacacatagaaaccttaagtatgaattccgaccacatcaaaatggtatgttcaatattgaacatgaatcacgaagagtttgtaaacatgtgccaaccggacgagacaaatttgagttggctcaaaatgaactgcgatagagagagttatcaacttggaacaagttggattcatcatgctcatgaaacaatgattaattcaaaagggcaacttatatacaagattgaagacgtgtttagaaaggtcaggatgataacggcgaatgatattaaaatgattacagaaaacagaggtaaaacattcatcaatggttgtgacgaaattttgcacttattttcaaatgtcgtttacaacgctaattacaatgaacactccaatagcttgatactatcacgattgagacatagttatatgttccatatgagatcagaaaccactgagttgttacctagaggtatatacacctgtacaacagaccatttgaaaattaacgaacaacttagtgaattcaaagagcaattagagttaactgcctacaatgtactattgtgcccagttaatacaataaggaaaatgcaagaaagtgctgcaacaattttgatcaaaaagatgggaggtataatagtgacagtaatggctcacaccatattaaatgtgaaaacaatttcaatatacaaaatgccgttattatacatcattactgagcatgttgattacgtgttcaactttgaatgcgcagtcttaataatgtgcgacaagttgaaaggggcaggttttgaagaaacttggatgcaccaagatattgaaatgttaccattaacttacgacactcaaagagcaaaagtaacagcaagattaccgaaagatgtaacaaacgtaagtgcgatgtatggtgctggtgaaccagagtacagaggtttggttaattacattgattttgacgacaatgattttatacctttcatgccaatagatcataatccaataccactaggagaattaggattgtactatgaaggcacaccagattatataatagatttgtgggagaacaaagatttaagtacagcgaatactgcatatgcaccagcaaacaacatgcgtattatatctcatgagcaaccgataagcattattgagagttacaaacatactttagttaagtatccaatggtgagtagaccaatcttgcaaaagaaagtgtttgaagaattaaaatcagtaaatggtaggttgggatcggtcaaacatttgcgtaaacacaccataccaacaagtataacagtaaacaacatatgtaaagcatattttgtggataatcatattgaattaattgaacaattcatgaatcaaccaattagttatagtgacaaagcaacaacagaatggttgaaaaatagaccagattgtacaaaaatattttcggaattggtatccagattagcaggtgaacttgctattaaaccaccttccgatgtgaacgttcacattaaaatagaaagtttgttcaaggaggatccaataatgaactggaaagcacagcaaagtagaatcattgtgtggcaatataaagcaatagctgcaatatatagcccaattttcttggaagcaaaaagaagattgaaattgttgcttaaagataatgtgatttactcggatggtctaactccgtcgcaactaaatcaaagattgagattatgcaagggtgttaaattcttttatgaaaatgatcttactaagcaagatagacaaacagacaaagctattatagatgtggagtttgaaatatacaagttattaggtgttgatccaacggttgtaagtaactggaaagaagtgcacaggaattggagattcaagggaaaatttattaagggttccttggagtacatgcgcatgacgggtatgccaaccacagctctaggtaattttattaccaatttgcaaatacatgctgcttgggcaattaaaaatatggatagaattgtcattgtcttatttttaggtgatgatgctttgtggttatgtagtcaagaaccggataataaagggttaaggaattatattgccacatatttcaacatggaatctaaagatgttgtacgagacacatttggaagtttttgttgtttgatttgcggtactgatgaaacgggtgcaccatgtttgtcaccagatattgtgagaatgaagtaccgttttgaagtgattaatggtacgaacaggtgtccaaacgatatattacaaaatagaactttatcttattgttttatgttgggtaacaatatagaaacaaatgaaatagctagtaagattaaaccgaatgttactttgcctacttggtacaaacaaaacacttgttttgaagtttgtgcattgaaatacgaaatgacacctgaagaagtcatgcaacattacaattcattgatcagcatgatgagagtagagaaaactatagaacacaaattcattttatcatctagcagttggaaataa

SEQ ID NO: 1174 - DNA, 11616 bp, Tomato associated alphaendornavirus 1
  source 1..11616: mol_type = other DNA
atggcaaagaagcaagcgaagcagagacagcataaatttatatatagcggacactacccaaagggtagtgcccgcaatgaaattaaattaaaaaccctcgacctataccattatgggttagagggggcaccagcaaatttcccaacgtttacaaagcgtcagtgccttaaaggggacaaccaatacattgatacgtacttatcggatatgaacgatgttgtgaacactaggaaacttggcattaccggtgtgattgacatatatcataacaggaagaaatacccggtggataagccctacgacgcatggacattcaatggtaacactagtcattttaggaatggtaagtattggatagacgactaccacggtgaggtcgaagataaattatcatttactaattatcgttgtgacctcttgaatgacatatactcatcaagtcatacacatgggacaaacagaaaatatgacttggtgaactggttaacggataaatccattgcattcccatacggcaatatggcacaaaagagagatggtatgcttgaattattaccagggtactatctaagatgtagtcattgtgagtgcactacatatctgccattatccaccatgttgcccaatacgttgaccagacaacaagtaacagactttttacgacagtttagagatgagaaagagtgtttcatgcctgatgcagaggtatatggcgaaatggcaatgatgataccaatgtgtttcgctacgtcaagtggtgaatgctttaattgtaataatgacttattttctgcagtattagaaatatgtgctgcactttactcagaatcagtggcgtactattcgcgcatacggggcacccaattagatgaattgctcaaattaaatatgttacaaggagcaccacctgatgacatgccaactgcagctaaacaatataacgaattgcacaacaggcaagcagcaaaagcgcttagcaaggtaaattcgttatacataaatacgttatatgccatgtcacaaagacaacgcaccgacatgatgatggaacgtagtcatataagcatgtccactgcatcaagaattagtaataccacgttggagccgtttgaggcggaagagatattattaattgcagacctggcaagtatgtatgtgggacaaattgtgcattaccccaccaacataaatacccaagtttcattgcgtgatgtatgcactactatatgcaacgggtcattcttcaatgatctagagctacctataaaaccaacaacaccaccagctgcgtatgtagagatagtcaatggcactatggacttagtgaatgtcattgataaaatggttgacggagcatatttactcttgccacgggagatcaagggtaatctatatgaacacgtagatgaggaatattattacagtgcaacgacatgcagtacggtacctgtcaagtggtccagaccagtgctagatatcttccacaatttagcaacactgattatagatgggcaacattaccacgtacacaccgtgacaaacggccaatacatgcaagtagtcacaatgacagcagcgagtgatccattacacattagatgcatcttaaattacgcggaatttgaggcacttgtgccggtgtacgacacatccaatcccctctccacgttaggtatcttcggcaccaaatgggaatacaagaccatcaatgtcgaattattaagacgattagttacattcgcaatcactgcggataagacgtcaagtgcaattgaagcttactttgccggaattatcagtacacactataccatcggtggcaaggttgtagacttgactaatactccaataacagaagggctaccagaaatcctgtatgcaatgttgatactcagcaataacaaacttgtaatgacatgggcatcaacactacacttgcacaactactcattgcacaacggtgcaattaacttaattgatttttttatcaaccgcattgcaaaaacattcatatctaggttagaagaaagcaacccttggttcgcaaaagtgttgtcaagcccgacagaatttgcaaggcaacttaaagaccacgcagagaaattacaatttgatacagtttttaaaaatttgatgccaacaattgcaatggacagacagtacacattgggtcaaaatatggtaagcaaatcgtttgaaacaccatatgcatgtacacaccatacattggaatgtaagcattcaataggtcaactacactgtgtgtgttgtggaatacagtcaagagaaccattgtgcgattgttgttcaaaaagcagtatatgtcgacatgcatgtcgacatgcatgcatcaacaagggccatttttgcgacaagtgtaaaagcaacgccaaatgctacaacagggctatatgcaattgctgcggggtgtatggctgtatgccatgtgtacactgccctgaggagccagctatactactaaaagggccaactaaagatattgcatctaaaatagtgccaatcataactaacaacgcgcttaaaatacccaaacgacaccagatgccagcaccaacgagttcaacaataaggtttgagccaaccggtggagacgcatgtgttaaaaaatcaaccaattcatacacatttaagagcaaaggcaaatcttacacactattagcagatgccataggcataaaagatgttaatgacataatgatacgcgttgatgactatttacacataccaatgcttgcatttactggagtgtattatgtgccgatcactcttaccgacaacccgataagtgatcctgtgcacacacacaattattgtgcttacacttgcattgcgaagcagacggactacacagtggtgcagttgcagaatattttcggtgacagaccttcgctggataaaacggaggtaattgaattaatcaagagcttgcgactcaactgcttattaattactaacaaggacgaagcagatataatccattacggacaacaatcagcaccatacataataataatgcatggtagttgcgccacaggaattaaccacaaccattggtgtgtaggtcacataccagtatttaatgaaatgccaactggttattactatccacacagtttgggtcccgcaccgcgagatctaagtaggtataacatgtggaaggcaccagcagcagaagcagcggagatgtcaaggttagtacaagtaatcaggaaacaaaggcgtggaacatctgcagactcgctgcaattgccaacagtcgtggacagggatggagtatactggctgaccaatgctaaggagcacaatcctcggtatggtttaataaacacagctttaccgcaatctatcgaccaagtgtttattgatgcactcaatggtgtatcagataagcaaattgatgcctcgtatgcaaattttaccaatgagtggagtaatgttgaacaggacatacacaattcaataagattgcattgtttggaaattaattactccatacgacacatggagcaaccaacaactgatttacctatgtctacggtcgatattaatcatgacgagccaaccattgaattggtcaatatgggcaggctcaaaccattggatgtagtaactctattacacgacggaaagaggcacaatgcagtcgtgtacggagaagcatcaaacccaatggtatcaaatcactttggtaaggggagtgtactccagatatcaaaaactagtttgagttccacataccgagcactattactagcaattaaggctttaggcaatttaaacaacataccaagcatgaagatcgttgatgcagttgacggtgtcgcaggcagcggcaaatctacaatgattaggaatttaaacaagaaagataataaagttcttgtgtgcaaaacaaggtcagcaatcaacagtcatgcaaccgcaggatttcacgcaagcataacctgtgaagcggcagggatgataatagtgcccacattgtgtgtggtattggatgaggcatcaatgattactacagttgaattagcagctctgattgatcacccaaacatggaagtatacatgtttggtgattccatgcaaattggtgcaaaagatatgtcaccaataaagggcatgcgtcaagaaattagcttgctgaaccaattcaaatgcacaaagctacaccacacacatcgtttcggtaacccactcgtcgctaacgttctcaagagttttaataaaaacattacatgcgatgacgataaaacaactacatacgaacaaattagtgctaacgattaccacactgtcgccgagatagcacgaagtaaaagagtcgacgcaatatacacatttatgcacattgactatacaaacatggtaagtgaaataggtagtgaaataagtgtcaacaaggtacacagtgcacaaggtaaggagtttgacactgttatggtattacattggggtaatttcgcagcagaggggacgattgtcaaaagcgctaacttcatattcaccgcgcttacccgtgcaaggaaacacgtaatatgggttctaccgacaagcatacaaatccgcctgaatgagataactaacatcacatatgagggtagtggtggtccagatacaactctaagcgctttcgatatagaaagttgtgctctaactagggcgctgacaaaagttgaagtggaattgctgtcacgtatcatcacatctaacaggaactatgatccagcggtatgcatgcactacattacgtcagactcgatacgtattcaagcacaaacaaaatacctgggcagtaccatgaatatcgattttactgtcgatcgcaaaggttttcaccccaacaacacttgcactaatgcattcaaaaacatgataaagaggagaattgcacaagaattcgacaccaacttcaaacacatcagcaccaatggtgatgaaattcagattgacattaagcaatcaacagttaagaagcctaagttaacatttgcagaagtcgttgacataggatcttgtgattctacaaatattaatagtgtaattgcacgcagcagagccagcagtatactcagtgataaggacgagtattacgacgcaattcaaaactttacccctgaatcatatgcaatatccagtgttataaaatcattatacctgaataagtcgacgtggtctaatataatagcattagctgatgttgcactagcaacgcaggcgacaggcagccgtcttcaaaccacaatacgcaatgaagtcgtatatatatcagtgtttggtggttgttcactgtactgtggttttaaatttttattccctaccacatgtgtagttatcagctcagctcacaatacggagggtagagatggactgataaacactataaactgcgcaaataggcatatatgtggtatagagtacgatgtgaatgcaatactacaattcatcactagcacacaggtgttctcatctgtacctgacacattatgctttaccagatggcaagagagattaacgaacatggcacaaggattatttgaatcgtgtgatttcagcacagccggcacacgccacaaggtaagtaatactgaattagcagagcagtgtgctgattattgtgcaaattggacaataccaacacatcagccagtggatgcatatttcgttaagcaccatgaccattacgtcagccaaccaagcaacagacagctattttcggtaagtgatatgatatcacataatatgggaatacaaggtgacgatgccgtatttgatgtaaatgcagccaacaaaaagaaaattgagaagatattgataagacacatgaacgctgaagagaagtttgatagaccaacgtatgtgcctcacatgatggtaaagagtgctatgcactctgaatttgtgcaacaagtaggagcaaaccacttagtgccaacagcgattggatgtgaagcaacttcaacattgcacctggcaatggtggtggcagctaatgtgctaaggcaaatgttagatgttgacaaagtgcaccacgtaggtgtgagtggtcagctattctgcttaaatcaccatgttggcgatactataagtcaatactcagataatgacatactgctaattaaaaacatgatgtcaagcaaattaaacgcattaatggagagaaagaatgcaccaatcagtcaagaagatcagttatctatagagagtaacattaagtactactcaaatccatccagcatcatgtgctttgacaaagagagtgttcgcatagtacatccagcacttataaatgataatatgttaggaaatacatacacatgtgttccaataacatgcgatgcaactctgcacatggataatgatggtgtgatacacgagatagggaagaatgggttaactttcaaactgggaatgggacacatgcaagtggttgcaattgttggcaactattatttgtgtaaagtcgtatgcaaaccaataaaagtgcaactcgccggaatagacttacaactcaataatttcaggatttttaagtcatcgctagataacaacaacactatcaaaatacccgacccgatatttaggcggctggtagcacgagcatttgcagaacgtgatacttccataaatgatatgatagcatacagtcggtcactattaaacactatgacatacaccagcaaaggctattcatataagtacaccgacaatccattggacctgttacaattctcaatagttgcattaaattttgcacagaggaatagaaaactaacatcatttgtgcaatcattgctaggagcagaactatcacaagacagcaacaacaaggtatcacaactgttgtcaggcgcgcttaagaccattggattgcaattactgcaaggtccgatgaacaatttggtagaagcagtgcacgacactgttagcgcaataacaaacaatctgccaatagctaaggacatatattcattgttgagagatgtcaattatgtggagctgcatcccaaaaaacaagtgataataaaacaaaaccagacaaggggtgggtacctagatgcagagtatgacaacgacacgacaaacatgcgcagcgtggaagaaagaacccacgatgggcacgacgaagacactacagtaacagagcccaaagacaacactacagtaccagaagacgctagtactaaccaggcacgtttaaagcaaaacacacatgcacagggtacggcagtggttaatactaagtcaggtaaaaaaccacagacaagagataggaaatggtacgatatctttggaataaccacaaccaatgctgctaaaagccgtgtaccaaagcgacaggtgtgcttgctgtacgcaggtagtagaggggataatcagcccctcaatgccatcgctgaaatgtgcatgagcatgggcatgtcagtgattgctattgctccgaaagatatacacgaaacaataccaggcgttgattatgaatactacattgatagctatgacgcactaacaacagcaggcgtcaatcagaaaatgccccagctatcaacaatatcagatcatatggtggccgtatataacgtatggctaaagcatcataaggtacatgattacgtattcagtatgtttttcgctgatgaggctgatatggtgcacgcttgtattaacaattaccggataataccacaattgagtgaaacatgggatccaagagaaaaattatcaggagcggggaaatggtcaatggtgcgaaagttacttggtataccaaagccaccatcactgccattgtggtcagtgccttcagcatggttcctagatgatacgaatttgggctacctattcaccaaagcccaactaagtgtagacaaagcaacagacatggcattgcaattttgtgacaaacataacggtaatgtaacactaatcactcttggatcaatggtgccagataactatcaatcagtaattaacaacatgctaaataccacaagtaatgcagtaatatttgttactgcaaaattacaaactatgcaaaataaatttgaatttgaaggcaggtattatagatattgtgactttactatgcaccaacggattttgattattccaaaatgcaactatttattattaacaggcaaaatcactgaagcgaaacatcactttggcgcaggtacgtacgcaacatttagtctaattggggtgaaacaagtggcatacccacaagcatttgatcagaaatttaacgcaaaacactataccaatgacagaggataccacgtgtatgatccagcggcagagtataatcgggcggcaaggttgctggcgaagctattaaaccaatctctcccagcaactacaatagaagttttagagtttgacacactgccaatgccgtgtacagctataaacatcacaaaggaaatacaagcacagcgggtaatcgtgcatggtctaaaaccgttagttaacaattatcgtgtgaattgtgtcttcaacgtattatttgattgcttagcagacaatgcaaaattgtgtacaatggtagagagctatttaacagtgtggactttccatacggtacaagacgttgtcgccctgttgcttattatacctactaatgctgtgatagtcgggccagagtttagtgtcaaaataagcagaaaagatgtgacagacaacgttttaatccaaatcaactcatcactaacacacgcaaattcgtttgaaatggaaagcgttgaacccattaacgaaatggtgggagcaagttaccaccacactatgttaacaggtgaagtggaagcagataatacgttcctgctcacaaagttgtcagagtatgaaacggtgacaatgcaacacgctatagacaatatggtcaagacaaccatgcgtaaatcgacgtccatccactcagtcgaatcgacatgctatgcaggaggctgcaaggtaagagaaagattagcggtgggttacaaatatttatgtataggcagtagaggagcattttacgctttatccacaagtgctgtagatggatcggtgcacttggttcacctacaacccgaagtctatgactgtgtgattgccatacgcttggtgaaggagtatcatgaggctgttgctacttcaaagggtaaagtcaaaaacactagcgtggttgccataaatcacgccacaaggaagaaactatactcacgtggcatatgtgtaggaaatgtgggtgttgtaggggcggataaactttacatatatgacacctgggcgcgggagcaccaccatgaaatggaaaggcaggtgattgcagaggccaaagaaatactcatagtacctgagaggaatgatatgccaatgattagatcacacaacataaaatctatattattaagtgataattacccagtatgtgtcaacaagggtgggacattcttcagattggagtctactgatgaagttacgtctagagtgtgctgtgacctgatgcatgctaaacagcttacaaaggatttgtttatactcccatacgatgataaaatagcacatttagtaggtaatgcatttatttacggaggcacaaaagttacatactccaatatcaaagaggttgaaatacccaagaaccttcacgcgatgttagcgttaagtcagatagagacacccagcatatatcgcttgtgcgaaaacttagcactgcaaaatggttacatgagtctgagtgagtgcccagttgaaattacacgtaggaaaatcacactggaggaattatcactaacacttagacgtaaaatgtccatattcggtgatgtgtttgttattggtgttaactcatgggcatttcaaatagtgcgcaaagggagtggatttgtgtatgctgatgaacagacagtattggacgttactgactccaaatttaatgtatcaaaatacaacacaatatcagccgcagcgcgtgcaacaggtatagcaaatgatatgtcttcactactaccaatagatggtcccaaaaccaacgcagcccaggaagtgaaatgcctcgcataccatgcaaaggaaaaccaactaataatcgtggcagacgtagaggatttatcaacacccattgaagtaatgcgcttcgatgaaattccccaagcaaatgtgatagattattggaataatagtgaattacttgatagtaacataattctgccaacaaaccggaattttaaggtaacaagccgcatccaaccaatacgggttaaaaaaaatttttacctcactatggaggattatcctaaatttgccagaccgtcgcgaagcaaggcatatgcagaagaactgaacagtataaccaaccgacacggagcatacaaagtgcaccgaaccgtcaatttaaacaccagtcaagaagtagatatgttttgtagtaattattttttgccagatgccgacacaatacttaaacaatatagagcagaaccagttgagttcaacgccgccagatgccaagcatggattgataaacacaacatgcctgcatctgtgaaaagagatataagagaaatgctggagatggggtgggaacaaagaccaatcaactctatggaagtgcatgggaagacagaacaaacaacaaaattaaaaaatgcaaggtggttcaatgaggtggtcacacgtagcattgttgctgcaccttatgcagtatcagcgctttttgcagaggtgttcatggaaatgaagcaaagatttaagtctgtgttgcgatcggatgtgttttattcagatggtagcacgccagcagaattggcagctctggtgcgccaatgcggcgaatttaaatactgtacagaagacgacttgacacagcaagatggtcaaactgatagacaaatcataaacattgagatggaaatatacaaaatgcttggtcttagtgggaacgtgcttgcattctacagacaatgccacgacaattggaaatggaaaggtcacggtatatcaggggtgtgggatgcaatgcgattaagtggtcaggtgacgacagctcttgggaatgctataactaatttgatagttcacaacaggttcatgttacgcaacagaaactcgataaagaaagtactatttttaggagatgatatcatattcttgtccaataccaaattaaaagtggcaaatcacggtactgaaaccaaagagttgtacaatatggtaagcaaggtaagtgaccgtgcctacgtaggtggtttcatatctatgattgtatataatattagtggtaaatcgggcatatgtccagattacaagcgcatgcgtcataggtactcagtatgcaattacacgtatcctatggatgagacacaatcaaaagttgcaagtcgcactttgtcatatttattcatgataggtaaaaatcagtggacccagcaaatagtatctaaactcggataccaattgacgctgccacaatggtaccatcaagacactgcaatagcagcaaattgtgaataccatggtgaaactgaatgggagacacgagcgcacatttcagcactcagggatatgttagagaaacaggtggccaacagaaaacagataatgacctggagtgcggtgtaa

SEQ ID NO: 1175 - DNA, 14826 bp, Triticeae associated alphaendornavirus
  source 1..14826: mol_type = other DNA
atggcatgcttactaaaccgcaacatcgcggctaaattcacgggtggcttacaccctcattcaatcggttgcactgcctctccttctggcagtgcaactttaaacttaggaaggaaaaatgattcagtgaggaagatgtttcggaacggaggcaaatccattaaactgggtcaaaattacgcggcgatacctgccgtaatgtcttgtcacaaggacgagcacaaccaatttgtagaatttggtcccgaggcctgcattcctgactttgctcatttagacgaacggtcttttcgaaatttcctgacactgtatgcatttgggcattgttacgttgacatgaccactactaaccaagaatcaatattgcgagcggctgcgctgcagaccgaggaacccatttttgggactaaactttactggtcaacaatgacccccgagttactaccaggctttaagaccgatccctctcctgatcgcgaggccctcaactttatgttgcgtgtgttggccaaatttggaggatcaatcaaacagctcatgaggactggtttgatacagaactacaacttgacacctcatatttacaagaaaaactgcaagtatggatttaaatcgggggaaatgcccgaaccacatggggtgaggttgtgtcacaactgtcatacttgcaatttcatttggcttcagcacccagatgacggagttaaaaaacaacattgcggtgcatgtttctttagcttggatttgcaacctgtggactccgaatggtacatcccactcgtggtggtgtcagatttgacgcaaatgggtgttgggacaaaccaattacacatggcaatgttagtgggagacctggacaaatctggggatttatgcaagacaactgttgataaactaattgcacaagatgtgaaaaacatgagaaaaatcatgtcgaggaagatgttcaggagtattaaagtgaacaacgggatgtcgaagcgacaattagactatctgcggacacataatttgtcattccagctaattccaacgcgtggcactcccaacccacacgccatgttggcagctgaacgtaaactgatctggtactccatggtagaaaaagtgggtgttaaccaagccatagttgagattggtgccagaaagtgtcgtgacaacacagtagtcaccaactggcatggaattgggcctacaatggattggcgcgatgttgagcgctacagcgctctgggtgtgcccacaggttcttgtggacacatgttgcacacttgtgactgtgaactggcgccaaattcattgtttatcgcagtggacagcttgtatgacgtgcatcctgcacatgttatcgaggccatgaccagaaacggaggacaacacttgttatttacattgacaactgcaccagtgaacttcgatgaaaacgagggcaagttgttctttgaccagggtgaatggttcagggacggaagcaagttgttaaccagcctggcgtgcgatgaccgaccttacgaaaacgactggggcaacactaaagtatggtccacagctcacgttatcgtacacggagagtatgtgctgaatctaaacacttacaacgtggttggtaaccacattatgcgggttggacacttgacgaaaaacaaaatgattaaacccagagcaacgtccactgatttgagcttaactggtaaattgacagtacaaataccattaatacaacgtgatagttggttaagtcaatcctgggtaccagtaatagtgtatgaacaacgtgaaattgacatgcaactaatgcgagcactgcaatccaggaatctcaccggtggtgtatcttttgagaaaatgcttgaatttgggttggcttatgcccacaccaaatacacaacacctactaaaaccgtgcagtacaatcacttgagtgctgaagatgtgcgtgtacatgcgttgttggcaactgtgcacacgagaagaaaactggcttggttgttggaggccgacactataaacgaccccaaatcaaattatggtgtcacatttagtggcgctgcatggatgagcactgtggaatacttactatcggtgttgacatcatacgaagggtcgggagttatgcattcattgacctcggagtttggtagaaaaatggagcaaacaattatgtcatggatggaagacccattttgggatatactggatggtgcatcagcatgcacttttgaattgtctactattatagttaatacaactgagacacagccaatcgaaatgagttccaaccccatattatgtaaccaccacggtatggcgtgctctcacggattggcaggtgaaaatgtgtgtaggtgctgtggaatagcaggcagagtgcatgatgatttgtgtgaatgctgttgggcaaaccactgcaaccacaagtgcaaccacccttgtccagatccaaacttgcatttgtcagggcgagggaaactggtaacatgcgaatgctgtcaagtgcaacacaatacgacggtgtgtctgccctgcaaggtgttgatcaccaagaacaacagcagacatgagccaccagtgtttgaagtgccaaaggtgaccaaatcgaaaggggagcacaagaaacccaacttgacaaggaagggcaaggactttgtacgtgacaagcaacagacaaccaaaccaacaaatgaagcgacggctgaacccgttctggatggtcataatgccgacgccacactgccagatgaccacatggttggtaccataatgcaccagtggttgcaatctcgtcaagaaaccagtcagcagcatcaaacagttcaaggggatggccaaccacaaggtgataacgttaacgacacagatggttttgacactggggtaacaccagacatacctgatgaatcaactgaggatgacagactgtcactggaactagctaaattaaccaattacgattatgccatgtccgtagcatatggattgaaacaagcagttctcgagtgtacaacctcgccttctgactacaattgtaaaaatagaccaggtgtcagtcagatcagattcatgccgtttggtaggggttctaccttgacatctaactttcaaatcatgactgtaacccctgttgttggcgacggaaaatgtggttggtatgcattgcaacaggctataggcgatgaagcaagctaccaggacttggtgttgagtgccgggaacaaacgtgattggttttccgctgacgacctgattaagtattgtggtgaattagggaaaaactgtcttttgttgtttaaaacaaaaacaatgtattaccacactaacgcgtcggatgactcttatgtttgtataaggcacgggtccatgattcaggagggttaccaacattgggaaccagttaacgtattgcaacaagacttgcaagaatacttaccttgctggcatggtgcatggaccaatcgagactcaaagaaaatgtcgagggcaatgggcatgagctatgaaattactgagttgagccccactgaacggttgaaattggcagtggaactgaataagaaaaacaggccagcaactgacagggcaaactataagcaattaatgccgttcatttatcacaaggatggaaatctgcatttgagtaataatgttgccaactgccacgacgttagcaagggcttaattgatgtggtagtgccgtcatgggcatcacaactaatggaaaacctctgtagtgatttatgtgagcaagtaagagatgaattgttaacgaccgattatgatctaccagctttaacagatgctgatggcattagcgagacaaaggcgtaccttgaaacattggtggtcgaacttagagagcttgcaaaagaattaacaccacgtgagtttgagagcagagagcgaaggagcaaatggaaagaatataacatcaagtgtagtatgaatgcaaatggcattaggactaccaccttgcagcacaccaaactgaaaactggtgatctggtccatgtgggaaccaactccagggtgacgagacggtttgtgactgttagaggtaactgtgttgggtttttaaaccctgactttttgtctggcactacaaagactttgaaaatgtacattccaaaagagagctacaagagtaagctgttaaatttgttgtgtgcattgcggcaacacgttccaattggtgaatttaaagatttaatagtcaataaatcatcagtgttatacggacccggtggatctgggaaaacaactcacttaatatcacagttgcaacacggagatgttattgtggttaagacaaggattgcaaaagagacaatcatatcgaagcttgaaacaacagatgtgaccgtgtgtactcatgagcatttctcatccaaacaagtttcagcacaaaggttatttgtggatgaatgcaccatgttcaattggtttgatttatttgtgtctttgaccaatttgcctgatgcaatttatttctatggagacttaaatcaagtgggggctattgacacacatgcaaagtcaggaacacgtgacataagaccagtgagtgaatggagtaagaacatcaaaaccatgacaaccacatatagatacggcaaatcgttagctcaagctttgacggcagcaggcatgccgatgactagcatggcttctagagatactgaaatgaagtggatcccggtaaacatatatcaaccagacgtaattagggattttatcaaccaagagaaacctaacgttattttgacattttacaacagtgctgctgacaagttgagacagattactaatgtggacgtggaaactgtgcattcgtaccagtcccgagaggcagacaacgtgatggttattcaatggaacactgagtcccgtaactctaaaatttggttagactacagatattgtgtgtcagcggcaaccagatgtagacacaagttaacatgggttggggtgggtttaccacagggttgcacgctggaatcagtgctgcgtggagcaagagccccaccaagacaagccagacccacatcactcaacttttcagctgccacagctgctatgggcgtgggaatgcgttggatgaatgatgttaaagtggacgatgtagttattcttgacatgcctcaggatgaaccacaagtgggggggaataaatttgacataattaaaacaaccccctggtcacttgatgatttgcgcatcgtgtctaattcacatactgctgacatcatctacaattgggcaggaatgagcattgccgaaatatttgatgggtttgttgctagtgcaccgcgatttacgacagtgaaacgtcatggtacgaacatccagattagaggattggcatctatcacgtttgaatttgataaagacaatttgtctgccagagtagtatatggttcatcaatgtttctgagtaccgtgagagcagaagtcagacaggctgctgttgacgaaaccatgaagttgttgctagatctatacaacagcaacaaattgatcaactggtaccaaggccttgactttaggttgaaagaattattgtacaacaactggggtgagcaactaggaatggcaagattggacatagcagaagctaacctggcaaacgagctgagtgacaagcacaaaagcgacgatgaggaaatgccagagttaataagtgattccgaagaggcgtttgacagtgatggggatacggaggaatttcacgaggcagtgtcagacatcggtgagctgcctgacttcattgatttcgggtcaaaatcgcaggaaaacattccggcaagggttggtgctgactttataaacttgctgtaccctatctctgattacattgtgtgccaagttgtgcaaagcgtattaacctcgcagccagtgtcgcaaacaaaatcgtttgaacccgaaggagccacactgttgcacatatactcaggaggccagagagtgttcacgctgcagagtttatttgaagggatgaatgtgcgtgtaaactatgatgccacagcaggaaaaataagtgaagaattcggcaaagtggtgtccgtgtggaacaaccaaatgctacgtgaatacaggggttcagatatgtggtggaatatcaataaatttaagaaggactttgtaaaatcaaactttggtgacattgtgataggtgagacgatgactcacaagacgaaacatgatctgctgaacacacttcatgaggcagtaattgcccacttggaaagcattcacgtacaattgaatgaattggaattatatgcaagtgagctgttggaaacaaatgatgccgacatgttcaccaacactgtgaatatgtttgaaaattcagatgacaattaccatttgtgcccagatgcggaatcttggtgggcaaccaatacatgtccaagcggttatgatttggtggaattggacatagaaccagattacgcgctgaatttgaggctgttgaatgagcaggtgagcaccagggtaaactgtggtgtgccgttctttttgagaacaaataacatggaagtgcggttggacacatttggaggttgcgcactttgtgcagggctgtcatgttacctgggtgatgtttgcataatgaaaatctgtccgcgtaaaactatcagaattaacaacaaggccttgatcaggaggggtttcaattattatgaagtgggtgtggtgctgaacgtgctaagtgctcgtacagacatagtgcaagaaatgttcgaatttccgctggaaacaatagaaaaggctgcaatattacatcaaatactaatgaccccaggctacgaactcggaatgctatttgaacgagtatcacaaatactaccattgctcaaaacactacctggacgcaaggagaattggaagctgtgtgttcagcacaacactggaaacaaagcattaatgaaagacgtatccgtaatgttgaagaaggaatggaagatttccaaagaaaatcgtgttttggggcacagtgattggactgctaacccaattcaggtggtaaaacccggggaggcatgcttcgtgcaaattgtggatggcactgtttgggcgaccacgcgtcgttgttttgttgacggtaggtcgatcaagtgttgttcctttgatgaaatggtagatcgtatgctcagacggagggtaatgtctgtgccctggaaaatagcgagaatatgcatgatgaaaaatcctaacaaattgggcattggtgcgcaaccagacgaacatggaagcagcatgaacatgtccatggaataccatagacaacacaacacagaagtgtacaatcagttcaggcagagaattgaaagcgagctgttgcaatgcatgatcaaaccatcgcatatattgttcatgcatgccgatcaatataagcggtacaacaatttgacgtccacagaatgcgccaacttgcctactgagatacaaaactacgacattatggaacgtggattcgatcagcttgtggaaaacgtgggaatcaagttcttttacaatgaattaccacaagacacaatgtgtgtagctataactgactatccttacttggcaatggccagttcctgctggggtgtgttttgtcattatggtcaaaaaggtagagaaacaaggtatttcaaaaatttgcttgattgcaacccaattttacttaagatcaagcagatatatggtccatcaaaacctaatgatcaaagcgatgaaaccaaagcttactacaatgccataaataatgcggccacacatcagatagagtcaggtgaggggccttggtttaccaccagactgacgccattaaacgaaaacatcacgtatttgtacatgggattaacggcgctgtggatgaaccccgcacagatttgtgatttactaaaaacacataaagtgaagaaagcagtgttgaagtgtcctgttatgttcaacgactcaaacaaattgttcaaaatagtgaatgaaactaaacaattttatgatgtggcttatgacgggagcaatgagacaacctccctcaataaagaaacttacgagtgcgtggctaatggaaaaatttggggaaatgacgagggtcatcttatatttcacacaactggagtaaatctaggacattctcacacgacggtactgtttgttagcagtcaggtaaaacttccaagatactgtgtgcctgtgcagcacatgcacaaggaacaacacgtggtgtttaaaatacccagaattaacgacctgcgacgaatgttggcggaatgtcgagccatggaagttagaacagtgaagatcgaatccaagttgtacaggtcgttgagtttgcgaatgttacgacccaacactaccttcaacgacttgttggcgtacgctagggcgtacgccaattccacaatgtacacatccattaattaccacacaaggcaccaacagtgtgacacttctttgatggaggcatcgttatgtgtgtattatgaatcaacacggttgaacgatagtataagtgaaatctgcaaattgttgtgtgattcaactaaaccggctacatcattggagaacgtctgggcaagcaccaaggcgattttaattaacatgctgaatgcctttgctagcatggtccatcctgaagtcaaggttgacgatgtgatcaaaggcctggacgcaatgttaaaaactaacgagaataccttcattcaaaatttgactaaatttagggccatcaagattgtcaaagaggaaaggcattccaaattgttgtgcagacaagacgggaagatgtttggaggaagcagactacaaaaagatttgaagttgttggaacaattcgtgacaaccactggtggtctgaccaccagtggattgaaacaatggtggaaccaacaaattgatcaatggtccaaaacagaactagtctcccaattggatgtagagacgacactgagcacgatattacgagagttgagtgtttgcaatggtcaaaaactgagcaccacattgttccagaccgtaggaaagttgggtctgtcattgaattgtggcactgtaagacaggcggcaacgctgattttgtccaacttggcggacccaattcaagtcatcccaaatgaaagcacttatacacagttgatcgagttcaatgggcccatttttcaaccatgtaataagttcaccaaacacgacggagataccttgtcaatttttcatggaataattgctgacaagattgaacaagtgagctggaggtatccagagaatgtagacatgttgagaggtgacactatcttgttcagtactatcggtaccttgggtgatgttgagccattcagaaatcttgcaaagtggttatcttccttaggtacaacatgcaagtttatggtatgcacaccctatgatgagttactacgcaatgacgggtttgaggtgttcacactaaacttggacagtgaaagattaataaaacactgcatatgcatggagtcgagtgaaatgggcattgtggacaaagcaaaagcactgtacgagatattcgacttgacatctggtatatttgactcaagcattaaacaactagacaatttctttaaaggagtaagcttagtgatggaaacgcccttcacccacattggagtgcaaatgagtcaacgggcaagaatccctttcttgttgtcctcagcgtacccttgggagtgtggaaatggtaaccagcctgctggaactcaccaatctttacgcacatttttgactaggtctatgtcttacctcccgttctttcaacacctaatgaattggagggccaaacacttgggggtgtttaacaacagaggagtgttagtggccgcggggggcactcccacgatttacttgcaccaaagagagttaacgggttggtgtgtgagcaagagttcacaggtaattggatacccaccggcagtgatggaagacaataataagaacgaaagagaaatgatgttgtgggcgtcggagctcccaaccgctgcaatttgtatgggatcgatgttgggaccagaggccatcaccaggataaacaggtgtaaaagattgttaccaaatgatattaaacaagttttaataatagggaaccatgaagatggtggccattatgagttcgaagggaaaacatatagaacaataaatcagatcaattataacttgttgtttccattcacagtgttggtaatgtgccatggaggttgcggcacagttacgacagcgctgcgacatgggaatgctgttttagtagacccattctttggagatcagaacacgtgggctgaaatggtgacaacactgaagttgggctggtccacccgtgatttggtgaagcctgatgggacattccggagaattacgcgcaaacaattggttactgctgtgcgaaatgccataaccaattcaaccaagcagtctgacagtcattcattcatgaatttcgtggccagttatggcactatcatgggcaagtctcgtgagtacctacgtcacttacaagaggaccaagactgggatggaaccatgcaggacgtgtacacgaatgaatgcaacctcgcatttaaaactcaaaccgacccaagttgggctgacgtagccgatgtggagcaattaattgacgcaattggtcagattgactcagacgagtcgagtgcccaattcgtatctctacaagtgcaacaaatgtcacatgtcccaacacagaactcacaggagcgaaatagatgtcggcaggtgcgggatggagaatgtaaaaccactggggagcagaaaacttttggaacaacgcaacccctacggtttaggtcatacaacctgtcaaagcgcgtgaggttaagcgggaagatgttaggtcaaaatccaaaagcaccagctaagacaattcggactcaggtggaagatgttgaacaacaccaatcaattcgaacaacgagcaaggtggcccaggctgtgcaaacgagcgaatttgagcaacccttgattaccaatagttccaacgcaatgaccaattcagatcgtgagaataacgttatggttaccaaaacctgtgccaatctgtcagaagaaaacgaagcaaaaagagcggtcaaaaagaaaagaacatgttcaaaagatcaagaaaccaaagacgaattgctttggcactgcaatgtgttgtttgaacaaaacccattgatggaaacaaacacgagtgatcaattggacacagaaaacaggcgcatgtgtgatgatcagagcacctcggaacggacgcaagactcaccgtgtgctaagacggtgaatgaaaatgtgttaacagaaggcacgaatgctcaaaattatgatgagaatgtgagcaagaaacctggtcaaccatccaaaagtttttgtgtacatgcagtggggccgcaatcgtcgcatcatattcaacacttttggcaaaagagaactattgccgcaaaattaacgctaccatcaacattagcaaggggtcgtattgtggaggcaaacattgagttgcatcgggtgacactgttcaacccagccaaccaaggcacatgtgtatatgactgcatatctatgttaatgacgaagcacggctgggcggaaaggaatataaagcggtcactaataaaattatcgcactggtgttcgagcaacccattgcccgttgaagcagagattctggctatgttgaggctaattggaatacccattggactagtggtgcagggtcatggtaggatagtcaatttttgtggcactccaccaaaatgggcaatgagcgtgacttaccagcatggtcttggacacgcggtaattaaagaagttaaaacgatacacaatgttagggaagcaggtcccagaaaagtgggattcacagctctatatcgcgaattgaatcaactggctgataccaccaggtattctattgatgacttcaggcacaattggttatgcaaaccgagtgagctacaaactcaaatgatgaagcacttttgtgtaagtcgagtgaacattttggcgcaacttaaactaaacaattatgagcatgtaataaatagacacggtaagtgcatatttcatgtgggaatgacgtatgatgacaaattggtgcacacaaatttcaaagatctgccatttaaattgggtcaggtagcattgttgggtaccgaggaaggatttatggcatgcatgtgtgtgcccgtcggtgatggtatggtgtttttgccgttgtgtaacactcagaattgcaaacctgatggcattgtaatgtatactgaggtgaaattaatgcctatagcgaggcgtcgcccaaaactaattttgtgcaatttgccagctgttgggacagtgacatgcttgaatgaagccactaggtcatatgcactcaagcacgaaaatacttcattgtgcaccaccataatggatcaaaatgcgacacacctgatgatttatgagtgtgatggtagaaagcaccatatgtatgatgaagtggagttggtcaagcgattcgacgtggatcatgtcattggtctgggtgtgaagatcactggtccaatgtacagaatgctgactgagcaaaattgtggcttcaggtatgcaatattaaagggcaaatcgacagcagtgttggagtttacagatgagcatgtgaaagctggagtcaacacattgttgagactgatgaatgtaaagccgaagacagtgtcaacttcattggagatggaattgggtaacgacaagccatttttaaagaatagactaaaacaaatagctggtagcttgaatgccgccaggggtcacactaacgtgactgtaccaaagtgggctgatatctggggtcccataactgcagatagggtggctgaattgaaggtagacttgggtgccctggagcacctggtggatggtaaccttgttgagtatgagtggaaaatcagtgacgggagcagcaaggtaatcccaatagaagcaaatccactaaatgtgacctgtgtaccacttggtaatagtgaattggtgtgcactaagtatgtgtgtgtcatgagtttcagaaaatctaacaattccatatccggtggtgctgatgaacctgtgaactggaagcttgaccatgattacaaaccctcatcaatgtcgaggtggtggggaatggatgaacctaaaccagcgaccaattttgacgtggataagtggtccaccaggttaaacacagaagcattgacaacagtgttcagtgagaattataaggccacttccagtggaccagttatttcatcggctgtgattccaactaattcactatacactccgatatgtgagtgggcaaatgttagctccaactgggaagtgagcgaagagcaattcgacatgcacgttgtatccttgtggactgacggtgatttgtctgattggaatgacaaattcggacccaccaacgatgccaaagtgttttcacggttaccaccaactcaactaagactaacacaaaaaacaacattgaaggagtatccagcatactcaagacctgtgttaacaaagtgtgcgaaccaagaattcaacgccgtcacaggtagattgtgcaaggtagtgacatataggaaatttgaatataacattaaacatgagattacagagttcatgaacacttattttgacccggagaagcataacctactgtgtgactaccagcgagacaaattgacgttcaatgattccaaagtattggactggttacgagaacgacccgatagcaacaagatagctgatgagctggagatgatattgtcgtcagggttggaggtgaacccaataaacaacattaaggtacacctgaaattggaatcattgctgaaagaggtgccggcagagtctataaaacaggtcaaagccagaccattgatgtggcaaaccaaaggttactgtgctttgttttcccacatcttcaaagaggtgaaaatcaggttgaagaacatgctcaaagcaaatattgtatacagtgacggattacgagcggatgagctagcagccagggtaagacaagttagtgatgccaattggctactagaaaacgatttggcccaacaagacaagcaaactgatcaccaaataattgcatttgaaatggcgttgtataaagagttaggagtggacgctggtgtggttaacctgtggcatagatgccattttcactggaaatacaaggcagcaaccgttatggggatccgtgacgcaatgcggctcactggacaagctaccacagcaattggaaatgccatcactaacatgttggtacacagaaaattggcacaacaagctggaaacaatcttaagttattccttatcttgggtgacgatgggttaatgtttacagaagagatggtggacgtgcataaattgaacgcagaaatgaaaacaaagcataacatgatgtgcaagcctcgtgtgagtcagcaggtgggtacgttttgctgcatgttggttgccaaaaaccatttgggacaatttagtctgggcccagattacgtgaggatgcggagaagattcgaggttactaatggagtgagtgaatctaccgatgctaacttagcagcacgcaccatgagttatgccatgatgttgggtgcaactccggaagtgatgaacatggtcaccatcaatgggtggcccatagaacccttgagatggtatgacgttgacaccactatacaagcttgtagggacaaatacagcatggaggacaatgaagtgtacaacaattatcatgaattaatacaaatgatgaacactatgcgcacgtatgatcatgacttcttgcattgggaggaaaaatggtaa

SEQ ID NO: 1176 - DNA, 17478 bp, Vicia faba alphaendornavirus
  source 1..17478: mol_type = other DNA
atgaaaaaattaacagcaacaactaacaaaaaggaatcgccgccggctccagtcggcgacccttttaaaaaaacaaaagactctgtatcattcacgggcgtgaagacagagttttatggagcgaaaacgccctgcagcactggcatttatcacacaacttgttgtgtgccgtgcgaagacattgatatacacgaggtagtcaaggccgcgtcccgagatgatgcacgccactaccaagaacacccaaactctccaagcaaccccgagctggtcaattcttttaacaaaggtttgacgctcgagagctatacagcgagacagaagggcgagcgtaatctgcaccgatttaacagaaatattaacgctctagttaaaaacttacgcacgcagaagaaacaaactgagagaagcagcatatactgcagccccccaagaaaacatctgggaaggcggccacacatccgaggaggctcactacatcccatcccaattttggggcagagcgaccaggcacttggcaacaccacaggtgtttggagccctaaccgtgcgcccagcgaagtgacccccagccaacggcccggcattacaaacaccacgcaggccaagagcagtgacggggggcaaccacccaacaaaagtctcccattccatttcaacacccacacacacacaaacaaaccaatgggcatgcaccacaggaaaagacaacatgctagcgtgagggcgcacaatgctaccaagtctgccagagtttccccaccaacaccaccagagcaatgcaaagcaaaacaaactcaggttggcaactcccccaacgaggctgaagtattcaaggcgatgatgaacaattaccggcggtcattggttcctaaagaaaaacccaccatcataaagcctactattccatacaaagtggcgtcaagttccattgacccaatagacatgcccaggaacagaccattgcagtccgtcggggcactagactgctatgtaacgggtggcatccaaaccaaagatgtgactggcagtggcacctccaaccttgaccggtttaatgccatgttacgcacactgaataaatcaggcatgcacacgagcaggtccacatctatgacctcagagtttgggggcagaacaatcgggttaaaaaaacctttagattctatcatccacaacgtaaatttgcgattttgtcacacccaagtacgaacatctgaggtgttggccagtgccagcaagaaatatgagtcaaacaagaataaacaaggcaacaccgctgtcacaacaccagcaggaaaggtgtgcgaacacagcaggtttgacgtgaaaggggaggtggaattcacctgcggatggtgtaagccctgcaagcagttgataaaagacgctcttgaagttacacacaaacaagggacatggagaagaaggccattagccattgccgcaacgaaaaagaatttaaaggagtgtggcagcacgaacatgtttagcaaaaacaacctgaacaattttttaaagtatagcaagcccctccacaagctaatgaaaaagaaaacactcacagcgatgtgctttgccagcgatccaagaaataagggggcaatcttttccacaacggatgccggcaacaacagggaatccagcatgattggtagagatttagggatgacactacgactcaacactctaagcaacaatgctatacagtacatattacacgcttacacgaataaaacgctgacccactacgtttccgaagctgactaccagtccttcttgaaatctacacggaagaaaacgtctgacactcccgccatagagattgccccatgcaagaggtacacacatttataccctgaaggatcagaaaaaaatatgggaggcacactgctatacaaactagtgctccaagtgatagcgaaacgtgcgcaaactccacaggcaaatatactacgacgcgacacatcgttaaaaggtatacgcgttggaaacagggtggtcgtgccgttgcctagcgtggaacacagaattcaagacggttatgacagaggcgacttcggtttgtgcatgaccggccatatggctaccagagaaactcttctaccaagtgaagcaccttacatgcacgaaatgtttggacataagtgtcataggtgcaaaggaatcaccgtcctcacgaaaggccacacaggagataagtacgatgctagcaaggcaacatccagaggcagaatcttgaacgccataaagtatggggttggcacagacaaagacctagcggatgtttacataaacacacagctgataaactcatacagtgaatgcgggctaaccactgaagcacaccagtggaacacacagtgcgggttctgtggacaccaggtcttagatgacccgccagcaatggtagaggaaatttgcgagctggtgacggcaaacactgacaaccccacgcccatgggattactacatcacctggaaaaaatgggttacctcgacggcagcacattagacgcaaccggcgaggcacgagtagtcaattacgattaccaaactctgaagcatcagctttccagggcgaggcaagacgtggttgttatccccagcagaataaccagggacagaagagaggctcttcaacaatgcgcagtagagctggaaattgggacagacgtagtaccccaactcaacgacagcacactatacgcgaccacaaaagtactgttagcaatccccttcgtgactaacgattaccaatcaaccttcgcgtacggctcaacagacttaggaataaccggtgtgaccccgataaacatgtgccacttaacaccggacctttacatggccacgaggccgtcaataacacaagacgccccagtcatgaaggagtcgaacacccttttaatcgacatgaacatactaagaatggacccaatgtggctcataacagagtgcttgcggagaaagattactactgcttactatgtcacccccatgctagagctggatcaaaacccagaccaaacaatattggatggcgaggttcaatttaggaaagttgaaaaccagatctacgtcatcacagcctggagcgaccgacccatcagagtcacaacggaaaactacatgaactggacgaaagtggacgctttcgtcataggcgaaaatacgtatccgatagacacggttagagaagccaatggcatatccttgcgcaggatagatctggcagccagttccacctttgagatgtccgaagtcgtagagaccgtcggtgacagcatagagattagcgtgcccacggtgtactactacgggaaaccagggaaaagaaagctgtccatgtctggggagaagaaagtgaagttacacagagagctgtacagaagaatgatgattcgtaacgtcagtggaacgaacagtttcaaagaattagtagactacggcataggaatatcgaacatgaagtataacatcaacgacatggttgtgtctttcagtgacataagtgatgacacaatcagacataccgccgctttcgtatactcaaaaatgataacgagagcgaacagcatgcagctgaccgagagagtgctagaatcggtgaacacagcgcgcggctttctggcttcactgttaataagccaggcggaaacaatgttaaaaatcacaggcttggatgaaactatgctgaccacagtaaacaggtggatgtctaaagggtcagagatggtgcggctgaagggtatgctgatgaacattaactcgttagatatagacaatttgatgtgttattcacgcgagccagtaatccgccacctcagagcgcaagaaacacttgaactagagcccacagggacatgcccacataagacaccagactttgtgatcaaggaatgttctatgtgcgaatgctgtggggtgaacccagcaataggtgcaatcggtttttgctccagttgcctgccaactgacaaacaccaatgcgatcacccttgcaagcatgctcacgaatcagaggccggaaccagatgctcctgctgcctcctaccaatcgcaggggaagcgtgcccatgctgtggagtgaacaggcaaatagagtcggagatactgtttgagaactctgaagagtctgctgatgaagcagaagaacaaaaccgagtcaggaagaactcgaagccaagaagaccagatagagaaaagggcaacaggtcaaacaacagaaacaatgacagtcgtaggacagacgctaaccaccacagcaatgtcaattaccatcacggtcacaataagccgcaacgacaaggcgccacccaacaaccacccaaaaggagcgcagcattacaccctgagaatgatgacaatgacacccccgactcaaccccgacggtgatactaacagcggatcccaccaccaatccccccggcgaacgccaagcgcccggcggtgacaacatcccacatgagaatgacattcctgggcccagctcaaccacgacccagtccagccccccagatgataccaactacagtgggccggaacacaacaggaacatacagaaccatcgaatcagacttattgcgcaaacaaatgagttcttcggtgacttgtacgcttacggcaatgacatcgcagtaaagaaaaattctcataagctgatgcccccaaacgagcaaaggctaagaagttgtttccaatttatgaacatgggtgactctatatacgccacggagaacctagaggtaatcaaaacttacaacacgtcaggagagggggggtactgcggatacaatgcgctaaaaatattgtaccccaacttggacttgacgctagaggaaatgcaggaaatagttgggtcagagacccaattctcagactgggaaatcatgcgcgtggctcaggctaagcaactaaacttgatagtggtcactgaaaggtgcgcactagtaaacaagtccgtatgcagcaacgagtttggcgtcatctgccactgcagacatagaggcgtgatgctggagcattgggaggcagccttagcgatacaaaaggggttcgcggactaccaccccacttttactaacgctttaaccagggaagacctactcgattttgcaaaatcgtcaggattaaacaaaaacaaggtaagatcgttcgttttaggtgacccaaggttattaaaactgcaaacagagatgcatgagtcactaagcaaagtcgtagaagatgtcaaccctgcagggtttgttaagataactaagggatccacacattatgtgacaaatgaccgcaacaacctgggctacagcccgcagtacggtactttcacagctcagatcaccgaggacaaccaagaattggttgaacttctgctactagcatacagtgcacctgccagggtgattcacacagattggttttacgacaggcctgagagtgtgccagcagacgccacacaaggcattcatgattatggcaagcagctggtacgggacatcgcagaagtcaaccaagcatgcgcgggagatctcataaaaagcgaactaatccaaaacagggtagactgcaagtatgagtacatcaacaatcacctgtttaaggtccaaaaaacagggaagttaaaaccaggggatctgataagcggcaaactggtagggatacaatccaccagctatgtggacagccatgtaattggttatgtcatcagaactaaccagttgtggtgtacatgcgtgacagaaaagtgtgccaaggcaacaaaaataaaagtggatctgtacaggaaaaacacaggaagcggacttagagccctgttcggcatattcaggtgggacttcaggcgggacatcaagactctacttgaaaaggccactgcagttgacgcaatcgcagggtggggcaagagcacagaaatagtgaaacttgtcaaccaggactgcaccgtcgttgcgcaaaccagcgctgcagtaagcaacatactggagaaactcgaacaagggggcaagaaaaacatgtgtaaagtgatgtctatagaaaagtgcatgacacagcaagtgaacacaccaacattagtgttggacgaagcgtcgatgatcacatgggaaacgctgagcttaatcacaggcccacaagtggagaatgtgtatctctacggaaacaccttacagatatgcgtgctagatatgtatcggacaggtgggagccgggcgacaaaaagcattttggagcaagctggcataataagacgtcattacaccacacacagaattggtaacccactagcaagggaattgtccctagtgacgaaagaactcacgacaaatgctaagcacgagaccaatttttgcacgaaaagctgggacgcagttcgatgggcagaactaacaagcattgctggctccctagaagagccagtaatattgtgtttttacaacaacgctgtgagagcagtgatgaattacctcaaggtggggtgcagagtagacaccattcataaattccaaggactggaggcggacaacgtgatagtactgcagtggtgcccaaccggccaaacccccggcaggatcactctcgacaaacaccagtgcttgtcagctgcaaccagagcaaaaaaaaacttggtgtggatatccgtgaacgagtacagcaacaacgtgccgttacacaaaagaatgggcgctacaatcggtggctctaaacacacccaaccagacactgagaacaatttagcggacaaaacactgcaggtggtgagtcatttattgagcaaagtcatgatttacagcaaggacaaaacaatagaaagattagagtgcagccgattacaatctcaggaggaaggcaaccttgtcatgttgaaaaatacactaacccacctggatgtcgactacgtctcaggaaacgaccaacactcgttgagaaggcaaggctctggtaaactaaacgaaaaattcaaaagcatgttgagcctattttcaaaagagccagcaccagaccacgtctcaagcagtacactaggaaagttagctgagatagtcgaccaggcaaacgcaaacaaggacagaataaatagtcagataatgaacatatacacagttcagaagaacctagccatcagcaacggcggctccatagcagcagcagtcacaccggttttaacagccatgcttgcgcaaaaacctggcatcacaaaagccgagtgctcatttgacgaacccacggaaactctcacagcgaacatactcatgttgggggttaacgtgttaaagatacaactcgacttcaggaacgataaagtgattctgggatcaggaggcttgcgcagttttgtagctgactcttcggaaatcaagcaactgtacaaccaaaaattcaactgctgtgggcattacgtactgaagtacaggaactttgatacggaaatatctgtgaagaagaagatgaacttcgagcgagtgctgtggattgtaaactattttggtgtgtgcctggaaagtgggagcctacacatttcagttacaatagagaatgagctatataagatgcaatcctacgggggatgcagcctgtgtggtggaatggtgatcttccaccacaacaaaccaataatagtcggcgacccctcctacaacacgggcaacagccgcacagtgcggttcaacagtaaacaatctgataagtgcgggcccatactagcatacttgaggttatggaatgttgatagcggaactggggttaagctaccgtatgacccaccggtgggccgaggggactttgatatgtttgagggcgacaacgtaatggcggcgctggtaattgaaagggttctgaaggggccttggatgatggcagcaaagctgaagaacatgttgactaacaccaatcaagacctgtgcaacttttatgacaacaattcccctgagctttttgattcactcaaggcgagactcgagtctaacgggttcaccaatttcaatacgaacttggtgaacgaatttgttggcggaacgagactggagtttaacgggttcaccaatttcaataccgaattggtgaacgtgaacagcatggacttaaggtgtaggcccatattgtgcacactcgataaaagatatttggcagcactaatggaccaagacaacctgatttgggtgactcaaatcagtggcaagcccatacacacaccagctggggttacaagggtaagcaacaaggcatttaagacgatggcggtcaggcaaatgctaaacagactagagtttaagctaactaacactcagttgagccgggacaagcctatgggggcgccgaacccgagggggccgcttttaaaatttatggcccagcacgaagctgacaatgacaaagtcgcagtagcagcacgcaagtacaagggacaaactcaagctgcaatgatgaaactaaagagcagaaggatgtatctaacagcttggatggttaatgggaacagtgaatacgctagcaacataatgcagcagcataacgtgatcaccacttccaccaattatccggaaaacaacatgttaggcttggtggacctgtacgtcgcgcaagctatacacaacacggggtatacgtcagccctctacatcaccaacaacgcctgcacagcagttttgtgcgggcactgggattggttttcatgcccaccagatgacggatggagcaccagcaggtttttgtccagcacacacgacaccatcaccaacctggccgacataaagtccatcctagactcggaaatagccaaactagacaaacaagaggaattgtcagaagaagagacagccgtgttaaaggaaaaaaaagagcggtccgaaaggatccacaaccagatcttgaggacggaggactcctggtacagcgagagttaccaaaacgtgaaaagaggtacagtgatcgtcagcgtaaactcgtgtggcataagcaccgaaagcattgaaaagataatggaaaccactggggcaatggaattcttgatgtgcgtgccgaccctgacacccagcgataacacgacggcccacagggtcggagtgactggcagcaataacgtaaaaattacatacccaggtgcgagaaacaccttaacccccaacccagaaattgtttactgcatgaaaagtgggaaaagagccacagtgcaatcgcagaccaaaaaggattttgacatgataagtttgcacacaacaaccgtggctatgatagcttccgtgcaaattctaaaagtcacaattacacgctttaatgagcacgcaatgcccaaagcactgcccatccccttcagcccattctcacatcaaagcgacattgaaaaagtttgggtgcagtacccgaggttcacatgtaactttggtgacggatcagaaaacagtctaatcattacaaaacgcagaaaattagtcagcaaagctctgctggcgaaaatgaatgaaagggctttaagacacgattccaacctgaaagatttgcaggcatatggacgctcgtacttaatgacacaagtgtacacggaaagatatgtgaacgtgatcaacaaaaatgggttggatgaactagaagcagtttgcattgcagctctaacaatgaaacacagaatcaacgaacaactagagcatacgatgggactaatggagacattccgatacgtggacacagactcgatcacagacatcgtggtgaaaagttgtaagaaaaacctactggagaaagtgatgtcaatagcgaacaccatgcaagagaagttggggatcccagcctcgtttacaggcttgctagacgaaatagccaatacgcaaagggttgtgtttatagatgagcgtacgaatcagtcaagagtatggtcttgggacagcaacatcaaacatatgtctgatgaagaggggagcatcaaaaagtggtgggcctccacagcagacaacctagactggatgaacatcggcatgattcaggagtataggaaggttttgtgtcgaaaggaggacataccaaaaaaaaccaaagcgtgccccggctttaagcaagtagtggactgcgccaaagccgtggctcaacaaaaagaagcacggaaaacagacccaggcgcgagagtgctcgtactagaggagccaatccctttgataggcaacgtggacatcacccgggccgccacgcaaggtacgatggtaacaaagaatgagaatgttattaggtcagaaatcacttttagagcaaggcagagcatcagacgtgcccaaaccagcagactcagaagctatttagacaactggaatgagatggtgaaagcttacagcgccctagaggctggtgacctgaaagtcatggtgcgcgaactaatgtcaagaatagctataattaagtcaacatccaccccgacatggcacttaaaagaggacttagaggcaatgttagacgtgccaaacctgacaagagcagagcacctagaaataacaaagctgataggggacgcagtagttagcagatgggagcagagtaaagctgagaaaaaacaaaatgagtacgacttcattaagtcggatctaggcttgagcaccctgaacgaccatgatctcaacatagtcttgagtctactagcagtggaccgccctagcaaagttaaaaaagatcttttgactaacacattgggctcccaaatgtcggtaaatgaagcagtgatgctaagacgaaaaatccggcaacaatggtgcgaatctgcaagcaactgcgggcagcttgttgaccatgaccatcacgccaacagtgtgagtaccacagaacaaaaccaaggcaagttaaacattttatctttattacatgaagaagcaggtatctgtgacatcaatttgtccgatgctagcccgctaaaaatcagggcctcaagctacctacctgaagccatcaccacgtgcgtgcagacaccaggaatgtatgaactaacctcacctaaagtagagatcatatacgaagctatggacaacgatgagtgtgtgtggaggtgcatagagaagtatgttacgcagaacattgagccccactttaggataactaatgggctcagagccattatgcagcaaagtaagatgctgacggagagccaagcaataatagtctgtcaattactaggtctaaactgctgtctcatccaaaatggagaaacaggtacagtgtataactttgcaccgaacaaaccatttgtccaacttatgagactgtcacaagacgcttcatacgatcattgcgttttgataaacctactgggagcggacggggtaaagaggctatcaccggagaacatagctaaagaaaatatggagcaactggaacacgtgtgtccagttgacaacaagcccatagttgcggtgggagagaacccgtacgcatgtgtgagtcacgtgcacattgacaacgaagacctggctaggctcaccagttgctcacagccatatgaaaagataccagtgctagatgggaggtttgaaatgctccccgtgaacaacgtcatggccagaatgacaaggaagaccagcagcgcaacactactaaaaaaagtgaccccaatcaccaccggggctggcagtttggccctaacacgcaactactacaaagccactcccatggtgaccacgaaaccaggagacgtgctggtggtcttgagagaccactgtgagaaaaaggtaatgtgcacccataccacaattgtagacaccccaggaggagtggaacagattttagaaattaccgacgacataggagatggcgcagtgtgcttagaccttggcctgcactgcctcactccggcagaccgcacccccaggcgtgacagaccagtgaacacatcaaacgaagtgtggtccctaaatattgaaacccagcgttacctcgaagctacgaaggggttgaggtctcacgtgggacaaggcgaaggcaagctgcacatataccactttgacaacagagagcaccacatgtacgatgagcatgactacattgatgcaatgctcgacgaaaacatagtaatagagctggatccaacagttcaggtaccgaccggtgtcaacatagtgaacttaatctgtattagacgcatgttcaggttagccatgttgtacggcatcccaacctgggtcgcatattgtgacgacaatcccagcgcagcgcaattagcttggtttttgaaatactataaaatggggcataaagtgtttaacaacaacgtgaccacagaggatctcaccaacacgagagcaatggaaatcatcaatgcactgttcagcacgtatcagcacacgacaaccaaccacaccacccgcgtacatctacgcaataaagcggagacgattttgtcaaaagagaaagtcagcgaggaactatttaacacaaccatcgatattagcgtattcacagcggtgctaatggggttagaaaacgaggtgttaaagtccaaccaaggcacatgtgtgttcgaccttattccagaaacaccagaacctccacaactgcaagacgacatgttggaatccatgggcatattggttgacatcaagcagtgcgccgtctatcacgtacccaccgggacgaaagtcgcgctaagagttgttgagtcgctatctcatgaaatagcatgttcaaccaaagtcaaaggagttgaccccaaagatgatgaaatgcgagcgggtgcatcaaacctcacccaaagcgtgcccgcaagcgacaaagcagatcccggatcctcgcaactgagtagctgcgaggagaacatgagccagaccggcacccagcccgtcgcatgtgtccacatcgagccatgtgatcatgctgccaatgcgagcaacgatgacgtgctaaaggagatcacacagccagagcaaaacaaccacgacataatatccaagatcttggcaacagcacagaaggctaaaagtaaccccgaagacaaatcttggaagtccggagccacaagtgccgacttacaagccatccaaagcctgtgtgatagccccgatggtatgggctcacaagtcgcagatcaactagccaagaaattggaagtaatgaatttttcagacgaggtgacgttatcggggatacacaggcaaagaaactatgtgaactcgcaaggcaaatatttgcaaagagtagacataagcgaaagatgggcaatcacgtacaagggcataggtgagcacggcagcgacgtaccaaccaacaatcccggctggtggtggctagcattcccacccatgcgcaagctaggcgtgtacaaggagaaacacgaaatcaaagtgaccatgaattatgcaggcaactgcgcttacagactgaacaggattaagtttagagaaccaaaatcagtgttcacacacaacgtaaagccagaagtgatgttagacatactcacgtatacaagcgccaacaacaaacaataccccacaaacctgcagcggttggctgacaagtacttgcacggcagggtatcatggcacgtggtctacggcgagggctataacagagacttcttacaaacttgcgtggagttaaccaagcgcatggaaagggtaatcgtggtcacagacgccccggatgtgtacaaccaactagacgcagacattcaagtaagggaaaaaataataaccatcaaagtcaccagtcaacccgagccgtacagagcgatatggtggcgattcatgatactattcgcaaacatcgacccagagtgcgagttgtacatactaaacgggcgagagatggcaccaaacgacatggagctagtcgaccgcgtgatggaggagagtttcgaggacttcgacatcgtcagtgcattacattgccaggctttcaatgtctgttgtggttatgctaagtacaaccatgcaaaattcacggactacaacacgttcaatgacatttatgaagcttatggcaacagttacggaggtgacgaaatatacatgtcacgatacaaagtcaaaatgatgtggttatattacatcctccctggtggggcgtggtatggcatagaaggaaaatggttgaactacgcattggacaccacgatatgtcttgagttgaaagaaggggaaagaaccagaatagatcacgtgaaagggctattctgcagcgcaaatttcttccatgtcgcgccagacaccaaaggtatctacgattattcaacagtggactggtctgtcgatgggataccttggcagtacgccatgcaaataataaatgggcattcagtcacagagaacccagtgcgccactcaacgggggagtcaactggcaacccacgcaacatcagcaacgacggggagaagccgtggcaactgaacccaaacaactggcttctagacccagggctaaagaagagtgaaaaaatgaaaatacagaaattcctagatagcgacagcagcgttaagtgcataaaggaaagccagagcttgcccatccagctggggcccctaaaaccaatagtggtatttgccaatcaagcgtgcgaagcaatcggcgttagtatgaacaacactgggaccttgtacgtggaagttaacatagcccaacaaaaactcgccgcgcgcaacgagccattgcaacaccaaactttaattctgaaaagccacctcactctaatgagcacaactggccgacacgcaagctggaagccagagtacacacacctaatgaaagcggatctgcaaaactgccaagtgtatgttgagggtagcgcaacatcactattacaatggaaaagagaggaaacccagcacgcccaagtgtacacaacagaggaaagagacgtgtttgtgaggataccccaagcgctggatcatagtgttggcactctgaagactctagaagtaaaagtcactggtaatgaattgggcttaagctcgtccagcggagttttagccagagtgcttaagcttaacgacagactggcctggaatcattggttagagacccaacacttgcaaaaattgttggagtttgatcgtagaataatctcctcacatgaagaaagctcagggatgacctttaaaccacggataggtcagacactgtatctagcggacgtgctaacggcagctgggattgaatgtgtcaatcacataacgacaacgagcagagaatggaaggaagcgttgaaaaatccactgacaaaagttggtatcatgccattgaccaatagcgtgctagtgagcgggaagcttgggtgcgtgcaacccacaattccgagatgttatgctatgctgtgtcaaggggtaaagctaaaaatttttaagccggaaactcgcggtggcgggactcctagcaatgtgtcagcgaacgtggggccaagcaaccccacaacagcgggtccaggggacacgccaccgctaatcaccagctggaataaatgggtggaaagcggagcgtcaaaccaatcaccattcggggtgtcagccaaagcttaccaggacaagttaagagagaaaaaaatagaaactccacaggataggctaagggtgttagaaaccatgctatttgacgacgcgtacgctttaatgtcacatggactgacagacctgaggaagttgaacgacgggggtaactggcattgcgccacggacgcaactatgaagtcggatttcgaaataatcgaaccggtaggtggagacctgctgccaagcctcaacaccagcgcgctgcgacacaatgaaaccaatgccagagtgatagacctatgggatgacactgatttacgggactggttgacgctatatgcaccaaaaaatcctatgaaactaacgtccagagtttccccagggcaaggaaagattaacttgaaaacgttattgacgaaccgcccctgccagacgcggccagtccccacacaggtgatgggtatgggcgaaaacgctgtgacgggcaggttaggcagcgtgttaccattaaggcgagagccaatgaacgtcactcacgaactacataaattcagaactgcctattaccgtgacggttgggagcgggtccttaaggatttcaaagcgaacacaatcactataagcgatgctgatgtgaagacctggttaagccgccgcagcgactggaaagcgctggcaaccagcacaataaagatgctcgaaaccgggttgccaagcaaccccatgaacgccgttaatgtgcacgtaaaaacggaatccttactgaaagccaacccaatcatgtattggaggcaaacacaaggcagaattatcgtgtggcaaccaaaagaactgtgcgccctaatgtcaccagcctttatagccatcaagcgaaggctgaaagaggtgctccgagatgagatcgtctacaccgacggtctgacaccagacatgctgtcggctcgcgctagaaccatccagtacgactacgtgtttgaagatgaccttgtaatacaagacaggcagacggatcaagaactaattgatttagaattccaagtgatgttggatttagggctcgacattaatttagcaaacttatggagactagttcacaacaagtggagattcaaaggtcaacacagctggggccaactagacgctatgaggctcacaggtcaagctacgacagctcttggaaacgcaataaccaacctgtgtgtgcacagcagctttgttattgaacacaggcaggcgataaaactgatgtttgtgctaggcgatgacaacattacattcatgtcagcggagccaaacctcacaaagtacaaaagattgatgagcgaaagatacaacatgcgaagcaagccccaggttagcaggaacgtcggcacattttgcagcttactgtgctaccgaaacagcttcggtcattgtgaggtagggccagactttgtacggttaaggcacagattcgaagtcacaggtgggggcaaccactatgagctcccagtggtagccgtgaaaatgccacataatgtgcgcatcgggaaaaccttcttcaatgggcgctacctacatgtgatggaaaacgaggaagccgagatggaaccagtagaatggctgcgcaaccatgcgaacagaagctacatcttagtcttgaaaaccaacagcgcagagtggtcaaggttggacggagtgcaggtgcacgatctatctaagattgacacttccggcaacctagccgaggcactagagggcattggagcttcaatgggcatgccaaaccccatgatggcagccggaatgtcctacctacacatgctaggcaaaagtgaggaagcagacaaaattaacaccgagaaagagtttggcttagaattaagaaaatggtacgacgtggcaagctgcaagaatgccacgtgcatcaaatataacatgtcacccatggaactggaagacaatataggagagctactaaaaatgatcagaaaaccaatggcatatcacaaaaggttcttaaccacagcagcctacagcgcgcaaaaaatcagatga

SEQ ID NO: 1177 - DNA, 14358 bp, Winged bean alphaendornavirus 1
  source 1..14358: mol_type = other DNA
atggcctgtagaaaagatgaacacagagaatttatccaatttgggcctgagtgcttggtacctgatttaaatcacatagatactgccacaatgcgaaatttcatcttattatatcaagaaggagtctgtcacatcgcggccaataagttgacgaacaagatggtagccagaaattcccatcttcaaaatgaagaaccgttctggggaccaaatatgagagattattattccaacaaattgccagatgacatttgtccatttaaagaagatgcaaataaagatctagtggcattagatttaatattgagaataataggacggcatggaggatcccttgctgagatgaatgcaaaatctgccaggttgaatcctgacatgacgccgcacatagaaaagttcaggaacaaatataaagtacgtgccatggaaatggccaaaccaaaagcggtctggttgtgtgcagcctgcaacacattgaattttgtatggttggaagacgaacagacaggtgtacatgggcaacactgcggcatatgctttcatgcacttgactgcacagaaatgctgccggatagtgtaaataacaatagtttgaaaatygatgacaccacccaaatcagagtgggagccattgaaactcaacaactgcaggtcactaacaatacagacggtgcaccagactactcagctgcaacgcttaatacactcatagaacaagacatgaagaacatgaggtcagcaatgtcacgccggatatataaagtggtatatgtcagtaacggtatgacagatgcacagctgaggtatttgcaaacaaacaatttgtctttcacaatcgttgtgagcaggaccacacccaatccacatgccatgttagcttctgagcgaagaatggcctggtacaattttgtagaacgtgcgggctctgatcaaactgtagttgacataggaacgcggcgcaatcgggatacagtgatgtgcccgaagtggaaaggaatagggccatgtttggactggagggatcaagaaagatacggtgtcaagccattgccgactaacgtgtgtgggcacacgatcaaaacatgtacttgcgacatcccagatgaaccattgatggtggctattgacagcttgtatgacatctcagcacaggatgttgtgcaatttatgatgaagaggaaagccaaacacttgctgtattgcttgagcacggcagccataaatttcacggaaatgtatggaagtctgtatttcaaccaaggtgagtggtataaggatggtagtgtattggtgacatcacttgcaggtgatgacagaccttacatgaacagctggtatttgaccaaaatgtggtcaacggcagacgtaatttgggtaggcgatgatgtactcactatcaaaacatacatgactattgggaatcacatattgcgaatagcaaccatcaatgaaacttgcgcagctgatattaaattcaatcaggtggttaaattaaaacacaatttcatagaattgactatcccattgctatcccaagatagctggctggcaccaaccagtatgccaattttagtagatcaacgggtcaacattgatgtaaacctgtaccatgcattgtattccagaaatctaactaataaattatcctttgaaaagatggtggagtttgggttggcatttgctcacatgaaatacaccactgcagcaggtacatatcataatagacatttaaccgccagtgatgtaagagtgcacgctatgttggcagtgatagccacaagaaggaaacatgggtggatcatgcaagcgttggaattaaatgaaccttcaaatcaaattgggatgaacattccagcagggctcatgcacagtaccttagaatactgcatatcagtgtttatgcagtggtgtaaatcgagactagcagagttccaaccaggtaatgagggatggaaaagcaaattaacggcagcaataaccgattggttagacaacgatttctggatcgagttggaggagatgaccaaggcgaaagacgacactaacctaaccgagtatagaaaccccattgatctaccatgcgcggatgaaaacacaacttacctatgcaaacaccacaaattgacttgcgatcacattgcccctctcatcaatgcttgccaatgctgtggaattgcagagtgtattgacgacgcaacattttgtccgtgttgcaaagcaacagaatgcaaacataggtgcaaccacccttgtttagggtcaaagtaccatggaaaaacggacgatgcagcagaaaattgcgaatgctgcggagtaaaaggagacgctatcagatgccaaaattgcataatgttcgtagaaaagcacaactctgcgcatcagccaccacttattgaaacccagagcgttgaaacccagagcaacctagggcgtaaggcgagagccagatccacccctgtcacagttccgccagctgtaactcagccagttgccaacagcattcctgagccagagatagtagcacatgaccaacccaatgcagcaattggcatgacgaacgtcaacaccgaaccagtgattaattttatagagcaatggcgacgaatgtacatcaacccacacgctacggagcaaggtgatgtcaatgatcagaacgatggagacacaaatgctaacgtaaataatgcaacccacgagcgtgacttggatgaccagcaacacatcgccactgacgaaggaatacctcgcataccattgcacaccacacctttgaccctagagtcacaagtaacaaatgacttatctcgaattgcttcaacggaatatgcggccattgtgcgttatggatggaacgaatgttttagagtgggtattttaagactacccgacttcaacccattgaacttggtaggggtgagtgagtttaggttttgtcctatgggaacaagtgtaatatcaaccgacttaattgagactatttcggtagctaaaacaaaaggtgatggtctctgtggatactatgctttaaagagaatactaggggatgaagtcaacatacatgatttacgacgactagccaaaaagaaggattggttcactaatgaggatttgacgaattatttgacgagtttaggtagaaatagtgtggtaataaccccaggtaacagcgtagtgcataaaattgatgccatgagtgacaatttcattgtaattcgaagcaccactgttgacaacgcaatggaactacattgggaaccagcaaatgttctccaaaaaggattgtgtgacactttcccgattttcgagggttgtggagatgccaagcaaatccaaaaattaagcatgaaatgggatataccatttgagtggatgacgtcaccattgctcaataggctgtacatggcaattgagctgattaaaagaaatatgatagagtgcaaatcaagcaaagtaaaattttgtgacttgaaattaatacagaaagacaacgcaaggtggttaaccaataatacagagcacatacatgagatccatagcggtttcttttgtttccaaattaaagaccaatttatggaaatggtagaaaaattgactagtatggtgacgctggaggcaagacacactttgtcaactgaagtgtatgacgtacacaaattccaagattccgtggcaaacgaggcaattaaggatttggtgacagaaacttgtgcagaactgcaaaaaattgtacatgaagcaaacaatttgtctcactttcaaaaggaatcttgggagaccaacctggttaaaactaaggtgctgtcagatggtagattgaaggtgctaatgacagatcacaaacttaaaactggggacttggtgtctgtcaccacaagagctgggtaccatgcaagttatgtgtcagtgatcgacggcacagtgacattggagactccgccctccgtaactagcatacgtccagtgataacgttgaatatacccaagacgtcgttcaaaagcaaactgattctattaatggcactacagcgtaaaacagtgactaaggagttaatgcaacgagtgttgtcacgcagtgcggcagtactgggtcccggcggaagtgggaaaacaactaaattaatagaacagctagataacgacacggtggcagtggcccgaacacgaattgccgttgatacgatcagaagacgtgcaccgcaatatagatccagaataatgacgtacgagaaattactaacacaaccaagagagtgtaaaacactgttagtggacgaagcaacaatgttcaactggttggacttggctttaatattaccaccaaccatagagcgactaatattgtttggcgaccaaaatcaagtaggtctaatagatagtgctatattaggtggaacaagataccttgagccagtaacaactctaatacgaccacccaatattactactcttgacgtgacctatagatttggacaaacactagctaacttgttaacaaatgccggttacaaaatcacttcattaaaagaaaccgacaccatagttgaatttgtccggtatgatagtttcgatgaagaactgattgagactctcgttaagacccacagaccggacgtcgttttgacgttttacaagcaggcgaaagtacggctaaaacgatttattggtattacagtcgaaacagtacactcataccagtcttgcgaagcagacacagtgctgataatacagtggaacactggcagtcgacattccacaatttggatgaacaaagcgtattgtgtgtccgcagcaacccgggccaggaaaaagctggtttggtgcaccatagggttgagcaacagagcaacactcaaagacattttgaaaggaaacactgtcaccaccataacgggaggagcaagggatgaggacttagaggacaaactgaccactctccaaccttcaagtttaggattgagattggcagatcttgatgttagtcccattgtgacatctgggttaaactttgaaaacaatgagacaccagtgcggtggacaattaatcgacgacccacaactaaagaaattaattacttattaacaactacggcagataacccagtaaattggtatgggtacaatttggagcaaataatggacgctgggaaaaaagaaaccatcccaggatttacgtggaatatagttggcgagtcagtggtcgcaaaaacaataaccgggtggatagcgttcaaattgtcaaataatggagtgagaatcaacatagaatatagcaatagagtaatgtccatgttagcaaaaacgaaaatggaagacgcttacgtgtctgaaatgtcgaatttcatttcagaaaattttattagtgatggaaatctagaatgttggaggagaaaattaacaccggagttgcaaacttttgtgttacagtgcttcaaagaattcataatcgaacaagacgacgaagtattcgtggacgcccctgaaactttggatgatctggacacgatcacatcgacttccatagacttggaattgcagaagttaactaaatcaccacaaaatgtggaatgtgagatgtgtttgaattacccagttatgacgggtctattggcggattatgttcaggccttatacgtcaatcaaacattaacatacacctggcaagagcatggcagtgaccagattttagagtgcatgacaatggaaggtgtggtttttagggtgatagtaatggattgtggtttgaaattgaaagtgtcattcgacggcacgttcgggaaaataacaaaacatattaacaatttggtaaccaaatggaacgagcaggttgaagccggcttcagattgaatgacttatggcaacatttgacactccagcaaaaacagattttgaaacatcggtacggtgacgtactagaagaagttaacagcctaggtgacacaagtatgagtgtagctaaggcactggaggtgataatggaacaagaagcagctaaattgacagttgatctaggtgcatccgattctaccacgtcagattccatggtccaggaatcaaagaagagtgaacaccacaccatgtatagcgcattgaacacacacttctgcacagaagctgatagttggtggaacgtggaattgaaagagttcaactccattcatgtggaatcatatcaaatacataaacggaaaaatacaatgatacggttgattgcggaacaatgtcagatgctagaaacatgcagaattgggctaaccctcaatctgtggggcatgacagttacggtacacacctttggtggttgttcactgtgttgtgggttagaatttctagctgaagaagaagtgatacttaaaatttccccacagagatcctgtgttagacgcaggcatgttttgattaataccacagtagatagagagctgacagcagcagtgtgctcatttctgggaattgactatgaaccggtggaaactgatgtttcccatttacaaccgatagaaccagaaaccatactgtcaccattactatgccatccaaactatgaattgggaatgatctttgagagaataatggcaacacctctaaatatgtggaactattacaaaacactaggaaaaacagccaagttgtgcacatactacaaacattataactcacagtatgtggcacaggtggcaaaccgactcggccctaagtatgaactagcgaaaaataacagttgtggtgatcatgcgaaaattgatggtgctatattaatggtttacgagaaaagaacgaagaaacaatttttgtgtcaattggttaacgataaaataaacatgatacctaatgactcagatgatgtagattgtgacgcagtcatggagatggtaaataatagactgaaattaagattggcctccatcccttggaagttagcaaaaatagtaatctccgcgttacacttacagacagtaacgttcggcacccaagagggacatgacatagagtcgctgaacttaccgttaagttatcacaaagcaaacaaaacaatggtttacaattattacgttaacaagaccgaggcaatgattttggcgaacgttaagaagccccatcacatagtatttgtgcacgctaagcaaatggagaaatatgtgtctttattgcgccatgaatgccaaaacctgccagttgaaattcagaactattcgactatagaacatggtttcgatcagatggtggaacaattacatttcaagtacagctacaacgggttaggttacggcgagaccgctattgccctctccgattacccttacctatcgatgttgacatctgcttgggcggcgcatatcagaccattatcagaagaacacaatgtgcgatatgtgaggaatttgttggacacgacaccaatgctaaacaaaattttatcagtgtatggtcctgagaagaaaaatccgaaccacgatgatgacaacaccaaatatcacaatataatttacgacgcagccaaattgcaacgtgacttggaaaacggcccatggttcacgagaagattgagtgatgcctcaccattacaagccgacatgttgtggttaggcttggtagcactgaagttaactcccgaacaattgtacgacgtagttaaatccggtaaatatgagtcaatcattctactgtgtcccatcaagatctcagctgacaatgactatttcaaactgatatctgaagacaacacaaactattacattgcctatgatggaaccaacgacgtgactgtggtaaacaaaatgttaatgtcagcaattatgggtggtgtgaacattaagatagatgatgtgagcatggtattccattgcactaataacgttttaggtcacagcacaatcaaattaacaatttgcaacaagaacctaacattgccaagatacattaaacctataaatcaacaaaataacatagtgggtgtaagtttccgcatacccgtaattaatgacattaggagagcgttacgtaacgcttctgttgtccaaactagaaaggtaaccatagaccataaattgtacagagcactgtcactccgaatgttgcgtccaggaacaaaattagacgacttattagcttacgcaagaacatatgcacatttggttacatattcgaaccggggtgtgagccaattttcattaaaacagtcagactacttgatggaagcttgtgcatgtgtatattttgaaagcataagagcaaatcaatcaataactaaattaactgacatactcacaaaatcgtataataataaatggtcactcaaaaatctgcgcaatacagtggaggcaattggattaaacatcctgtcagatgtggctgccctgtttgggtccgcaataactgtagacgaaatattaaaaacagtggaaagtatgttggaaacttctgacttgacactggtaaggaatttggataggttttgtttcgttaaattgacaaaagacattgtggaaccaaaagtagtatttaaaactagtgaactaaaactgtcaactggtaatgctatatcacaactaaacactagattgatagcagatactttaatatcagccggtgcaggattaatgcattggtatagaggtctcaagaccaccccagatacgaataggaaccatccaacccgcagggaatcatgtgtgtcgtctatgtgcagaattgtagaaacccaggaagggaaaccaaagctagacgcggtgttgagggcaatcaaacacatgcgtaaatattacagtcaccaagctatactacaggcagctgaaacagtactgaagcacgcaagtgatcccatacagttaaccaatcgacccaacacctatgaacaattgtccaacatagttggcgtggacgtcactgggaaagcagaaatcaaaccaactcccagagtgaccatgatggggcaagatgacattgcacattgtgtgtccactgccaagtggatgtacagcagagagattgaatccatgcacggcaaaacagtgttgttcagcacaattggatcgatgggtgacgtcgaaccatttctcggagtggcgcaatggtggaaaaactttggagtaaaatcaatatttgcagtgccgaacgatttggtgactcatgtgaccaaattgggatttgaatgtgtgggtctagatgtgggcgttgacgaaataataatagaatgtattaacatggaaaactacaaatacaatttacccaaactcgtggaacatttgcacaatttgatggataccactagcagagtttttgatgtgaacataaaattatggaatcaaattatgccaaatgttgatctagtaatggaaacaccatacacacatgttgcatctcaacttgcacaaaaatttaacaaaccactattgctgtcagctgcatatccatgggagtatcatagatttagaacgattaaaatgaaaccgttcacactgtttgacgtgatggggggtgcaatatcatatgctccatttcaaaacaagctggaaaaatggagatcaaccgttttggacctcactaaccagagaggcaaatttgtggcattgggtggtaacccaatggtgcaattgcatgaacaccctaccacagtctgggatctgagttacagtagtacagtgataggttaccctgtgcaaacattcatggagcaaacgttggggcgacagcacgaaattgatgcactgacaattaacaagattgcggcagtatgttttggatctatggtggacaccaatttcacacgatggatgttacctatggttactaaattgtcaaatctatttgaccacgtaataatagtgggagacaagtggcgtctagagccagggaccatagccagtaatgtgagccagattgggtatgttaactaccatcaattgtttcctctggtggacctggtagtcacacatggaggtagcggcacaacgcacaatgcgttgcgtcatggatgtgtagtggcaatacagccgttctttggtgatcagttcgcttggttagaagcggtggagaaactaggaatagggatgcacgtcaatagaattcaacacctggacaaaatgacattccaatcaatgcaaacaaatttagtaacatacatcaaggaaataggcgaatatgatgtagaggcaaatttaatatcatccttcaactactacatacaaataggtgcaaaacacatagaaggtttagcgactaacgtgccatggccggtaactgagatatttgacaataaccatgacaagttaaccaacatcaaagcacaacatgctttatcttgggttgatctagaagaattgggtgaccaactcaaagtggttgtaacagaattaggaaagagtgacgttgatgattgccaacaacgagatggagtggtcgagactactaaaggggagcatgagggttcgacccataatactcaaactgacttacagcgaaatgagtttaatcgtttcaacacggtcaggggtacaacaggcacttccaaccagtgtaaacaaagttcacccattgagggaaaaagtgcaatccactcaaaactgaaccaacatcaaagtggaaaaatatttaactggaaattgaggaatagttcagagactgccaaaacagcacgacaatggattatgcaacacaaacggaataaacagaggaaacaaaccaaaattaacaagaacacaattcatagtgaaatgccgaccacaacgcaactaaaccaccgtaatgcaaccggtcatgctccaacatctgtggatagtagccctagcaacgttgatgtggccaccaacatgtcagaaatagtttcaccatccaaaatagtagtcgaaccagtggcattagcaaagggtttggctaacccgggtgttgtcaaaaaattgacattcccagaagtaatcaattgcaaagcaaatgtgatgggaaacaatcatttagcacacgtttggaaattgcgacacatacggtctgaagtatctgggatcaatgaaactaattgtggcacaacctgtaggatagaacctagcgattggacacaattgtatgacccgaaaactcaagacacatgtgtacatgaatgcattatgtggataagcaaacgatatggtcataacatttcgcagcaacaactgttgagattgtttgcagtggcaggggtgaaaggcagacccactatgcagcaaaccaaattactactgttggtgttgggattgccggttttgttcctaacaccgcaagaaaatttggcattgaactgttgtacggacgaagtggatataggggttaagttatttgtaagcaatggaacgggtcactgtaaaatagtaaaaataaagaaaacaatcttgatcgaagaattgagattagatgttttaccgaaaaaatctgacaaactacaaaggaatatagaggaatatttgtcagcttacaatattgatatcgaaacattgaaaaatcatatgttgtgcgacccaactaatattaaaaattggcacacggcccattcagactattcactggaggagcttaaacacaaactaaaatttgtgaatctgaaacacacaatcaaaagatcgactcaagcagtgcacaccggagattgggtgcaagttgacgacatatacttctggtacggtggtagtttagacataccttcgggagtattattgttgtacaggcaaaatagttgttattacccagcattttatttcgcttcagatgatggggcagtaatgatcccaatgcaaataaacgccaataacagcatgatccatgacataattcagacagaaattaaagtggtgaaagaaattaaagtgccaaaaacagttcgccatgtcaccaatgatatgggtacagttacatgcttaaatcagttcaccagatcagtgttggcgacaatagatcctacattcacgatggctacagtaaacgaccctgatgcaaactacctgtatatttatgagtatgatggcagaactcaccataaatatgacgaattacaaataattttgaggtttgatccaaacaatataattggagtggggtttgatttcaaaccagaatgggttcaaaagctcaaaaatattacagcacctgtaagatatgctgtgtatgggtcaaagttatgcctggcgctagaattgaactcacagcatcaggccgatgtaattttcaatttatgtagcaaaacctggtcagccatgtttcgatacggagatgtcataatagcgcattatgaatccgtgcaaggagttggtgaattatggtggacaaaaatcggaaaagaattgaactgcacgcgaggaacaagcaatttgcacgtcaattggttgagtactgagtggtttgagttagatgatgagaaattatcgaccttgggggtctccagagaagacctggagtcactgttggtgcaaacagtaaatcaactgagattcagggtcaacgacaatttttcgtttgaagaggtgcaatacgaaatttatccaacattaccagtgtattccatgagtggtaggagacttctttttccattcaaaggcattctgttggaatatcaaccacatatcacgggaggaagcacgccgttagaagaaagggtgttgagcaagctggactcagagttgaaacctaacaaactttcacgatggtgggatttaaacacagaaaaaccacagacctcatttgacatgtcagtttgggagcagagattgaacaccgaggccttaatggcagcattgtcaacaccggatatgacagtggctgacctgtcaaattcaaacgaaattgtgttggatcaattgtacatacacaaccaaccatccgagtggccaactgttagtttgacagacacccaagccgacgaagatttggattggcaagacttgatgttctggcatgacaccgacttatcggattggaacgaaaaatatgcgccaacaaacgacacgcaaattaaaggtcgcaagttgcctaccgagctgaaggtgagttcgaaaacaacattagtagaatacccaaagtatgctagaccagtactgaccaaagccgccaaccaagaatttaatgctataacggggagattgtgcaaagttgaaacttacaggaagtataattacgacattaaagaacaaatcaacttatttgtaactacatacgtggatcctaataagttgcatctattgagtgaatttaagcaaaacgagttgactatgaacgacgggaaagtgctagactggttacgtgacagaccagatgccaacaaaatagcagaagaactggaaatgattttggcagaagggttagaagtgcacccgatcaatgacattaaggtgcacctgaaattagaatctttattgaaagaggaaccagcaactcatctaaaacaggtcaaggctagagctctgatgtggcaatgtaaggggtattgtagtattttttcacacatatttaaagaaattaagacccgacttaaaagtgtacttaagcccaacatagtgtacaccgatggtttaagggctgacgaactatcgtcaatagtgagaaatgtgaaggatttcagccacttcttggaaaatgacctagtgcagcaagatcgacaaacggatcatgaagtcattaaattcgaaatgcagatttacaaactgctgggtgctaatgcggacgtgataaatttgtggcacaattgtcattttcattggaaatacaaagcagcctccgctatgggtatcagggatgccatgagactaacaggtcaagcaaccacggctataggaaattgtctcacaaatctacttgttcacatgaagttggtcaagagacttgggagtcagctaaaactatttttagttctaggtgacgatgggttgatgttaatagacggaatggtgaataccgactcgttgaatcgggagttgaaggttcaccacaatatgatgtgcaagccaaaactaagtagcgtggttggaacattttgttgtatgattgttgggaaaaatcacttaggtggagcaacactgggcccagactttgttcgattgagacgtagatttgaagtcacaaatggagtcagtgaagcaaatgacgacaacttaagagcgagaagtatgagttatttgatgttcttaggcgatatacctgaagtgcgagaaacagttgcaaacaaaaaattcagcatagagccacttaaatggtatgattacgactctgcagtctacgcaacggcatccaaatacgccattagtgagaccgaagtagaaaacaataagttacaattattagcaatgataaacaatccaatcacataccaaacagacgtgttgcattggtatgaaggtaaataa

SEQ ID NO: 1178 - DNA, 13743 bp, Yerba mate alphaendornavirus
  source 1..13743: mol_type = other DNA
atgagaagaggaaaaatattgaacccatccacggagatcaagaacaatctgtatggttggtgtcaattgccaagaaattataaggtaacaattaataataacaaatttatagagaacttagaaggtatttttaagactggccatcaagatgtggatggagacgtactttatatggtaccagcagtaagagggatgctaattccaaaacataaacattatggaatagctagttgtgcaaacacaaaagacgtgatgttcaataagttcgacatggcagatttgagccctttaaacgtgagtaaattatattacaatgtcgtgtgccttggtaatgaattgagaaaattaaacaatatgtcactacaatttataatagatgggattaggcacaaagacttaattgaagagatagatttcgataaagagtttgtttctgatgaatacctggatcaaagaccagtgattagtgtgacctacagcggtcaaggaaattgtacagatgaaatcataagagcaattgataaagaaattaataagttcggaggtttgtcacagtattacaaactgcatcaaatacgcggagtcaatgacccctcaattcttaagagtcacttaccaaatctaaagaggtgtaaagaggtagatgaaaatggtaaggtaagttataaaatggagtttgaacacggactgtttaacccaatcaagaaatgtaatatttgtgacaaatggaatcattattcttctcttgaccggggcctgcggcaagttcactacagtttggcaaaatacaggaagaagcataaagttttaaaagataaatttgaaactgttaagaatacggatgatataaaatatcatgtaccatggaggtgtggctattgcttcagtgatttgaatttgaaagtagagataacgatggaagctagagagtacatatttaaatttataatggaaaacttgttcgtgctgcatggtgatatcgaacaattgttgaaacttggttatggagatacttacgaggatttatcgatggacgaaaagaaaagcatcaaaactgacgatcaacgaacaataagagagtatttcttccacctacaaaagaagataataccagtgggacatgattttgataaattgatgcaggcgaatatatcaaagaatataggtggttgtttctttagggccacaagcaagtataacggcattaaaccagaattgatagcagagatatcaacattcacagaattagttaagacgatgatgaatccaaatcatgtggcatgcattggggatgtattgccgagtaagaatgatgacaaatatcatcaatggtacaaaaacgatcactggttttgtagtgaattggccacaggttgcactagttcaggggtatgtgatcataacaacaagttcacagtgtttggttctatcggagcattgaacatgtcattaaatttgataatgagcatagttaaaaagcagagacagcttcagattataataccaatgaggtcatcttcaaatacattaatggacaaaaccggggtgtttgatagcgcagatggtacactgaacttgttcttagacggtgacccagttggattcaagatgaaagcagacacgtacatgacattacatgattatgatttgattgtgtatgattccgagctttatttgatcacagaaactagacgattaagtttaaccaaattaatcaacgtgacaggaccttacagcagaaaatcacaattacccatgttagccatagatcacacggcaaaacaaagtattagattgttcttgccagatgtgaactgttttatgggtaactggaccgggatgaatttccgggaacaaacttttgaactgaacgcacctttattcaaatacttgtgcttgagaaatttatcaggacaagtgggacacaacacattaagacaatatgccgttggattcgcaatcaggcgatttgtaatacataacaaagtgattgccaacccaacaatagcatacgaacaagtagatattcacattatactaagtagagtgtgtatgatgaagttgagagggatgttcagtgcaagttatgcatatagcaaatttaccaaattattaggaccatttaggggattgatgggtgatgttgaaactgcaattacagcaacattaattggtttgtttgctgaattattaagtacaaaattcggaattacattagaccacgtattaaatctatttgaatcatcaagcttaaaatcattcataaccggtatatgtgacacacgattgtgggacaacttgttattaatggcagagaatgttaagtttaaagacttgaaaataataaatgttgacgataacatttatgacaccaacttgccgaatatcactatttgcaatcatcacggtgaaaaatgtgatcacgttgaggcattaatatttaataggtgtaaatgttgtaacattaaaacagcaatgagggaattttgcaaatgttgtatgccatcaccagccgataatgataaatttttccgttatgataaatgggttgattcggatgaggttaagacaggaaaggaaacaactggcttgaaattagaaataagcaataatgctgtcaatgaatacaacgcatataaaaattacatgagcaaaagtgagaatgaacccttattaaagaaaatgatatcgactataaaagagtcagaagtcaaacagaaatatcaagataaaaatgaaaaagaagaaaatgagttagataagttaaaaccaaagaaagttgaggtagacaaagaaggggacagggaaacttgggttgatctgtttacaaacaaggcgaggaaagcaatagctaaaaccaagaagctactaacaccagtggttgataaagcagtggatgatatgagagacataacagaagttgatatattaacgaaattaggatatgaatttgtgacgcatgtagaagaaccagtaaagtatgaagatatcgttaactcagaaccaagtgttaattattatttaccacactgtttggagggggtgacgtttttatctagggacacatttgaaattatagaggtaattaatttgccaaattcaggaagtttgacttgcggttatgatgcctacaattatgtaagtgatgtgccaattgaaatgaaatcatttgaaaaattgtgtggaggccagccaccctttagtcaaattaatctaatggattacgctcaagtgacccgagagaatttaatattagtgtgtctgaacactataatattatgtaagtatgatttggatgatgattattttaaatgcataaagtttgatgaaccagaaaacgttaatgaaattgggcacttttcaccaactataatcagacggaaattaagaggtagtcagtattttgcttataaatacccagcaaacagcaacgacaggactgacattttaagaacaagattcagaggcgctataacttgtcacaatgtaggcgacataaccgcaaaagagaatttaatatgtgagttgacattttattactcaatgaaccaactaccggcaaataacatagtggccgatgtggagattacgagtattaatgacaaaatgtatctgacaaataacaaagaaacaggaattcattcaatagaaagtgatagaattcatgtgatgataccagaccacatcaaaccattagcagacaagatatcatatgcattaaaaggggaattgaagatgactgatttgccggaatttagacacactgcaaaagaattgcccaacaatacagaagaggccattgtcgagcaaatgaatgaaattttaagatcgattgtgagaataagggccatgataacagacagggacacagcaaatatacgacaagttataaaagggtatgtagagccttggttcaaatacagcaagtttgacacacacaagtctttcataactaaattaaagaaattcgatttggtaatattaaaaatggataacaaaaaagaactagtggctgtagtgggatttgataggggtaaactaatactggacaagcaattactgttcaagaaagaagtgacgataacagagcttaaggactcctatggtagtaagatcagggaattgattggttattgccaaccgtgtttgaagatggaggtaataaaagagataatatacaatgccaaattcacaactggacctgctggttacggcaagtctacaaaaattggggaattagcaaagccaggagatgtgtgtgtggcaatgacatcatcatcggtgaaatcactggaaagtaaagtgcaaccaggagtagttgtactttctttggaaaaggcgctttacactcatagaaagtgcaacgaaacattatatgtggatgaggccaccatggtagattggttggcaatagccatgatggtgcaagccaagaccagtttagttatgtttggtgcagaaaaccagattgggaaaatagatatgagtagaacaccaggggtaagacatgttattaatataatggatctggtcagtgataaaaatataaccagagagagagtcacatacagaatcggtgagaacatgagaacattattggaagatgttgaaccaggtttgataagcaaagccacacataacacaacatatactatatcaacatttgatgatgctgaatttgacaacatagacatagctatagctagatgtaaaccagatgtagtgataacaccatacaattacaataagatacgaatagaagaaagaataacaaaaaatcctgttttagtggtcacgacgcacgctttccaaggagtggaagttaatagagctatgttggttttacgtgctaatgctctaggtaggtgggagttaaatggcatgccagaatacttaaactcagggttaacgagggcaaaaaatcatactgatattgtgatatatgggtacccaaatccaaatgtaaaatcgttgcgtgacataatgacaatggtagcaggattaagattgtggaatgctaatcaaatagaagctgaaacagatgatactccagatgcaattgattttaatgatgaattgacagagaaaaccaaaatcaagaatatacacaagttaactgtacaggaggttaatttattaaatgacatgaacctagctatggaaggggcatcaatacattatgagaagattgaaaatgggactatagcgacagctacgaagtttctcatcacaataggtaaagtaataaatgtgaatggcgaggttactatagaggctaacaatacgataaaaaggaaaattgaagaaaatatggatagaacattaacactgcctgatgcagtaagttataacaaaattaaaaacatggaagataataacgtaatgttgagttcaagatcagcagccaagatcaaagaattggcatggatagtagacaaaacggtagatggaatgctaagagttaggttagatggaagcataatatgcataactaaaacaaaaggttgtccattattcgcagggttgacttttaaatcaggtgctgaaacattaataatccatgatggttggaagggaataatgagaagaaatataagcataatgagaaataggatttatgactcgttaagtccagttgtaaagtggttagatttaaaaattcccaatgtaataataagagaggaagcaaacatagattggttaaagcatttaacaggtgatctggctaatgcttattggcaattgaaagaaagattaactaacgtacatatatggatgcttaacatgtttgcaatggatgacgtaccaaagtgctatatgaacaatatgagaaatgttgcgttgtacaacaaactagcaaggccactcaacattgaattgacagatgaacaccaatctgtgataccgcaccaaactttgatccttgaacaatccaagttgatgggatacaagaaaagttatacactagttgatatgaaaggagctattatggaagtgtcaataaaatcaaatgtcaaaacatggtctgcttttgtgatagaagcattgcaagatattcggaaaaatggagaagaaataagaggaataagtgtaacagatttgaatatagatggcttaagaattccattatctaagcattttgcgataggaactgaaataaaatctctggtttacacggaaataaacaagataaacaggttgatagacagcggggtacacgatcttataagaatagacaagcaagcaaatgagttatacaatcacattataaaagcaagattcccaaaattgacgattgcaactagtaattacgaacaaatatcatcacacgtggaatcaattttagaaaacatcatgttaaatacaataggtagattgtcaaagcacagcaaagaggtggcagtgtatggtgggccaataccgttgactgtatgccaacaaggtaaatattatatcaaaataagggtgccaaagctggaggaaccgacgagatacatgtatgatatacaattgccatcagtgctaagcaagttgtcacatttcaacctaatgaaagatgaggagaacaaaatagacccgctgtggaatgaggagagttgtcacaggttaatgctaggttgtgatatatattgcatagaagaggaattactcatcgaattaatggataagagtgagtatttgtatgggtggacaccaattttgaataataatggagaatactttcagactaactctgaacataatctgatagggtacaaacatggagtgcatagcaagcaaatcaggaataagttaatagaagatgtggagttaggcaaaccgattatggttaatttggacaagaatgaatatgtggaagccaatataattatggaattcatggaccacagattagtgaagttaaggagacgtgttataccagattgtaggtatgtggacagatacatagggacaagacaagatataagtggggaggtgacagtgagagtgccatggattgattttgacttgatgagaatcataggagagaagaagatagtttgcataaaagaattaaaagtgaacaggatgacgctaagaaacatattgatgcgattgatgacaggtgatgatagtgaatcgagtgtactagcttacactagaacactagaatcaacacaattgatcactgataaaggaattcaagacatgaacactggcaacttacttgtagcccttaatacaagttggtatgcattatacttgcacaatgactatataaccaagtttaaaatgctaataaacttagtcacatcatgcgagggtaatgcattagcaacaggtttggtagaatcactattgccaggtctgctacagatgttaggaaaggtatcagaaaaaatgtcagaaattgcgtatgaagtaattaaaaatttaaatagtaatgtgaacttggtaaattcaatgatggacgtaatcaaggaaaatgagaagatgaactggtcaatggattacactgagcgaagaaagaatcgttattatttccaacaagacagtgaagaagtgcttaaaggttggataaatagtataaacgaaggtgaaacccatgaaccagaagatgatgaagacaaatgcccaagttatgatgacaaagatagtattgaagggttatcagaaaattctagtcaatcttacaaatttgacttaaaagaattcgaggaggacatcaaaatggaggatgaagacgaatccgtgtacctatctgatataaatgagaggctaagcgaagagaataacccggaagatgaaatggtgcaggagcaaaaggaaagaatagatgatgagtgggtgaaatcatctggagaagaagagatattcgaagagtcattggagatacaagaagaaacggaggtgatagaagagttgataggaattgaagagagtgagccaaagccattaaggagaaggttgaggaagaagttcgaggagcctgaagagagaggtatcatagatgactcaattgaggaagaggtaagcgcacaagaagagagtgcctcaaagctaattgaggaagaggtgggattacaagaagagagtgccccgaaaccattaaggaggagattaagaaagaaatttgtggaatcagatgaggagacaagtgaaaaagattcaattaaagagggtttgttgtccgatgaagaagataaggaaccgagagtaaaggaagaagaagaagctgtggaatccatactgatgcgtaatattaataaagaaaatttagcaccgagagttgatgaagagttatggagaaaagttattgatcaggatagaccagtcaaagctccactgttgcttgaacaaaacatgaaatgtataccaaagattttttggtcatattggcatgaccacgaaatacctgatatggtaatgttgatgataaacacatggcaaatgacgaatccaaattatagaataatcattgtcactgaaaagacaataaagaacatggtgtcaagaacaaagtatgaggaactagagaggcaaacgacgcaatttaaatccgattggataagattgtatatattgaaagtgttcggagggatttggatagatacgtctacaattttaactgattcaattgatgaatttgtgactcatactatagagggagaatcaggagttttccagatatctttgtgcaaacgaaataacatgaataaaaccttcgaaagttggtttataatttgcactaaacataatgatttgattaaagaatggtatgaagtgactgatgccatgatgggtagaagtgagtcaaatggagatggtgccttggaatggttgtccgtaaaatatccggatatctatccaaaaattatagggtctatagtgcctaacttgcaaaaatatttaagagtatacctgacagagaaaatagccatagcattaacaaatggaattgagcccagttgtataacagaagatgaaggtgaagttagcttatttcataagttgccgataggagattgggtgagattgtggaaaatattcggtgatgaggaaatgtcaaaacataaagtgacaataccagtagtaaagctcataggaaaaatgagagaactattgatgttagattataagtacagagaaccagtgaaaaatagctatttagaattttgtaagagagctccagcattgagatataacatattcaactgttcaaaattgaccatcacagacaaagtcgttaaacataaagaggaatcaatcgtaataagttgccacaaaaatacaaaagtgttgttattgtgtagtggaaccagaggtgatataatgcagtttctgccaatttatgatttgtgttggggtttaggtgtacaagcaacaatcatcaccaatagtgatcatagtgcattaattggggataggcagtggcataaactgacaagcagttcaacaactttaatggctttggcaagttccgtaatagaaggaaaagacgtaacaaaaacaacagaagcagtgacaatcataaatttagtaaagaaagaaactgagaatataatcaacaattataaagatatgaaaccattggtaataatgaacaatgtttatcctaataagaaaaacataatgaaattattaaacacaaaaacaataatgatgagcacatttccagaagaatgggtcgtaacaaaaccaagcagtgtaacggaagatagcataaacgcaaaattaattagactgatatactcatgtatggaaggggcgacatatgagccgatggtgatcggaaaaatgttaacaagttatgaatggatgacacgagaagagcattatcagagagttggtccgttaacattatatgaaagtggcaaacgagaaatgaatttgataataactggtgacaatgtgtgtgtaattacgtttggtagtagcgatattttgttagaaagtaaatcaatttgccaattaatcagcagagtaataaccaagggttacaaagtgatatacaatgacatcaataataggaatgtgccacaatcagaattgaatcaattggcttacaattatcggggaaaaatcattttagttaaggagttgaactgggtagaattaatggataaaataaagttaaccatatgtcatggaggttatggtactataactgaagtgttacatagtaagtcaaaattaataatacatcctatgataattgatcagcacttctgggcagacaaattacaaagttacggattggccgtaacactaaataaaattgatgatgaaattgcaatagaaaattgcctgatgttagctgggaaaacagatctagctttgaaaaacctggatagaatgttggacgtgaatttaattgaacttataaagttaataaaaacaaatacgcaatgtgagttggacagaataaacccaggtgactcattgagtatgatatgggatgatgacatgaatgaaagagttgataatgaaatcatcaaagacataaaagggattaaaagattaaaaatggtcaaaacagaattgataataaatccgggtgtaataaactattgtgtgaaggaatcgatattagaggcattaaacgaaaatggaaaaataaagtttttgacaagtaataacctgggagttacaaacttgcgagacaaaggtgtgcataaaggtaacttaatcaacggagtgttatgtctgggttgtaacttgtgtttagtcgatgacctgggggacgcgttgataattaatatttatgatgcaccagtcataacattaaaggtggacagccagcgaagtgtttggcattgtagcttggtgaacatcagacattatgaggacatagaagatttaacatttgatgccttatgtcaaccattaatagatgatattgtcaaagacatacacaatgaatggttgagtaaatacacagtaatggaactagtgagcccggaagtgttaatgagtcacatgccaaagaaaagaaggctaaatatccattatagaatagtaaatgataacctaaaccagttaggggctagatctgatccgaatgtactatacttgacattatataaatacaggtacatgttcataacagattgtttgacatcagacagagatcttagtctaggagcggttacagcaagtgaaggctggagattggtaaattggtgcatcaggggcggaaggatggttatattctcatacgataatttaccagaaaatgtggtatttgttaattatcatgtaaaatatgaagcaccagttaggccatcaacaaccataattggaaaagccaagatgtatagtctgaataaagcaacagtgaggcataatgaagtaaacatgctagcaccgagaagcagcgcaatagtccaagggacaatgaaagggcacacattaatagttagtgattatgacaatagatcacatcacatgtcggatgagcgatcattgatgagcgaggcaaagaaattggtaatacatagtgacaaaccaataagtttaagcttgttaaacaaatcatatgacaacagtataaacagaatgattctcaggagtggttttgtcatgtacgtgaccgaaataggtgatgaacggcgcaccagaataatatgtaggaagttcaaaattgagactgtagagacaaaaaatgtggtaatgcaaaacaagctagaaggtgtagcagttgattacatgttaaaattctttgacacatattcgaacaagtgtaaagcatatgacaatattgatgatgacttgttacaattaagagattgggatgaactatttgaaagattaaacaatagtttggtgttgacgagtaatgataaggagaagttgaatgaaatagccaggaagagaggaaagaaaataaccattgcttgtttgacaagtgtaggtttatatgggacaaagaatagcaatatagaagaaataagttgcaacgaagtaatactacatagttatggaatactggtgacgttccaatccatgggtggatcacaacaagaacaagaacagcaatggtggaaaatattaagtaagaaaggtgaatccgtaccaggagactggtgggcgttaagaaagcagaagcaatctgaaggaaagtgtccagatttgagtgatgttattgcttacaatacaatgacaattcatgaaccggatcagaattatgtagagaatgaggtaactgcgtgggatgagacgagcttacaaatatatatagcaccttacagcaccccttacaccggaagtgcaattgaaccattgtacgatctgccagatttgccatcgatgcaactatgggatgacacagacttgactaattgggtaactatgtatgcaccagttaatgcatgtgagattaagagcagagaattacctgggaagataatagaagtagagaagattgtaatgtcaaagtggcctataaagagcagggctgtgctaactaaagtatgttacgaggaaggaaggagtattgtgggaaggatgaaatcagtagtgtttataaggactatgataccaaacacatacaaaacagtaatagagctatgcgaaacctacttcaaaacagactggagatatcacatcactgaatacaggaacaacagactcattattgatgccttagatgtgcaagagtggataaatgagaacaaagatactgataacataattagggaaatgttggaaacattgagtggggaaataataactaaaccgataaacgacgtaaatgtgcatctgaaagtggagagcctattaaaatcaaatccaatcaccgtaagtcaggagcaacaagcaagaataattgtgtggcaaaggaaatctatatgtgcaatatattcgaaattatttgtaaaagtcaaaaatcggttaaaggatgtattaaacgaaaaaattttgtacacagatggattaaggccggatgaaatatcagcaagaattagattgtgtaataatgtaaaaggtttctttgagaatgacctgaccaaacaagataggcaaacagacaagccaattatagatgtagaaatggcaatgtatgacatactgggggttcacacagacgtaataagatcatggagagagatgcatgagacatggaggttcaagtcaaaaaattattggggccaaggggaatcaatgagattaactggccaagccacgactgctataggtaattgcttaacaaacatgcaagtgcatcaaagtttcgttaagaaaaatttttacaatcttaaattggcattattcttaggagatgatatgtgcatgttatttgatgcaacaccgaatataaaaagcttaaggaaggatattgcaacgaaattcaatatgcaaagcaaagataattggtgtaataacggggcgacattttgcagcatggtattatgtaaactgccaaatgacagggctgaattagctgcagatgtagtcaggcttaagcataggtatgaagttactaacggggctcatgaaagtacagcagaaaatttattaatgcgaaaggcatcatacttaatgatgctgggtgatataccaggtgtaaaggaagtggtcagtaatttaaacttaccggttaaaccaatagtatggtacgggtatgacactatgctacaagctgtggcagacaaatacgacatgacgaccgtacaagtggagggttattaccacaacttattagacatgatgagaaaagattataagaggagtataaaatacagattgtttgggaatcaatga

SEQ ID NO: 1179 - DNA, 10410 bp, Yunnan alphaendornavirus 4; identical to SEQ ID NO: 842
  source 1..10410: mol_type = other DNA

SEQ ID NO: 1180 - DNA, 10203 bp, Alternaria brassicicola betaendornavirus 1
  source 1..10203: mol_type = other DNA
atggagggccaacgaattaacatcaacaacatagaatcgggtgtgagagcacccgattctgagtttccccgaactcacaacaacaacggggaaaacaaaaatgggggacaatttgtgccccatagatctaccgctatcgagatagagaggagatcagcagatgggccagctttgggctactgggccccttcatttacacgatccactgggccgagcccgtcggagatcattagcccggtggtgcccatgatcgacaactctttcgagagtaatcgacgcatgcgggacctagatgagttgctacagccgaattggaacaatgctgagggcctgttccttgtcgttgaaagcacctcaagcaggctgttgcttatggagagcggcggggcgattgaacgtctgagctcacaagctcgtactagaagcataacaatcggccgtgccgacgtcgaattatcgccaaggcgacagaggttgctagccgcacatgtcatcagccccatggcttttgactttagtagtcttatggctatgagccgcagccctgtcaacacagccgaaacaacgccagtcacatgctcgccggccgctgtgcgaagcaagagctttgtaaagcttcaagaggatgccaaagcatttgcagggatgcttaaggacataactgtcaatcgcaagcatctgaagacgctatcaagtcaggctggaattgacttgacgtcgtctcgcaatcgcatgacgtatatggcatggatggaacagacgaccggctcgtttgcacatataacgaacggcatgaaacacattggtggcgagaacatcgaccacttggttcgttcattcctttgcggcttcgtgcaaccactatcaacgtttagcacagcatgggttgtgcgtgcttgctacgacaaactagacccgagaatgggcttcaacgttaaacccctaaccaaggcggagatgctgctcgtcgctcaaagagaaactgggacaacaaagttcaggtgcaagatcagcctattccaacactggatcaatgggacaatgtacgtgggggctcatgttgaggaaggcgatgatgaggtcgatttaatcgacttccacttcgatttcatatttggaaagtcgaacgacattgagaaagtgttgaagaaccacataataggtgacgttgccacagcgatcaagacgcagcaggtgcgcggcaacttagatttacacaacagcaaagttatcaaccagctcgtcaaggcgaacgctatgcgtgattaccaaataccatccaacaccagtgatgccatagtagacgcactgtcgctggcgtggcccaaccgaacatttatcaaaagtagtaacaaagcggacaatgggcacgcttatcacgcggcgaacagggacttggtaagagagaacctagtcatgaggttcccgaagagcggcctagttgtggacataggtggtgcatatagcagccacattagaagtggcttctggaacgtgcatagctgcttcccggttttagatgagaatgatgccaagaggaaaatggaaaacgacacaggaatcaaaaattacatacatgacacagaaactatgatgcaatcaagcaaaagcgttgtcagcgcagacaggagggaggccgttgccagaataaaatcaggcaagcacgcttattggtgccactcgaaagcgcaaaattgtggcatggttgacaagtcgggaacctcttttggcgtgagcatcgacacacttttttatatgaagcctgaggacatggtggccgtcatgaaggcgcacaacataatttacggcctgcatgcaataatagttcctccgacattcatgtatgaaacaagtggaaagttggctttcaacgaaggccaatggcggataagcaaaggcacatttgaaatggtcaccaatggttgcagcggcgcttaccacagctccgcggcagtcatgaaaacgtggttgactacgcccctgtttgtgggcgagggttttggcttgtacgtgaggaacgaagggtacatggggtctcacatgctcctcaagatcatgagggtgccatacggaactatcatgcaacacatggtcaggcactgcctttggttgacgggcaacccagatgagcagatctataacatcccaattatagatccggaaaagccggtgacgttgctttggaaacaaccgttcaccatcgaacggctatgcgtcaactctacgatgctcagcatgctaaaaggcagactgagtatggacgaatgtaattgggaccaactatctatatacgcacgtgggttgcgccatcaagtttacaccagccaaacaggccgggtcatgcaatttaacatgagcgaagaggagtgccgctttcacatgatcttagccatgatggagcaccacaagctcatgaggcaaatcagcccattgattccacacgttgagaacatcgggagcaagggcaattggtggacacaggcatttaaggtcataaagaacatgctaatcaaaatgggccggacattcgatccaactgatgatgaatacctgtcaaaggtcatgaaagagcataacactttagacgagtataagatgagtcacgtgactgtatcagaagtgttgaaggatgtaagcatgtacacgtcgggcatgcagtccatgagcaagcaaaacaatgcggccatcagttaccacggccaaaatcgaatcaacgcgacgtgggtgagtaagctgttggactcaccagaaacgaatttcaacaatccgaacggcgccaaagtgcacgcgcactaccatagtaaattcaaaaccgaccaagcgacgcagtgcaaaccgcaactgggctgcccacacgaccacaggggaatgcacgagcatgacatagggagagaagaagcgaagcgaggcaattgtttatgttgcggcatccttagtccgcttttcgccaacttgtgcgaggtgtgtcgtacgatagagaaatgtcataacacaagcagcacgtgcaaacaccagcataactttgtcaacgaacattgttgcggtgctagtgattgccagtgcgtcagaaacacggtatgcatctgttgtgggaaacggtcactgtccagcccgtgtttgctgtgcgatgattaccaaccacacgaggaagctgactctataaactatagggaacaaatcaaacaggcaggcgccgagatattccaaaacgccaaagcaacgactatcaagaccatgtcgcaacatagccgacccattagcgattgggcagagcacgtcgaagaaatggaagagatggaacgagaaccggaaatcatgatcgaaaccacggttcagggcggtataatgacggaagatgccacgaaaacagatagggtgaggctgttgacattggcggagccgcttgaggccacagtcaccaacatacacggcgttcacgtcgtgaaatatgtggacacgcccgatgatggcacttgtggtttcacggcgctcgagcagctgccatacccaagcaagctaaacatggccgaccttcaaaggattagccacagagacgattggtggagcggcaacgacttgggtatgttctgcgtaagccaaggagtgaacttactcgtggttggaacaagtacgtccgcatattatcaaggcgacacgaagtcaaaccaatacggcgctatagttcacatgaccactatatccggcgaagtgcattggaacgcatgtgaagcgcgtatcatgagtgttaatgcagacggcgaccgagatttagatagacgcaacataataggaagcaccgccaaagaccgaacaggcaaagaaatcgacgaaatggacgtcgtgtctagagaagaattcgtgaccaatctgttggccgaaaaacaatggctatcaacgttcccagcctcaacagagctaaacaggctgatgagaactaaattagttaatgggatgctggaagcggaatcagagacgatcggattccattcaacgaatggtatgaactcgaccaagcggttcacggctgatgcgggagtcgagaaaggcctgcccatttacataacggacaacaggatcccgatgaatgggtctgataaaccgaccttcgtgaaatcagttagcagttgtgacgacgtcatgtcatttatgagccccggtgttaaattttatttctacggatttgagatgccgactccgacaaatgccgcttacatcgtgccagatgacgaaatccaaggcctacaagggataaacaacacggtagtgaacaacacaaaaaacgtcagcgagaaccaaacgtgcactcttgagctgttcgaactacaatcatgccccgcaacagtcgtgctgggaatggcccgtgcccataggaggatagatttcaacgagccaaacgccatcggcttagataggaaacggccaaattggaaaacatttgttgacattgccataagtgcacgcaaccttggcgttaaagaagtttacttgcctatgctggatgacgatttcgacgtcgacgaatttgacgcacttgtgctcagcatgctaaacggtcgaagtttgccacatcaaatcaaagaaaaacgaggcaaggcggtgccaaagatggttgtgcaaccattggcaaggaaagccttgaaccatttgatcaataacgctgggttcgctgacgtggatatggacatactaaatttcgtcaagcgcgagtcagtaggcatgagcaaagctagcggcaaattcatgaagatagtgaactgcggcagctgtgggctacgaatgctgaaaataacaggaacagaatgtagcagttgtgggccaacgtttaatatgaaagtaagtgatgcgttcagcgagggtgaattcatcatcatgcccagcaaagtgggggtggacaaaaccagcaattatttgaatggtaattggccatgcacagcagacccagttaggctgaatggggcatgcatggattattggcgcgaacaataccaaatgggaaccaacagcatgattgaggccaccatgacggtgcacgaaaacgattcgtaccacaagaagtcatgtgtagtgggatcatgtcacgtgaaaaacggccaactaaccatacgcgcaaacgacataaaagagtgcagcgcgtacgagccttttgtggtgcaaacagacaagacttggtcgtgggcattcagcatgcccgacggtaccattgcaacagctgctcgcctcgacaatgggccagtgcgggttatagggtctcaggacaacatagggtactgcttggtgatggcctgcaacttcgactccgggaggggttgcgtaactgaggaattaaaccagatggtcaagggggcaaaagcgttcgtcggcgtgcctggaggcgggaaaacaaggggtgccaaaatcgcctaccccaaggccacgatagtgacgaaacaagccggcatgttaaagacctttcgagccgagggacgtgatgctgtcaccccagcccaattgatagcacgcaaaacacccaccgactgcgtcattctagacgaagcgggcctgtgcaactatactgatctttggccaatggttgggaaggtcaaccaactgatcataacagcagatataaaccaaaacaacacatcattgatggccagtaatgtattgacgggtgatcacacttcgtggttaagtggagtccaaattgaacaagaattttttaagagctatcgatttggacccaaaactgcgcaatggctgaaacgattcaacccgaggatagaaggcgtgaactcaaacgataaaggaataacatgggtccacacaactgccaaacgagttgaagaccagctaaaagagctggtcggccgcaacgtggatgtcgtcttagtgcccactaacgcggacaagctaaaactgaggaagataaccaacatcaagatcgagaccatgaagaggtttcaaggccagcaagcagacagaattggggtgttcgtgacaaaattcaatccagcattgacgagcacgaaagcaatgtacacatgcctaagcaggcacaagactgaatgcatagttgtgaccgggccacaaactgccagcctcagcagctacatgttcggccaaaatctcgaccaggttgcagggtccgtcagtagactggcgtttgaaagatttttgaacttacccgggccaatagtgttcataatcaaacttggagcaaaaatcacatgggccatacaagggctgctacgagcattggcacgaagtgcgcaacacagctaccaggccttaaagcgcataatgagcgaattgtggccgcaaagcgctgacatcgatgacgatttgctatacgactatgagttggagcgtgttttaagccaggaatcgaggctaatgagccaagcagacgacgaagagcacgatggatcccaattcgggcctgggccgacgattcgagatgacgcaaccagcgtcgcgccgagtgacattgaactcaacgtgattgatccgactcctgagttggagcaagaagagttcaaggactcgaggacagaggaatacgcacaaatgtcagccagaggcttgttcttatcaccagatcagctgccgcgacacacaactcccaaggacttgagtgacgacgtgggaggtgccaaagtggcggaatggtatacgaaaacgtatttatggtcaaaggatcaaacccgacaagcaattggcaaggagtcaagattttggaacatggcggattcgtgtgcgaacggggcaacggaagtcatgacgtggatcgaagacctggtaatgacggtgtgggacgggttggtaagatttgtcggcatgatgttgcagcgaactggtcgagcactgaaaacaatccggcggtggttcgcaaacgtgttaagcagtgaaagtcgaaagagcgaagaagcagcatgggaggcagcgaaaaaggaggctgagcataataggtttgagagggtgccagaaaccattgctataagtacggcgtctgacatcggccagatgcaacacgaggcagggtcatacaagaagcggcggcccatgccaacgaaagacaagtggttgaaagaggaggccggttcagttgcctcaacgagaaatccaagcagcaaaggccaggcaagcccgacaagcgtgaagagcttggttcagaatattgagaaagggcgtgtcggccgcaccagaaagtcgagcaaagttttaaacgaagcattagccgcttccagcgaaacacgcatggaagcagagaaccagttgtttattaaaataggcgaaaagaaagctggccgcatgatcgagatgaactgggacttactccaaaacttcgactttgaagtcagctgggaagcattttgcaaggaatgggatgccgatccatcatgcacgactttctcaaagcactcaagcatgtttaaaggcaagataaacgccgccaagcatgaagaccacgattacgaaagcattataataatgacatttagcaaacacattgtcgccctaatcgtgaagctggaccagacgtttgtgtactgtcacgacgtacaaacagcccagaatagtgatagcgtcgacgaagtgctcacatcattaatggaagaccgagccggggccaagtctgtcatgtctatgatttatgctgccctgtggggccgtatgaagataagaataatttattggcaatggtatttgcgcacatggtttgatttttcatacaaagccatgataagcgaaaaaatcgagcttgacggggctttgaacttgcacgaatgggctgctaaaaacagctatttgacaatattgaaggctaagaaaagggtaacggttaccataagtggaaccgacgccctgatattgttgaacggtcaagggcttagcggaacaaagggagcgcgaccaatacacctgatacgtctgcgaagggggtcaacggtgaacgaagtccttgtcgaggaaataggtgacgttagaacttctgattatgttagagatacagtcaaaaaattgctttacccaagttacttcagaagacatgcccgagcacggtccaacgcgtcgttcggaggagcagtcgatatactgggaaaatactggtcaaggctattaggagccaggagtggcaatcccgtgcagttatctgaaacatggaacgaaataaaacacaacctgccgctcatggtaggtcaagagcatcaaaatagtgtaaaacaagggagaaaatacaaggcataccacaccatacgcgacactaataacctgatagacatcgacccggtgacagcaaggggcctggtagcatgctgcattccaagtggagctggcaaaaccactttatgcactaaggagcctgataaataccaagatattgatgacctcatgaccacagaagactttgctgacataaatgacatcaatttgaatgaaggaatgtttttggtcacaaaaaggtacagatcaaaagttcaagagtggatcatcaataggcccacgaagaggatcttgctatgccaccacccagagcaggttgaaggcttgattaacaacgttctcgtagtaataccaaagtgggatctcgggaaagcatggagcgacgtgaacaaccaaaggctgatcaagtgcacaggagagaaaatcggcccgtcaaaccatgatgaaatggagacgatgatagatttgtgggcggaaacacggctacgcctgtcattgagaatgggaacgtacgacagcaacgaaccaaacgccacggcgatcgattggtttctgaacaccgaccagaccgcgtacaacgagattaagctacccacaaacggttcgacgaaatcacgcctgcctgtgtacgacaacgtgaagcagcatgttacggtgattggccacgcaccacctgttaccagaccggtcatagtgaagtacatcaatcaactgtacaactcgatcacgacgcgcatccacggagaagtatcatacagaaaacaagtggttgatccagtggagaattttgaacgagtcgccaaaacattctttaagccagggtgggaagccatggtcgaggaatttgttgaaaacccagtgctgccaggatacaaattgaccgaagaatggctgagcatgaagggcgatccagaaccgacaatgaaagaaataaagttcaacatcttggacgactttaatcgcatgccgtacaacaaatgcaaactgcatttaaagtcggaaacgcttttaaaagagcaggttgacaggtttgaagaccaaatcggtagagtgatcgtgtggcaccccaaaccgttctgtgcagtgttatgtccggtgatcaacttgatgaaagagcgatttaagttgcttcttgacaaagaaaaaatagtgtacactgacggctgcgacatgaacgagattcagttccacgttcaggacctgcatccagacaaagtcatcgagatggatttgaaaaaacaagacaggcaaactgacatgcacgagcttgagaatgaattcgttttaatgacagccctgggttttccttcttatctaatgccgctgtggcgcgcttacaacgaaaattggcgttacaaagcctcggatatgacggagagctggcaggttgggaaaaggaaaaccggggacgaaatgacctcactaggcaacacgttcaaaaacatgagcggaatcgccgagccgtttgtgaggtataacacagaaagggttcttattttgagcgatgacatgatagcgtttgggagaaccgattgggaccaaaggtgggttgaggatcacttaagagacaaattcaatgtgcaatgtgaatgggctggcgggaaaagcggaaaattttgtcagctagtcgtcagccctgttcgaggttttggattcatcgtggctgcagatataaaacgattagccgacaagttcagagttgttaagagctcattaaccagggaagatgaagactgggacgctaggtgctacagttacttaagcctgatagggccttgtgatgctaccaacatcacagccagcaaaatgaacttgccgagaccggttcaatgggcaaggtcgtggggcctgaggttgcaagcgaacgccgaataccataaagtcactggtgaggagttggacagagacgtaaacgccttgtgccacaacatgatgtatagcggtttggaaaaacggaccttcaacgtgttgggcactcataagttcaaaaccaagtga

SEQ ID NO: 1181 - DNA, 17022 bp, Betaendornavirus sp.
  source 1..17022: mol_type = other DNA
atgcagcaccacaaccagctcaccaaactcactatgaacgccaactccaaccagaatgaaacagctaaaattaatactttaaattacccaccgcaaggtgggcaatttcatgaggagtcgcatgaaattgaaacaaacattaacaattcggctccaattgctgcagcaatcggaacaagcatgcccatcatggcatgccctgtttcagaagccctggctaaaccccaggatctcgccaaaacgtttggcgatgctgacagcacagaaattggaattttaaagaattccacaatggccaatgacactttaccagtggataggctgcagttcacctctagtgaaccagtgacatacgtcaaacacttccgtcaagccagtgatgaacataaggcaaaatttggtgaatttaaaataaataaagttaaagggtcaataacaaaaatcttaagcaaaccaaaaccagaagtaccaacaataccaaacgtggttgatgccaaaacggtgattggtggggagggtgactgttggaacaaacttagattctatgaccaatggcaaaaacaaattaaactagggaaaacaaaaatgaacctagaggcggcagcagcgttagcagctaccacactcaaagctgatggccctgctcacagcttgattttgtcaaacatgcagctacaagaacaaattaatgagattaaaaacaaactaccacacacattgtgtggaattatatccaaaacttttgatgctggctgcttttatgaaactcctgaatcaaagtcagccaagttctttagtgatggttactctgattatttctacatcaaaattaactacataaacaatgtatattgccatttggaagattgcacagtggacacaaatccagctaataaagccatgtacatcaatgacgggtatgagaccttaactgacataaatgaccggttatttgacataccagttgaaattgaaccatggaccactccaatgtcaaccccaccagcaccatacacgctggttccaggttatgacaagcttaacattgggcagaaatcgttagcacgagtagcttataacaaacaggaagctgctaagctgggcataagcgtcgctgagtaccaagcgcgtttagctaatgcacaattgcttgaacattataacaacttgaaatcacaatatgaagaattcaagacaatatattctaagacactattagaaagtagtgttacatcaggtgacgaccttgaattagtagcaaatgatgacgagtttaaacggtacattactgacctgaatgggcgcaagcgactgcaaacggtaactccagcaccaattgttaaggtgcttgaaactttagtgcaaaagggtggggaggacacgaacaaaacgccaagtgatcaagagcctaaaataaatcaaacaatagaagataaaggtgtgctgactcctgacccaaatcaactgatgcaggaatgctctgacatgcttatcggtgtgaacttcggcaactcgcttaaatcaaaacttgcgtcagcaattggcatgactgccaagcaacttgagaacgtgagtgagcactcaaatgtaattattaagaaagataatgacttaatagcaaaagcgtacgtcaaatcaaagtatgcaacaatcctattgccgcataacacgagtgagaaaacaatgatacggttgcaagatgagtttggtgagtttgacattatacctggtcgcagtgaataccatcaacatccatatcattcaacttcacgcaagtgcataacgttattaattacaaggcagttcccttcaaacacaccagtatttgacattggtggtaatttcccagtacacttaagctttggtcattataatgtccactcatgtttccgcactaacaacccttatgaaactgcaggttacattgaccgggttgtgcgtttagcaaaggctgttgcaaccaaatattcaaactacaaagagttccaaaaccaacaaaataaaactgtcacatccacggaggaatcggacaacttacagttagccaatgaaaattcatacatcatggtgaacaacttactaacttcacacgcgtacttctgcgacaagccagcacaagactgtcacgcggcacctaagcgaggcattagctttggcatgtcgattgacaccctgttttatgtcaaaccacatgaattgggagtaatatatgctaagaaacggattattaaagccactcatgctctactagtgcctccagggtttgaattgctcaatggcggcaagcttgctgaaggtgaaggttcatggaaaaaggtcgataacatgctttatacaacttttaacggtgtttcccagccttacatcaatgatattgagacactcagcttttatttgtacacgccaataatcagttatggtaagttcatagtttactgcaaaattgactgcagcatagggtcatatgtcttgatcaaccatttcatcatgccatttgagaagttgtcaaaggcttacaacgaagtctgcctgcacacgacattcattcctggcaaagttgtgatgaatgtcccagtcatagatgtgcacagccccatctcattggctggccgccaaccatttaaaatgaacccaatgcttattgacatcaaattcattgaagaactcaaaaaccggttgtctttgccaggtgctgactggaacgatttaatcacttttgcgggcaacttaattggcacagtccattggacgagtgcaggctcaaacaagaaatgggacctaacttcaactgaggtcaaaaaccatgcaatacttgcttacttattttacaacagagaaatggaaggtttccgacctttaattgacctagctggaaggcaagtgcattgggataagtggcacattcatgttttaaattccattaagaacacattgaccagtatagtgaaagatttggaccccacagcgtcacaaatgctaaatgacttcatttcatcaatgtcaaaggatgaaatggaaccaacgaaagttacatcagagatgttagacacctacaaacaaatggacgcacagctcaatgtgtcagacaacacgagcatagcattgagcaacttagttgaatacaatttgacaaactgtcccacatcaccagacatcaacactctcattgaaaacctgcacctaaagtaccatgatgggaaaaacgtgacagtgcacgtgaataagatgttggaaacggcacttgatatacgcccattgctatgcaacaagttgccagagtgccctcatgatcatttgatgccacatttgcacaggtttaatgtggctgaatatgaattaaacccatgctcatgttgtggcattgattcagataccacaagctcattgtgttatctatgccgcaccgattggccctgcaggaatgcagctgaatcatgcaaacacacccacaaaaacttgagtgaacactgctgtggcgtgccatcatgtaaacatggtatggcccatcgtaacaagacttgtagctgttgtaacatagccagcagacatgatccctgttatgcatgtttagaggaacaatcagatgatagttctagtagcagctctgaggccagcaactataacattaatcaaccacatgatgatgaatctgatagtgctagcacgacgactgatgtctttgatacaaaacctaaaccaactgtcaataagcacgagcctaaaactgggccaaaagtataccgcaatcctgatggtgtcaaagtcagatcagtcgtcgcaccctgtgtgacagcattaggtgggcacgtccattcttgtggtttgtgcggtaaacaatattggcacgaccacaagttcaaacatgataaacatcctgagttcgtgggtgattgcccacactgcgagaattcagcaaagagcaaaccttggccatttgaaccaaaagttgaaaaggataacaccgttgtgaatgaaccatcagacgcaacccaaacccaaccccgtggcatctctaaaaacatcaaagatgattaccatgtgcatacctgcaaagagtgtggtgagtactattaccattcacattactacactaaggatgatcatcacatcatacagggtgaatgcccatattgctcaaaccaagatatcgatggaatcaaaggaagcaaatttgatgtgagtatttcaagtaaaagcatatcgaaggtgactagaggttatcactcccacacatgtggccactgcaagttaaattacattcatgcacatgatgaatattataaaagtgagcatcagcataacattgatcactgcccattctgcacaaaacaaccaacacctctgcaccacataacgttactgcctgaagacacatacaatgaagtttataagtccgtaagaaacttgtgtctactattagggcaacaaagtaatacaatggaaatgatgatcacgctccataaagcatcatttggtgaaataattgcagacagttattatctgagctcaacataccacgtctatcacaatgaattcgtgaacaggaatcctatgctcaaagacttaagtggcgtaataatcaagatattcaacaccgttgacgccgcaccacttgacgttgaattagatatggaacggatcaccacaacaaatataatgaataatcaattcctaacgtcatatggcatcaggacgaataaattagatccagcgcaagtcggtactaacataacaaaaccctggcgtataaagcaccaactgcctttgtttgatccaaacacatatgaaccaccggcgctgccagtagcacctgtgggggatgagacaaatgaatgggctgcagaggttgttgaaactaacagcaacaaaatagaagccatgagcgtaaatgtgaatcgggaccccattgttggaagtgaaagtggtttgatggagcagagcactatcccagcgactctaaccagaacggttgctactacaccaaccaaatcacagacaatggatgaagaagcacaacaaacactagaacaagcaagcaatgttgatgatggtgtggttgacacaactgaaaatgaaaaccaagaggagcctgaacatgatggtagcactgttagtgatgatgatgacgattatgacacatggcgtgaacacgagcgtgataatgaaacagattatgatgtgttacccggcataactatgagtttagggttcactcatatggagcccacgctaacgaaactcaaagtgacacccacaagtgcagtggaagatgtgttcaggagcaaatggtttggttacaaagacaacacagggcaaggtgactgtgggctgttggctctggcacatgtgttcggtgatgaactcatccaaagttatagacattgtcttaacaaagagcaaagtgagtggtggggcatggaggaatttgtcatgttctgtaacatttgccatgtcaacttactgttggcaattgatcattacaaagtggtcctcatctgtggcgacaaacaatcagtttcacacggatcaatcatccggacgaaactgtttggcggtgaagaccactgggtggcggcaacagctgatataattgagttgaatgccaaccaaacatttgcacagataaacagaaccctaatgaaaacaaatatgctcttgatgacaaacaatgaaattaaaaccaaactaacgggaatcagtgaacaagtggtgcaacatcacattaattgtttcaaacactctgacaaactcgaattggcagttcgactgggtggcgtaatcaattctgaaggattagtgcacaattcatccaagttttcaacaaaattgcaagattatatcaagaaggatggcaaactcacaatcttcaaacacccaacaggctggggcaaaacgacaagtctgccaacacacttcaaaggaaaagacatcacgttgctcacaccatcaaggtcaacgattattgggtcgtatgaatatattggtcggacttacaatgtttcagtaactggcagagctcatgctaaagactttggttatccttcagttaaatataagcaagttgagtactcaaccaaagaaggcactaaaaccaaggctgtcctacaacttgggcagtaccacatggttacagttgatagtgcttatgaggcgctacaacatggttacccacaatatcttaaccgtcttgtgttcctggatgagctacatgctatgtcccctaaatattactatgttgtgagcaagctgaaatcagtgtatgctgtcatgagtgcaacaatagacaaacacctttcaacggacacaaagtaccctgttgaaacaaaaatcgttaacaacccatcagattacatcactggtaatgacggtgagttcacagtggttaaaggccagcgggatgggtcattcctgacacggcaataccatgatgaagatgacccctacacatacatttcagggaaaatgataagccaaatagacctcaatactgtacgcagaggttgtgtgactaatgctgtgacaactggtacaacaatcccaaatgccaaagtttggattgacatcggtgaaaggtacacaattgacattaacgtgctggcatcatataatgtgtcaaatgcattaaactggttttcggttgtcacttacacttatgacattaatgagatgatgcaaagtaggggtagggtaggcagaacacaagatggcatcttcattggtcaaatgccagtcaacgacaaaccattaacactcacatcagtcattgagtactgtgctatcaacaaagtgatagcactgccacgtgatagacacctagatgttataactgtgggcaaagccaaaatggaactaccaaccgacaaagatgaattaattgaagcattgcgcaacaaagacctagataatgttgatgaggaatccatagcagctcaggttgaagcaggagagattacacaaaaagagatggacatgatattagagttgaacattgaaggcaaagcaaaagatattgaaatggcaacccgctttgcagaatatttgttgccccgtatcaaattagttagtgatctgattgataaggcaagtaaaatcaacaatgaagtggtggattacaacatgactaatagtaaactgacgagagacgctattggaatgttaacaaatgttaaaccaggtgctaaagttaagcatggtactactaaaccaatcatccgcagtgttaaggcaggagcaaacattttcacccgacaatgcgacaagtgcaagaatttgacaattgacattcaacaagaatgctacacctgcagattcagtgccagcaccgaatcaaaattcttgaagaagtacaaattacactcagccaacatcatgaacccattagcattggcaaaaacaactctaatgagccatgacgtgcctaaaacccaagatgaggccgcgaggctagatgaaatatgctttgtgaacaccttgaacacattgtacatgtcattgaattcatgtagaatggcctcactcaactggaccaatgccgacgcagggtatggacaaagctgccatttgataccaataagcagtgacggatcagggcatttcttggtcaatgtgccaaagattaaaactttacaacatggtgaaataggtgttatttattcagaagtcgggtcaagaatgtctttagcacactacactggaaaagtgggtggtaagcacgacttctcaacccaccctaacattaaaggaattatggcgctatacaaatattccaatgcacataccttacccacactagaaatgctcgataaaagacaagtgcctaatgttgataggtacaataaacgtctcaaaatgatgaagatatatagtggggttgctggttctggcaaaacgtggcacatggaaaatgagaaaacaacagaaaaattgagcattgttactgttcaatcaggaatgtatgaacggttcaaaaaacggtactcaacgcctagacatctcatgactggcatgtatgacaagccaatgttcctaatagatgagtttgggctcatttcaaatactgacttgtggatgatgagcaatgacaaagtgtgcatggctgctgctggcgatttgaatcaaatactaccatccgaagaagaagctggcatcattccaggccaacacttttcaaccatgggacaagttgtgtatgatggtaaaatatcaaaacgcatcggtgaaaagagtgcaaagtcaataactaaagtgtacccaaatttcaaatcagaggggccaaaaccatttgatgaaggaatcaccgtcattaacataggagcattaaacaaagacaatttcattggggcagtcaatggcaagcgtgttgacacaatactgacaatgaatacacaatcagttgtcatggtcaatggttggttgagcacgaaatcagacgcaacgaacatcaacatcaccagtgtgagacggtcacagggttcagagtggccgcatgtggttgtgttgtgtgatggaacacatgttggtgatcttaagaaaatattgtatgtagcgatgacacgacacacacattcatgcactctgatttgtaatgattttgccacaacacaagtggccagtattggcttgacgaacacaagaggattaacaatggcaagccggattaaatcacaaattaaagttaaagagcgacaatcagctggttcaagctctactgacatagcagaattggttcacttgccattttatgaagagagagggccatactatgatgagatccagttcaacagagctttgaacacacccataccagatgatgaaatcttaacacaggaagcgccgccagcagctgccacaccgaaacgtggggcaaaattggttacagattggtacaaaaatattgtgctccaatacaaatcgtacgcgcggaaacatccacacataatcatcaatttcaagcgtcatgaggacactgaaaggaattggagttatgggcaatggcattacaacagcggtgaccaaccaaatgttgaaccaaccagagcgtttgatctagtacacggtgaaataagtgaatggtcaggaatgtcaatgcaagaccatgatcgcttgatagcaatgagtgagataaggcagttaagctcttcaaatataatggccaacctgttaaaacctttcatgaacaaaagaattgactatgatccattaacttttgtgcgattcaatccacgtggttgccgccagctaagtatgtcaagtgtaacagcgcaggaaataatcatgctagcgatgtcagacggcccgattgaccattctgacgttgccatcagtgcatgcttgaaaaatgttcaaacactaaggttgttgggtctcattgattcaatcacagccttaacggtgctatcattcaacctaatggcttgtggcatcattataagcgtcatggatgttgataagttgatgatgatagacacatttgattacaagctcacagataatgagaggctccaaagcaagcgcgttcatattgaaatggactttacacaattcatgttaaacggcaccttgttcaaaactatgttggagcgtgaaggacataatacttatatgaggtactgtggcatgatatatgaatttattaatgttgagacaaccaaggggagaacagttgactcaccgcatggtacccagggtgaattttcaacaaggaacgcccagctgttcaacttcacggtaaaagcgacgaccgaaggtttcgtcgactccaacttgaatttatatgatgagcgattcttattgcgatttattgcacaagctagcgatgacatatgtaaattaacaaagatgggttatgacaatttgattcagtacactgtggaactgggtcacagatcagtggacttgctgagaagattggcaacacatgcagctaaagtgttcaggtttataattcatggcataagtagctcacaaacatacctaaggaagttcataaatagcattaagagaatgtatcagcggtctgccatgatattaacaagtttaaaccatgacaaaaaccttgaatcaaatttggaagccatgagcaatgatttggaacagaatcacctccacactgatatgtgtgaaaatgtgcatgagatcgacaacaaggactacttgtatgtgttaaatgaagatggcaccaagacgaaacatgcaatgagtgttgaagtggcactaaattccgatttcacttgcaccagaacaaccaacattttggcgcttttaatattaggtgatctaagctatgataagttggactcccatgataaactactgattgacaaattgattcaaatcatgttcgcaaaccttaatagctgcacagtaaacgagtcttggcagccaattgttgatgctaatagtgataaattattggaaaacgttggctggttgtctgacttgagcaaacttgcaccagccttaggtgaggagtcgagccacgcactgactgagaaaatcattaacaacctcaatgagatgaatgttacatttgcagaaacgcaactaatgtccaccactgacttattctcaattaataacttcatgtacatttatagctcactaccatcagagtttttcctaaacatcaatgatgaaaatctggtcaggttacatgaaaaatatacaaagtgcatgataaccaataatttgtacaatccttatgaatcaatgtgtgaaacaaccacattgctgactgatgaggaaattacagacatgaacgttaaattatcactgatagttaacatgaaacgagacattaatcaagggtcaattgcacggttccatgtggatatggggcaaattgatggaatctatgaagaattaatgacatgtggtcaagctaacccaaatcagtttatcaaattcaacacactatcaagactcttaacaaagctgaagtcatattgcaacaatagtgaactacaaatggttttgactaaatgtaaactaaagtttggcaatgccctaggcatgctagctggttgcattcaatatgtgtggggtggcaaggagcatgtcatcaaacatttaacaaatgtatttaaaaccaaaccacacgcactggtagtgttgttcaacgccatgtgtgacgcaataataacgagtgcaaacaatgctttgaccataatcactaaagcattgaaacagataggaaagttaaaagtgagcgccttgagtttcttagacttcgcactgctcacgaatgaaaccatggcaaccgagtttacaggattaaatgttaaggagtacaaagacacgatattaatgaaacagctcatggttacagactgtgacatggacgtgtacaatgagaacttaaattacattaatagcctatgtgatattgttggagtaacaatcggcatacgtaggcatgttgctgttagtcgcatgttgaacaaattgggattcaactcccaaactataagcgacataagagaaggtctgggcaaattacaccattggtgcattgaaaacgatgatccacaattaaaatcaaatgaccaacatgaaccaatcatacaaatgtccaacctatacatgtatgcaaatgaacctaattcaaaaaagatagaatgcctagtatcaacgttaatgtctgacgacattgaaaatgacttcatgggacatgagattgaattgaatttcatcgcaactcacaagcaatttatggatataaacagtggtctggacgctagcatggcatgctatgatgattttgtgaacttcattaaatcaaaaccatacttgaccgtcatgcgttggattggggtgaattcagcaaagctgatgtcatggctcaaggaggctgccaaatacacatccaacaaaattggaaaactcttagtatggctcatagaaaacaccagatcatgggtgaacaatatgcagtcagcaatacaattggtttacaaattccttaaagctgatgatagtgaaatggaccagtttgagttgcaagacatgttcccaccaagtgctgggatgtcacaagctaggccatattatgaagatgagttgtttacaggtgatagtagtgacaatgaatcggacaccacggtggatgaaaattcatccagtggtgcaaaaatcaacacaaactcaggcacagtagtgtataaacaaatcaaagagttcctgttgaccattgccacggttgtgttgagaggatgcaaagccgccatacgaaccttaacgaattacatcaagagtgggttcatgtgtttgagggacacagtcatggattatgcgagaaatgccatgaaccaggtgaaacatgatggtagtaattggttgtgtcgagtcacaggcaatgctgacagcttagcaggttgtcgatgcatcattgaatcaccaaaaggaacatacttaagcaacactatagaaaagtgtccccatttcatacgcattaactgggatggtgatctggatgttggattgatgtgcaataaggtgcatgcaagcgcacattacttcaaagaactaattaagaacgtaaacacacatgaaacaactggtaatttaataatgaatgacaaccctataaatcaaaagcggttaaatgaatttgagaaactgtattcagagaacaaaataatattggtaggtggatactacatgcatgatagcgtcaccccagacggtgctaacattgataagggcctgctgaaaatgtgtgatgaattaaagtcagggtacatattcggcagtaatggtcttgtaccaacagatgaaacagcgcaaacaatgacaaggctttggaagttatcaatcaatgattcaatatttaaagcaaatgctgctgaacgggagggcaaagctaaacgtgtttgcggtttagatggcaaccactatgaacccaacacattgcccaaatttaaaataagtgggcagctaacagcgatggatctggcagcagtcaatcagtgtgacaaaattgatgaagttattaacattggcaaacaaacagaaaacatcattacgctgccatcaaagaaaaaacctaacagacatgacatgtttaaagagtacagaaatcattcaactaggaccatggatgacattgtgctaagaaggaatattaaagtcattaacaaccaacccattctgaacaacatcgccaaatccacaaggagaaagtcaaggtcaataatcgataatgccacaagttatgatgagctgctcagcacagccttcatcctgtcaaacactagcagcttgaaactaggaagtgagaaagtgcatgcagtatcacacctgcatgatgtgttcagagtggccgaatcaaatggttatgatttaagcaaatttggtgttgatgcgttcaacagtcttgataaggcgaaacaaataatgaatgacacaactatttataaatacatcagtaatcggctagctcacagacaaaggaaatcacgtagagttggcttcaatgatgtggtacgggtgaggataatcggtgatatagaagatgacttaaataaagaatcagatggggatgagaacacacccagcagcgttgtggtgccggctgggcaacaaactattgaaactgccaaagaaacagcaaacaacaacaacacaccagagaatggcacgacacaagcacaggatgaggtgtacacctctgaccaaatggtcaaggacaatgatcatggtcactcgagtgttgaggctaacagtggcccaaccattcaggaagaacaggagaggcgaggtatcaaggaagaagaaaatagaaacaaaactcaaacgccagacgtaccaagtttgaagttatacaaggaacacaatgtccctaaggaatattggggggccaccaatcctgcaccattgtggactaaacgaggggccacaatggcgttattcaaaggccatgcaggactgagatcagataaactggctaaacatgctattgcacaaaatgatgggtcatatttgtacacttatgacatgttcgggtttaaaggtagagtcaagatgcattttgagaaggtggatggtgtgatccagaaacatggttggatagccatcaatgctgttgatgaggactttatagtggtcattatgcccggggaaggaaataggaaagtgtattgttctaagccagctgggccagtggtcaacagtaacttggaaaacaaactttataaagcattaagcatgggaggtagcatcatgggcatgctgcagaacctcatcaaaacgatttacatcagcttagccaacatggttaagaaagtaaagtgccaaatgcaaagtaaattggctttccgtcaatttggtaaaacagtggtgcagaggccaagcaggtaccactcagtcaaacaagaatttaagaacaataagtggctgaatgaaatgtatcaaacttcaaacaacaagtggcatgatgattatgacatttactttgtcattggcaagggcatgggcaaagacaggtgggtgcatgtagcactcggtaacgatgtaattaccgtggaagtgtcagtgaatgccatgtggatggcattaactcccaaggattctcttgtggtgagaatgattaaaatgtatcgcagaatgggtgagcaagagcgtgaatacgtgcaaattgaccgtgaaacactgcgtgagcttagtatggatgatgataccatagagattgaatcaggtggatcagtgttagatgtgtattataagaagatgaaacaactgtttggcaacaccaccaattctgatgcgcttgaaaccatgaagctaattcgagcaaaccccttgtacaacatgcttaaatcagatgggctcatctcgcataacaaacgtcatgtcaaattgaatgccaacagtgaatatgagcaatactttgagaccaagtttgaacgactggcaggtgtcaacgtaattgcaatatgcataccatcaggtgcgggcaaatcaacgttgtgcgctaaataccctgacctatttattgatattgacactttaatgcgcatggaggattttgctgctgtggaaacggttaaattcaatgatggatgggacatggtgaacaagcggtaccgggaaagactgtggtcatacctagtagcaaaacccaacaacacaaaagtgctattgtgccatggccctgaacaagttattggcattagcaatgaaatatatatcatgattccaaagtgggtgggcaccaaaccattctcagaatcaaatacccaatcacttgagcgcgcctggaaacaccgcagccaatataaggcattaaatgtgacactggataaaatggcagtccgtaggccaattgatcacaatgaaatggaagacatgtgcttaaatgtgcaacgaatgaatggaaccacaagtaaattctccagtgacgtattggggcacttggaaacaaaattggttaataacaatagcaacagcggttatcatgcaacttatgatgccacaaatgtcaacaaatatgtgttaccagttgaagggcatttgacaacacgtacaaattatcactctaggcctgttttgcaacaaatgacactaattgatcgtgagcctgaaacaaaccggttggtcgcaaacaagcaatcaaaccaactattcaatgctatcacatctagattgtatgggataaatcaattgagaaaagtgaatgttgacacggatggctatatggatatgctaaagagagtgtgccatgataactttgatgatatgtgtaaagaatttatggaaaacacaatatcacctgatgaaaatgatatcaatgcctggttagaagtaaaggggcacaagtttaactaccttaaaacctgttatgagtacgctatgagcaagccacatatgttttcgtcaaaattagcaaaagcccacctcaaaactgagaacttgatgaaagaagatgttgagcacatagttgaccagttggcgcgagtaattgtttggcatgaacagcaggtaagcatggtactttgcccagtaataaatagggcaaaggaaagattcaagttgctcttaaatgacaacaaaatgaagtatgctgatggcatgtcaccattacagataaacatggcattaaggaaagtaaagaaaacaagcagcattgttgagctagatttgagtaaacaagacaggcaaactgacaaacaacttctagaatttgaaggtgagttattacttaaacttggagtgaacaacaaatgtgttgaatacctggctgaagccaatgaaggatacatgattaaaacaagagaaaaaatcacagcatatagaccaggcatgagatggacagggggtgaaatgacttcgttgggcaatgaaataagaaactgtgtactactggggcaaattgacatggcaatgccatttgagtttgcactaacacttggtgatgatagcatcattttcactgatagtgaaatggatgaaaagatggttcgcaaaatgggtcgtgattaccataatgttgaagttacatattcaattaaaagtgatagtggcatatttttgcaacacattatcgcttgggtgggtgacaagtactgcttctgttgcaacccactaaggttgctggaacgctacagtattagtgaagatggcatcaatgaaaacctgctaaataaagccagttcatatttgaacatgttaggccactcaaccaaaacagcaatggtggcagagaagataggttgtgatgaacccagtagcaatggcataagtcaagcagatgccctgcaggcacagagcatgtatttaaacataacactgaatcaagtacatgacataattgatcaactgttacactcaatgattaaaccaaaattccgcaccatgggaatcatggtatggtcacaacgccagtattatagcaaatttgacatgaataatgtggcgcacaatgatacaaaccgtggatggacatacagcaatgagtatgagaaactaatggaagtaaagcgtaatgcgcacactgagtggccgcttcttggccattttgcactgtaa

SEQ ID NO: 1182 - DNA, 11364 bp, Botrytis cinerea betaendornavirus 1
  source 1..11364: mol_type = other DNA
atgtcttaccaaaccgctgccacaaattcaaacaacaacaagaggagtctcggcctcctccctaaatatatgccgagaaaaaatatgtcgcgttctgatgatttcatcaatatggatagcgacatttatactatgaccaatagtatgacatccagatacaatcagcccaagatatcgaaacttagcacttctctgagaataatgagagaagatgtatatgggccacttggtgcaattagtaccagaaggaaccatgtgtataaagatttgatatgccataaatgtcttgataaacacaacaaaacatgttcggatgaagatgggctaacttacagtaactacgtaaaatacaaaaatgatattaaaagccgcaaaacaattggtgggtttatctacaagtcttatttccacttgaaactcgattgtgaaatcattggtaactataagcctgtctttccctatttgcacgaactcatagaaactagtgtatcatttgttgcacttatcaacctaattgagccggaagaaattgccgaacctgttactgatccggtcgttggtggggacggttactgttggaaaaaaatcttcccattctcaaactatggtaagttcatgacctacgctcattttaagcaacagttagaattcaagtacaatggagtctttaagatgtatgtgttactgattatgactgaagatggtaatttgcatcttgaggatgtacaaagctttggttttggaaaagacgagtatttgggtcctgatttagctcgcggtgcagaaacagcgatcggcaaagcagcacctccatcagcttgggtacatgtgtgcaaactgccagaatcgcatactgatttaccttgctggaatgatagtctccacaatgttaagatcgaaacacgcgagacagaacctaatggtttgatcaatactaagtttgtcaaagttgaccatagcgatatgacgctaccacatgagctttggaacccaaacaagacgttagttcgctgttcaattgataaccttattgaaacactagttaccaagattgaggaaaacaaatctcaaaataaacactcaaccatgcgatacggtctttgctattatagtggtgttcttgttatgtacagatggaggtttgtcgacgctctaagcaattttactagacactactcgattgatgaatttactgtatatttgcgcacattaaatatgcaaatcaacagattcaaagaaatacgtggcttatcctggctgaaagaaggcatagtaagcactgattctgacgtaacagatgtccggctgagcatagacagattaattgatagtaccaacatctatatgaatggatggacaaatacgactagatgtgctcttgttgggtacacaccgataactatgcttgagaagattgcgaatgatatcggtcttgacagcagcatggttaatactaaccaattaaataatgctattagtgacatggttaataaacgagttaccagagcagttacaaaacataccgacaatgccatcatactaccgagcagctgtcctgacgatatagtaaatgaccttaataatgaattcggcaacggcacttttatgcgtggtaacacagcacaccattcacatgtctaccaccatggatcacgcgttgccgttaccaatatgttatataactggcacccacgtgaaggtttggtatatgacataggtggaaatccaaatgtacacctaaatgctgggcattttaatgtccatagtgtctatagtacaaacaaagctgctgacaatgcaagacatataaaatgggttaaaaatgccacaagctgggcaaagcgcaactgtgatgtagccaaacagccaagtgtaatacctggcatggcaaaatcagtgttatccgaccagaacggtgtttggtgtgacaaaggtttaaaaaattgcgtgcattcaaacaaagctggctcattcgcgatgagtattgatacaattttccatatttcacttgaagaacttttcgatttttatgtgagaaacatggtcatccacagcgttcatgctctaacaataccaagcgattatagctataaatcttctggaacacttaaatataatgaaggacactggtataaaaataatgacaattggactattgagtttaatggtgaaagtttaccctatacacaatcaatagataaaaccaacgttctcctgaatacccctctttttactttaggggaattagtgatttattgcaagataggtggtcatcgcggtgcacacttaattatcgaacatttcaccttgttgcggtcagaactcgatagcctgtatgcgcagcatgtcatgtggttcaatactaatatggacgagttgtttgttatgattcccaggatcgacatggacaaatcaaaaacactaatgggtagggaacctttccatcttgaacaagttgtgataaatattagattttatgaacggttacttaaccgccttatgcaatcttacacatgggaatcattacttagttatgcagcaggattaatcggtagagtgtatgcaacgagcagtggtttacatatgaagtgggacttaacaaatgcccaagtacgtgatcactgtttggttgcttattggagcatgaaccacataaatgagtctgctaaaccattaatccaacaagctgagagatcaaatcgtgaccctgatttcctaactagtttgtggcattcacttaagaattgggtcaaagactttggttctcaatttgacccaactggttccaatgctatacaagactttattgcatacaataagggcgacactttaaaactaattcaaatgttcaacaatgcctcaaagagtgtggaatccctctctgttgctactcaaatggtgcactcacgtagtataatcgactgggttagtactgatctaggcatgatttatgaaggagttaacattagtattgacacctggcgactaagtacacagatgctagataagttaccaacagtatatgacttactaacatatcaatcatcagaaaaaatgtataaaagaagtttgtgtgccccgcagcctggctgcacacataaccacgacactctgcacagccatgttacaagttcacatgggaaatcagcaaaatgtgtctgctgcggaatatttagtaacgtcagtaccaacggtggctgcaacctctgtagtggtaacccaccatgttccaacaaaaatctgaaatgccaacatgaacacacgacagtaaatgatgagtgctgtagcaagaaacaatgcacctgcaagaaaacgtttgtttgtttatgctgcggattgggttcgatgtctacatactgcaacgtatgtgaattaacgcctaaaaacaatgcagaagcatatccaaccaactcgaaaccaaagcaaccgcactaccaacattctgcaagcatgccggacacgatgaatgatactagtgccaggcaaccagaggccactgttccgtcggaagattcccgcgagtttgggtttaaaccaaactcaagcagcagtaacaatccggactctgacacaaagttcgaaaaaaatagtggaaataatgctgatatggaatcaaatgtttctataccagcttccaaacctgaaaatgacaaacccaatgtggcaactgacaactcacgtgaaaatggagccagccctgttaacgataatgatgatgcctttaagttcacaaaacccaaattagctccgcttgacgaactctatgccgatagttccctgattagctaccctagcccaattatcaatattacgaccgaagaaagagattacaagcacactaacatcaatctactgccagaaacatatagtggtgccattggagtgaaagttatcaattatgttaatgtaccaggcgatggccactgcggtgcgcacgctcttgctcgtgcgttgcacgttaatgtcgagtctgtgaaaaagtggttctcaatagcactaggtcatgatgattggaacagtagtgatgaattagttgcatacgcacaatcagtaaacactaacattatcactattgaaaaagacgcagctatattgactagatcaaatgaggatgacattgcaattgccatactgcatggatcattgattggtctgggcatgcactgggtaccatgtgaatgtgttattgttagttatgcgtcaatgtttaacgtgagaataaaccatacgtttcaagacatgctggccgctttgccagtgtctgaagtcactaatgatgaaattactgcattcacttacagccacagccgtgaaaatttaagcaagatactcactattggccagtcattggtggttgattacgattatatcagtgttaatacaccaggtcacaccactaatccgctagttagtgaccacaatacaaatggtgtcaaatttataactgggcccactggtagtggtaagacgacgttggctcacacattaatcaaggggaagatactgttagtaaccccactcagaagtgctgtcactactacatacaactacatggccacaaaatataaagtttgttgcaggtccaacagtgaatgggcccctaatgaggctaacaataacacttgccacggttatgacatagtgataatgacagtagaaacgttatacgcaggtctattcagtctcgaacgaggtaatgaaacatacacacaacttatcaaaaaccgaagtatcatctgtgatgaaatacatgacttgacacctcactacgctcgtgttttaacacaattgcccgcacataaaacatatctttgttcagccactattcctggtatctcaactaattatataaatacatttgatactaccactagcttcatggcaaacggtacttttgacaagtggttcaacaacgatattgagagaaatgacattaatgataatacatgttacatagttagtactaagaatgaaactaacctaataagaaacaaatcagtatctgtattaaatagtgatacattaaataaaattgacattaataacgcacggaaaattattgctacaaaaattgcggcaacatccgttactttgccattaattaagaccatcattgatagtggagtacgtatttatgctgaaatgatttttgaacccattatcaataataaaaccatccggtttttcaactacacaaagtacaattatagttggcttgaaatgatacagtccagaggacgcgttgggcgagtacaggctggacacttctttggcaactgccccagtgactccacccctttggctgcagacagtatgctgctctacagcatgtacaccaacactgtttgcccttcatcattacagtccacgtgggccagtatcacgcaatcgaattacaatagtatcaagtccaaaattactagtttgtacccaactgacggtaccactccagaatgggatagcgaatttataacctggaaatctgtttacaatgaactacttgttggaaaaaaatctggtttgcgaccaaggtttagtgatctcgaatgtagtttagaaaacataatgctaaacctgagcaatatcgttggggtcagtaatgttagcaagaaaattggaaacagtgtcatagaaacatcaattatgtggaatgaaatcgggtttgacagcaaattacttaataataaaaagattgattttaataagttggttgtcaatgttaatgaatcgcagagcttgattaatatcaaaaaagataacaatcaacagctttcagaaaaactacttttgatgacagtatcaaccatctttgagactattacagggttaatagcatcaggaagtgccatagtgaataaaaacaccactgcaaaccaaataggacaatttatagtatacccaaatataatggcagctgaaaaaagtctcggaactaaactgcgtgataacgaaatcatcggaataatcaacaattcaacaaaaaacataactgttaacatagttaagaatataccaagcaacgacacaatgatagttgtatctaactatcgaaccactcattacagagctgagatagccgctattgaagcgatagttgaatcaaaaaacaacattatgcaaacgcttagcaatagtacaatttattttggtgctccagggactggtaagactacagcaattatgaagcacaaggaaggccattacattaccacgactaacacacagatgctaattaaaaacaggtcatgggtgcctcccaacgcagtaccgtacgatcaagatttaatactagttgatgaagttggtctcatgtctgtaacaactgtattgacacttgcagctaagtgtgaaaagttgatttgcactgctgacctccaacaaatggtaaacactcacagcgatacccatactatgtatagtggttatgaatctggtcttcaattattaaaatcttttagtagaaatgaagaattaactttaacatatagatttggcccgaaaacgtgtgcgatggtaaacagattaggattcaaccttaaatcggctgtagatagagatgaaaccattactagttcaattggcaatgtgagaaacaagaagacaattagcaatctgctatttgaatccaaccctgacctaattgtgtgcagcagtaatgctcttgctagacacataagacagattacttctattaatacatgtaattttgcgaaatgccaggggttagaagttgataatgtactagtattaatagacaatttacacaataataggaaagatgcaaacattaatgagtttgcaagtctatacgttgcactcaccaggcataccaagagagtgcatatacacgtatccactgacgatgcgtctctactgaaaaccctgaatgtcacccctatgctaactgacatatcagtgaataacaacataggtggcaactggactttcaatttcaatatttatggcaaaatgttagatgcaatagttgatgacctatgcaaatctaattcattcaacaatggaatatcaattctgcgtgagtggggctcaggtaaaatatcaagcaacacggcgctattacgtatggacaatttcaatatcaattttgatccatcaacgctcatatttaattcactgcacacagacattaccaccggtctggaagtgtgtagtgttagtctattcggccacaatgtttatttgtttaagttatttttggatgacaacaaaacgataatagaattgttaactagtggcttacccagtggcacagtcgttaggaaatttatgactctgactggaaagaaatttatcaagaaaaccggtagagtaacagcaaagttgatatctgcaattgcatcaattatgaatgtgccacgtgaaatgtatgaattcgtaatgtcatttgaccttgaagagaaacataatattggtggtggcatcaacattggacatctactggggatggcactgcttggtatcaaaaaagcagtcatattattaatacgcataactaaatctattaaagataaagttatgagcagcatagacggtaaaataaccgcacagtttttgaaagattatttttatgcctattttaacaccacccatagtagcgacattgggggcggtgtgtggcctgcgaatgttgtcggtttgtatcaagcatgcaataaggctatatcaaataccgctgtccacatatatgactggatctgcgatatcattaaaaaaatagtatctttcatgtcaaaaaacgacaattgcactggcacaggagaacaaccgcagactaatgctgatcccgaacatacacaaggtgatgatcatgatatgaatgacaaatcaatacttgttaataaagaagtaattacaactacaaataaaaccagtaggaaactatcagttactttcaatgataaagctataaattactataatgatggaaacactgaatttaccaatcttgatggagaatctaaaaaattatcacgggcgcaacgagctacattacaactaaacaaacatttagatatcaatagtgagaaaccagaggtaccaatacttaccgattgtgatacagatgagtggacagatgattatgaactattgtttgactatgatgaagttgtcaaagaccttgaaacagagaacaaacaaaaattagacaacaccagcgaacacgtagatagtgactatgatcatataaatgatggcccactgcttaataatgaggatggtaatggtatagctagcaaggtcaaaccagacgaacccacagataataatgacacaattacaagcacgcaagcatcggaactacacaatattagccaacaaagtgccaaacaagatacgtcacatattacacagctggctgattacacctatataagtgatgtgaagacaaaactaaactttgatacgtttaaacctaactttgttggccgcatggtaatgactgttaaggatgatactattgttgcgaatattagcttaccgggggctgggaagttcggcattactgtgacaaagttggtgaataaaggtgaacacaaaataattgttaaggacaatgtttctacaactgatctgataatgattaaaaacgatgatgggtatagagtttatagccatcgtgagaataacgctttcagcatggaagcctttggcacagctattaagcacatatcaaaattgggtgggggccagaacagttcagcaattaatttaattagtgatatacttaaaacggtttaccagtttggtaaaaaactagtcaaattaagttcatacaaaatgttatttattgccggcaaagtaagccagcgttgcctaatgtctgacaatgattgcctcactacttacaggaaattatgtaaacgtataccaacaagttacaaattttctaaagaatatgagtattcaacaagcggtgggacaacactatcgacgattgaaatcatgtctgtcaataagagtccaacgaaactctttatcgcgatttttgaaatatttggcaaaacacgtgtcatcctttattcgaataatgtaggcttgaccaatatattagaacgactgctgttaacgaccaacgcacaatcatacaatgatgaagtcggtggctcagatggcgcaatatctgcattattaaagctcggtattaacgttaaagacatcctttaccacaataatgacatgggtgttgatgaaattaaaaaatggttatattcaaaccccctaaattcaatgttcagcacatcaaatgaaccaacacatacaagctataaatcattattataccaagagatgcacatgcacagtgaaatccgtgataaactagaaaaaaatgagactagtgggaaaaaaattgccttctgtatagcaagtggccacggtaaaactacgactgtgaatcgcattagaagacaaaatctagaatttagtattctagacgcggatgaagttcaagagcaagctagcatactaatgatgccgttcgtagataaaatgctcaactataaagctaagctcgaaaaatacaccgccgaacatcctacacttgacgctatgtttatccattcaccaatatgtgctcctcatgggtataagctagtgacaataatcaatgatgctgcggtttttccagttgatagagtatggtctcaagataacgtagaccatctcagcaagtgtggttcagtgacccatgttaacgggtatgatgatctatacaaactttgtgttagctatttaaataaaattagcacaggggatataacacttgagaatggtgcgacaattgttgacaacattgattcaatattggggtatgactttatgcataaccagccaggttatgatgatctgtttaggctgccagttgggacacaagacagacttgagtttagtaatggcaatcttgggttagggcaacagcgtgtatacgtcactggcgcgcatgtagacgttatgcggccaaccattagcaaattaccgtcagcactaccaaacgctatcacatcaagactaatgggcagacaaaaattacgtagcatgcacatgacaattgatgattatgaactcttaatgtcaaaaatgctagtcaatgattataaaaccatgttagaaatattctcgcatgatacaatatctattaattataaggatatattagattggttagttaacaaagggaataaactacaattactcgaaacaatgctcaagaaagttgttaacgatgaacatgctaccgatccagcaagcataagtgtgcattataaagttgaaaacctcatgaaagaacaagtcaatgacgtgcttgatcaagtaggtagggttattgtttggaacaaccagaatattaacatgtatgcctgcccattgattaacgaagcgaaagcacgttttaaaatgatgctcaaaccagatgtagtatatgctgatgggatgacaattgccgatctgaatgagtcaatatcgaaatacagatctaaatggttgttggaaatggatctatcgaaacaagacagacaaactgacatgccaatattaaaatatgaatgggatttaatgagaaggctcggagtgcctgaagactttattgaatttatgacatcgtttatgccaacttttaaaataactggttctaataatgagaaggcaaagctaccagctatacactttagtggtggagcaatgactagtattgggaatgagatacgtaatctactgttgattgctgactgcgttggcaataattattcggccatatacactctaggagatgacagcctagtactaatggacacaaagcctgacttagaatattacgatagaatttgtaggagtagacataatgtaataaatacggcattgtgtgataaacaatgtgctctgtttttacaaatgatcgtcaaccgtgatgcagatggaacgttttacttgtcacacaacttccaaaggctgaaagaaaaaatcgcatattcatcgtatcccaattcgagtagcgattggaaaatgaaatatgcggcatacctcatgatgatcggatacaccaaacaaacctataatgctatgattgagatgggattcgcaacttttccacacttgggtacgagtatgtcacaacgagtgtcagccaatgccatatacaataagatgccagaggtggcggtgtttaatttaataaatgatataatccaaacaaagaatgtcataagtgaggagattattatcgacacgacaatgataatgacgagaagtaacctgctgaatgggtataagagagtggggccgtatgttgataaccatacaaccatgcttagtactcttcaagagtactttaatgatcacaattaa

(The sequence listing continues in the following parts.)